United States Patent Application Publication US 2020/0377945 A1 - sequence listing, part 36

SEQ ID NO: 6664 - DNA, 31080 bp, Unknown
  gut microbiota DNA sequence
atagttctagaagaacttatccttttagaactttgaatttcaatcaaacactttaaaattcaatattatgttaaaacgactgaaatcagttagcatgttattgttcttgggaacattctctacaggaaccatttctgctgttacagcttccgaagttaacacttctgctatcgtacaacaaaatgaaacatgtaaaggtattgtgaaagacgccacgggagaatccattattggtgcttctgtaatagtgaaaggaaccaccaacggagcaattaccgactttgaaggtaatttcgccttaactaacgtgaagaaaggagatatcatcgtaatctcctatgtagggtatcaaaaacaagaaatcaaatggaatggtgggactctcaatgtagtgttgaaagatgacacagaagtcctgagtgaagttgttgttgtaggttacggtgtacagaaaaaggctaacctctccggtgccgttgcacaagtaaacagcgatgagttaaccaatcgccctatttcgaatgtatcaagcggtttgcaaggcttgatgccgggtgtaacaattactgcaggtcagggacgtcccggtgaagacggaagtaatatcagaatccgcggtgtaggaacgttgaataatgcatctccctatatcttgattgacggtgtagaaagtggttccatgaacgaccttgacccgaatgatattgaaagtatctccgtattgaaagacgcttcttctgcagctatctatggttctaaagcatctaacggtgtaattttgattaccaccaaacgcggaaaaaccggtgctccccgtatctcgtacaatggatatgtcggtattcaaaatgcaacggcaaccattgaccgtgtaagctctgccgattatgccagactgtacaatcgcattgacgatgataataataacccacatcgttattcggacgaagacatccgtttattcgagaatggttccgacccatacggacatcctaataccgattggaatgatgctgcctataaaacaggtgttctgcataagcacaatgtaagcatcaacggtggtacagaaaatgcaagatatatggcttctgtcggttatctggggcagacgggtatccttccgaattcagaacgcagccagtttaacggacgtatgaatttagacgtagatataaccaagaaatggcatgtgcgtatgaatttgtcctatatcaagaatgattataaagaccctaactcaaactatggtggtggttcttcagaccagattatccgtcagctcaacatcctaagcccgatgattcctatcaagaatgaagatggaacttacggttcaactaatgacggtaacccgattgcatggttggattcaaaatctacagtagataaatataaccagaactttaccggtatgttgtctgttgattacaaaattttggattgccttacagcaaccgtatcgggagcttatgttaatgatgaccaacactacaaggctttcgtaaagaaaatcaataatgacccggcacaggccgcacgtcctaacagcttaactgagtcatttacaaactggacccggtataactttgatgctttgttgaatttcgacaagcaatttggtgatcacaacttaaaagcaatgttaggttatcatgcagaagcatacgatgtacgctacaatgatatgtaccgtgaaaatttcccaaacaatgaattggacgatatgaatgcaggtgcaactgctactcaaaccaatagtggttttacacgagaattgaatatgttgtcatactttggtcgtatcaactacgattataaaggaaaatatttattcgaagctaacttccgtgccgatgcatcttctcgttttgctccgggcaaccgttggggatacttcccttcattctccggtgcatggcgcatcagtgaagaatcatttatggaaaccttaagagacagttggttgtcaagccttaagattcgcggttcttggggtcagctgggaaaccaggatgctttgggaaacggtactccgaccggaggagactactatccatggatgaatacatacaacctcggcgccaactatccgttcggaggttcgttagtgacaggatactatcaaggttcatacaaaatggcttctctttcttgggaaaaagctaccacttggggtatcggtatagacttcactttattcaataagctgaccggttctattgactactacaacagaaagaccacagatatcatcatgaatgtctccgtacctaaagaatttgccttgggtgcatacaaagataatgtaggtgcaatgaagaatagtggtattgaagttcagttggcctacaacgatacatggaacgattggaccttcggtgtttcgggaaactttgcctacaacaagaataccattgaaaacttgggtggagtagaccgtatggccgatggcagcttcatgcgcgaagtaggttctcccattaattcatggttcgtatatcgcacagacggatttttccagtctgatgaagaagctgctgcatggcaagccaaatactctgcaatggacggatatcctttcggacaagatttcaaggcaggtgacttacgctatgtagatgcaaacggtgacggtaaaatatcggctgatgaccgcgagctttatagaaccaaagatccgaaattcacatttggcttcaatattaatgtcggttataagaacgtagacttgtcaatgaacttcaatggtgctgccggtgtaggatatgcatttaccaaggaagcattcggtgaattctccggtagcgcaggacatccgtcaactgcctggttggatagctggacacccgaaaacaaaaatgcaagcatgccacgcatagcagaagcacgtgtatctccaagtgaagcttcgaatgtactttccgatttctggattatggacacaagctatctccgtatgaaaaccatacaattaggctatactcttcctaaaaattggatagagaaatggggtattcagaatctgcgtgtatactattcagcagaaaacttgctgacatttgacgatatgccaattaatgtagacccggaaacagtcagtgaacgtttgtctagttaccctttgaataaaacacattcattcggagtcaacattacattctaaactttttataatcacttaattaatacagaataatatgaaacgtttatcaacatatttattagcaggtatcgcattgctgtctgcttcatgttcagattttctggatacagctccgaaagatgccctttctcctgcaacaacctggaaaacagaaactgatgccgagagttttgtagtaggttgctacaatggattattagatccatcgtccattctttatttagattgcggttccgacataggttacaataatttttcatgggaaggatggcgtccttggggagacggttccttatccagcggtaacacaggtgcttcattctatgattttgccatcatccgccgttgtaatacagtgttagaaaacatcgacaatgtagaattcactactgcaggtaagaaagaagaactgatagcagaagccaaagccatccgtgcctatagatatttcattatgaactggtggtatggcggtgtacctatcatcggttcttatactacggctgaagaagcacaggtaccgcgtaatacggaagcggaagtacgcgaacagattgcacaggacttggacgatgcacttacagccatcaacaccactccggcagcacgcggacgtattgccaaaggagctgttttggctaccaaaatgcgcgaagcactatattacggtgactggcagaaagcaaaagatgcagctcaggctatcatcgatttaaaacaatacgaactggattctgattatgaaaacttattcaaactgtcaggcatagattctaaagaaatcatattggcagatcaacgcctcgaaagtgtcttcggactgggcgttatcggtcaaatgtataataatgatgatgcaggatggtcttcaattgttcctactcaaaatttggtagacatgtatgaaatggacaatggtttgactaaagaagaagctacaggctattatgatgccaaacatccttttgccaatcgtgacccgcgcatggatatgactattctttatcccggacaagaatggagaggaaagatattgaatacactggatgagaagctggcagacggttcaaaaaacaagaactttcctacttatacagacaatgcctcaaaaacagctttaacatgggccaaatatctagatccatacgaacagtattctaatatttggaatacagctgcctgtgttatcatattccgttatgcagaagtactgttaagttgggcagaagccgaaaacgaattaaacggtccatcagatcaagtgtacaactatatcgaccagattcgtgaacgcgtaggtatgcctaaagtagtcagaactaaatatgatactcaggataaattacgtgaattgattcgtcgtgaacgttgcgtagaatttgcaggtgaaggtttacgccgtgcagatatcctgcgttggaaagacgccggtggcaagatgttggcagaaactttaatgagcggtgatttaaaacgtattaccggtgctatcaattacagtgaaaccgatccgtacaaacgtgcagaagttaccggcacagcaacaattgaaacacgtaagtttgctccgaagaaccgttatttgccattctctcaaacggacgtacttgataagaatccgaacatcaaacagaatcccggatattaatctatcataacagagaaaaataacattcatagaaaaagggagtgtgccaaaactaaaccggcctatcccatcgtagctgtaggggcagggtttgcctgcccgaagacacaaagcaaactgttttcgggcgagcgaacctcgcccctaccaacgaaacgacagtattattcacgttttgacacactctttttctatgacagcacgacttaaactatctctttcccgaaaggagtaagtgccagtccagccaacttgaaatgttgcaaaccaaatggaataccgataatagtgatgcataataacaaaccaaaagctaaatgagacaaacttatccaaatacctcctaccaatatccaaagtatattcatcaaaacactcaagcaaccctcaccgccggggcaactgcgcacctgcataccaaacggacaaagtgccaaaactgacagcttcaatgtctgcagaccaaaaggaattccaatgatggtgaccatcaacaacaggctcgctataatgtattctatgcaaataaacagtccgcctaaaacaatccacaatatattcattactatattcatacggcaaatataaaaacattattcgtctttcagtgcttctacaggagatattttactgatattataagccggtatccatactccaatccatgttactatcatcatgataagatatacaatcaacgacactatcagaaaatgaactgtaaaatgattagtaatataacgcatattatcaccgggcgtcatacccgacaacacataaaatccatctttcagcacccattgaaaataaacaagacaacctatcaatactgctatggtagtcaacataccggcttcacccaataataaaagacgaatatgtccgggagacgccccataagacaatctcactcccatttcctcccgacgtgtacgggtactcaaccaaaatgtcccgctgactcctaaaaacaaattcaccagaaagaaatagcaaagggcatatttaatacgaatctcactggtagctccttcttttaaatcactttgctcacgtactttactgaaaggttcaatcttgctgataaacaacctccccactgccaaatactcttccatccaaggaataaaatcctcaatgaagcgagtttccgcaactccgggttttgtacgggcaaagacaatcaaacctccctcataggcccatgacggaatgccgtcagtacgtgcattgagacgaagataataaggctgcatacaactcttcattttgaccggttgaatcaacgccgttaccttcagaggaacactatctcttgcataaaccacacctccggtcagatctttatcgggcgaaagacaagcagcagcatccgaagtcatcaaaatactattcaccgtatattcggcattttcgaggctttcccaagtaccgtctttgaccgaacgtatccgccaggtttgaaagaaatcggtgtgcggaacaaaatccataaaagcaacacgaacactcattgtgtccaaagtaagattattaaaactgtttccacgcgaacaaggatagtggttattgactacataagtagccgattcgatttgctcatgacttcgaagccgttccatcaatttccggaaatcttccgggcgaatttcttcatcagaaggaaccacagaaagctgaagcctgtacaacccatctgcctcatagccatccggaatcgacttattatagaaaataacaaataagggatcgattaccatccaacatacaatggcaataacaatcaactccaacaatatccacacattacgcttacgcgaattccaaaggtttctaaatatatgatgcaacataacctcttatttttgtttattaatggaatacacaatatcttttcgcagagaaagatatgccggaataacggctgagaacaaatttatcaccacacatatcaggaaggcagccataaacagaacaggactgaacagcatttgaggagttatactcacacctaccccatcaggtaacgccgttacattgtcgtccagcaaagtaagcagccaatttttagataataacaccattccataagatataatcaaacccagacaaccgccaataacagtcaaaatcaggttctcccagattatttgtgaaaataagacacaagacgttgctccaaatgcttttctcactcctatctcgggcaaacgtttttccattcgtcccgatatcatgcccgataaattcaatgccggcactaacaacagcatcagcaaaacagctcctatctgacggaaaatcttcataaaatccaagtccgtcatagagtccacacggaataatgttttccagtaagcataaggctgtccatgccaaagcagtttatagccatcatgagaaatagcattaaactttcgggtaaattcatctacctgagcttttatgctgtcaaaatcggaagaggaacgtgccaatatgactacttcataggcacctagcgcatcgtattgattatacttatcataccccggaaaacaagtatatggaatccatacttgtgcatagctcagttccgtggcataactgggggttttgacaactccacatattttatactccacaaaatctatcgtaagatacttgcccaccaccttcgaagtattaaaaatccgttgcgccacttcctctgaaatgacaatgtgatgaatgccactggcaaaatcggattcgctaaagggagctccatctacaaagtcaaaatcgaaaactttccagaaggcaacatccactgctttttgaactaccggtatgcgatgttttgaagaaggcaactgagcataaccatctcctgccacataagttcctatagcagaaaccgcttctgtaccttccagattgtaaaaaaggtctttcactatattgtaggctatcagacccgtcgaattagaattggaattatcaacactctgcatgtgcacatccgatataaccatcatccgcgcacgattagtctccggataaattcctgctacctttatataataaataacaaccaataacataaccatcgatatggccaatccggttccaagtatatagaaaccactgaacaatggattctgcctgattaaatgaaaagcttgattaaaatacgttcttatcataatatacacatactttgtttctttattctcaaacacaaagtatatgccaaagtcatatcatattgataatcaaaccaataaaaaacaaatccaatgtccgaaaacgaacacttcacctaaaaccgaacagatagtctgtttttttatgaaatgcctcaacggatagtcatgcatttcaattcctccaatgagccattgaatatgttcaaatccactttttccctaatgccgggaagtgtacccacatcagtgtgctgccagaatttccagttgcctttatattccaccgaatcaacataataatgagcaatccaataaggataagaatcaaatatagaatcattaagatagcgggtcttgaacttataagaagtataaagaataggctttactttataatgtctctctattttatccagccatatttttaaatcccgacgaagagtccgggcatcatctccacgcttttcgatatcgagtacgggaggtaaatcacctgtgtccaactttacggaattgataaagaaatcagcctgacgaaccgggtctgttttcggattatagaaatggtaagctccgcgaataaatccataagccttggctgaatcaaaatttgcctgaaaaacacgatcaccataatctccgccctcggaggctttcatgaagatgaaatggatagggaattgactttgacgggtctgagtcagtcgttgccagtcaatatttccctgataatgggaaacatcaataccatgaatatgaaaacccgccggcatgcatacaccgtatgccttcagcccataacaaggtttccaacgataagaataaggacgaatgaagaaatagaagaaagcacttaaaaacacaacggtgattgctcccatcaggatataataaagccccgtcggtatttcccatttcttgactaccttctttttatgaggcgaagcatctttcttccgcgatttgcgcggagaggaagaagattttcgggaagttgtcttacgtggcttatttaccaccgatatgggcggttgcttactcatttagtgctgatatataccgaattattcaaagcaggggcgaactgaatcccccgaaaacacaacatgaagtgcatccggacgaaaacaactcgcccctacaatattaatatttctattcagaattatttaccttgttccaactgcaaagtcttagtcggctcgtcacaaacttctgtaggaccgaagtactggataggacccggatatacataatctgtttcagtagcccacttgtcacgcagtgaagcgaacttcttgaaaggagcaccgtccagtttcaccaatgctttctggataaccggtttcatttcgccgtgacgacgttccatattcatcatcattgtgataggcacaccaccggcaatccattctgcagcaggagctgtcgtattgcgaactgaagacatataaccggtcttgccgttagcaatcaacatagatgctgtgtagcccaatgaataacaatagtcggcatcgaagtttgacggagcagcgcaacgtccttcgtaaccgaagaagtggtgctgagcagcaaacttaccaacatacttgccttcttctttccattgtgccaatttggtagctaccatttcagacaacagtttttctgtttcaatcaatgatacctgtacgtttccgtgcgggtcacggtctaatgacaactggcgggctacaccttcgggcagtgaagcatagatagccgagttttctttagacaacttagaaatgatatattcacgttgatgagatttcttaatcaaagcaaattccgcagcattagcagccaggaagtcgttcaattcagcaatcaatctcttcatggcaggaataaactctaccaaaccttcaggaatcaatactgtaccgaagttgttaccctgagcagcacggtcggctacaatctgagcgatgtaagttactacatcatccaaagacatatctttagcttcaacttcttcagaaatgatacatacgttaggctgaacctgcaaagcacattccaaagcaatatgagaagcagaacgtcccatcaatttaatgaagtgccagtatttacgtgcagagttacagtcacgctggatattaccgataacttcggcataagtcttacaagcagtatcgaaaccgaaagaagtttcaatcatttcgttcttcaagtcaccatcgatagtcttcggacaaccgattacctgtacgccacaattcttggctgcataatattctgccaatacgcaagcgttggtgttagagtcatcaccaccgatgattaccaatgccttgatgcccagttctttgatgatttccaaacctttatcaaactgttcttctttttccagtttggtacgtcccgaaccgatgatatcgaaaccacccgtattgcggtattcgtcaatgatatcagcagtaagctccatatagttatggtcaaccaaaccaccggggcccagaatgaaaccaaacaatttgctgtctttgttcagcgccttgataccgtcgaacaaacctgaaatcacattgtgtccgccgggagcctgtccaccggacagaattacacctacattgatagcaggcaaattaacagcttcgccttcaacgaactgtatcaacggcattccgtatgtgttagggaacaatgctttgatagcttcctggtcagctacagactgtgtaggttcaccttccttaactttaactgcgcctttcaacgctttaggaagtttgggctgataagcagctctggcaatttgtaatgcacttttagtcatattctattattctatttaaaggtgtataaactcatttagaaatcacgtgcaaatttcgctcttttttcgcaaatatgaaaacgtatacaaataaaaatgctaactttaccgcgaaattagatttttgtattaacttaaaaacattacaattatggcaagtagaagaaatttaaagaaaaaaataacctatatagcaagcgatttattttttgctaccttgatggaaggtgttaaccgtgaagcagttattcacgcaatacataacgtgttggcattgattccgcgtatcagccacaccgagccgggcaatgtaaaaggcttctataagagattgcatgaagacctggacaaagaaataaaaatagtggcagacgaaatggaaaaagcatcaaaagcataacacggatttaaagaatgaagaaagctatttgtagttttatctactacaaactgttgggatggaagaccaaagtctccgttcccgattatgacaaatatattatttgtgcagctccgcataccaccaattgggatttgtttatcggtaaactgtttatgggggctattggccgtgaaaccggcttcatgatgaaaaaagactggttcttctggcctttgggacctatcttccgctggatgggaggtattccggtagaccgcagccgcaagagttcattggtagaccagatgataaacattgccaagtcgagcaaaaaatttcatttggccattactcccgaaggtacgcgcaaagcaaattcgaattggaaaaaagggttttactatattgcccaaggagccggtctgcccatcatattagtagctatagactacgaaaaaaaatgtatcactgccgaaaaggtgattcaccctagcggggatatagagaaagatatgcgtgaaattaaattgtattataaagatttcaaaggaaagcatcctgaactatttactatcgggaatattcaataatctttctttttaaaataaaacagcaaaaggggtgtgtctaaacgttgatgatgctatcattttgccggcaggggtgaggtttcctcttccaaaaaacagtttgctttgtgtattagtgactgttggttcgggcaggtaaaccctgcccctactgttaagatttgatagaccatttttattttgacacacctccttttaaatattccataagacaggccaagcattttcgtccttcagattaagacttttcatgcggcagattattacgtcccacaacaatgggatatacgtcctgctacagtgggacgtacgtcctactgccatggaacgtacgtcctgccgcagtaggacgtaataaccggacgtagaaaaagacttaacccaaaggaagaaaacacttattcttccctaagcttgcggcaagcacaaacctgcaagaaaaggaaaaagaaaacaaaacagaagcataacagctaatgtaaagcaaaaattaaagataattcatttcatttagatgagccgatacgggaatacggacaaatatttctaacttcgcatcatcaaatagaagcaattatgtttattaagccggcaaagaaaataataacgtcttttctgtttctggcggtaagtaccttctggatatcggcacaagaaccggaccggaatgtggaacaacgcttaaaagacttttttactaatttcgaaacatcatacgccaatatcggcaagtgcagactggaccgctacgaactgaatcacagtaaaaaagcgctgcatgtttatgccaatgcgaactttggttatcaacctttcacgcccgaaaatacagaagccatttacaggttactgaaacaaagtcttcccggtcccgtcaattactacgacattaccatttatgcagatggaaagccgattgaagaattaatccccaatatattacaaaagaaacaggataaaagcaggctgtggcaacgcatcgactataaaggtgctccttgggtacaaaatatgtcacgtccttatcttgcctctaaaggattggagggcagacacatcgcattgtggcaaagccatggaaaatattataaaaacaacaaaggaagttgggaatggcaacgtccgcgcttattctgcaccacagaagacctcttcacacagtctttcgtcgttccttatatcatccccatgctggaaaacgccggtgccgtcgtctatacgccacgcgaacgagaccggcagcgcaacgaagttatagtggacaacaacacagttacgggaaaaagcatttatctagaagagaaaagccggaaaggaaaatggaaaacatctcctttgccaggattcgcccgaaaacgttctgtttatacagacggacagaatcctttccgggacggcacggcacgcttcgccgcaacggaaaaaaagcctgaaaaggcttttgcacaatggattcccgatattcccgaaacagggaaatatgccgtatacgtttcttatcagacattgccgggaagtgtaagcgatgccaaatatttggttttccataaaggcggagtgaccgaattcaaagtcaaccagcaaatgggcggaggtacatgggtttatctgggcacttttgaattcgacaaaggaaccaacgactacggaatggtagtattaagtaatgagagcaaacaaaaaggagtagtgtgcgccgatgccgtccgctttggaggaggcatgggaaatatttcgagaggaggaagcatcagcggtcttccacgctacctggaaggagcacgttatgcagcacaatgggcgggaatgccctacggtatatatagtcccgccgaagggaaaaatgattataccgacgacatcaacagccgcagccgggttatcaattacatgagtggcggttctgtttacaatccgcaggaacaaggtttgggagtgccgtttgaaatgactttcggactgcacagcgatgccggcttctccaaagaagatgagctaatcgggacattgggcatttataccaccggcagcaataatgggaaattaaacgccggaatctcccgctatgcttcccgcgacctggcagacatggtgctgaccggactgcaacgggatatctctgccggatttggtattcagtggccgcgccgcagcctgtggaaccgcaattacagcgagacacgcctgccgggtgttccatccatgattctggaactgctttcccatcagaactttgccgaccttaaactgggacacaatccccggtttaaattcacggttacacgttcggtttacaaatcaatcctaaagtatacagccactatgcatggcactgactatgtggtacaaccattgccggtgagcaatttttcaatagccgaaggaagcaagaagaacacattccgtctgagctggcaggcagtagacgacccgctggaacctacggcaaaggcccgggaatacattgtgtacacccgtttgggacatggtggattcgacaatggtacgttggttcgcgatacgaaatatactttcgaagccgaaccgggactggtatacagcttcaaagtcacagccgtcaaccgtggaggagaaagtttcccttccgaaattctgtcggcctataaagccaaaaagagcaaaggaactgttttaatagtaaatgcattcgatcgcctaagcggtcccgctaccatagaatcgaattttatacaaggatttgacttaaagacagacccgggaataccttatataagcacaccggcctattgcggtgcacaacaaagttttgaccgaagccgcatcggacgggaaacaaaagacggactgggatacagtggcagtgagctggaaggaatgctgatagccggaaacacgtttgattatcctttcatacacggcaaagccatacaatccgccggaggatattcctttgtctcatgcagcgacgaagcagtggaaaacggattcgtccgactgacagactatccggtcacagacctcattatgggtgcggagaaacaggcattctcccctatcatgcaacaacttatcacggattattgccgccgtggtggaaacatattggtcagcggttcttatatcggcagcaacatgaacagtccttcggcactcggctttaccgagaacatactgaaatacagttttggcggaagcatgggcggaaaaacatcaggcactatttacggtgccaacacccattttacaattccctgcaccgtgaatgaaaaaacgtatgccgtacctgcccccgactgcctgactcctgtcgcaccggcttattccacatttatatacactcccggcaattacagtgccggcattgcctacaaaggcaattaccgcactttcgtattgggcttccctttcgaaagcatcgaaggagtgcagcaacggacacggataatgagtgccatattaggtttcttcggaagcaaataaggattttctatgaaaataaagaagcaaattagaggttatttcataaaaacacctaactttgtccgtataaaccattaaaataaggactatgtacactatacaaacaaatgcctcaggcacacgttgcatggaaatttcggaagaaaacctgcaaacaatcgagaaatacgctctatttcagcacttaatagacagtaacggcattgtagatgagtctgtactggaaaaattaaaactgaatatacgctcactgattaccagtgaagagggaaacaacaaagagttgctcgacctttgcatagatgtaatttatcataataacatgaaagccttcgggcttcatcaattgattttgctctacatccgctgggaaaaagaaaagaatcaggatgatgaagaaggaggccaaaaagaagaataaaaaggatttgaaagaacataaacttacagattggctgccgacaacaaagaaagaagttgaactgcgtggatgggatgacctggatgttatcttatttagcggagatgcgtatgtagaccatccttctttcggaccggccgttatcggaagattattagaggcacagggactaagagtagccatcgtgcctcaacccaattggcgtgatgacttgcgcgatttcaaaaagctgggacgaccacgtctttttttcggtgtatctgccggatgtatggacagcatggtaaataagtacacagccaataaacgtttacgcagtgaagatgcttatacaccggacggtcgtcacgatatgcgtcccgaatatcccagcattgtatatacacagattcttaaaaaactatacccggatgtgcctgtcatcttgggaggtatagaggcttccttacgccgcgtcacccattatgactattggcaggattgtgtgcagaagtctattttaatagattcgggagcagatttgctcatttatggaatgggggaaaagccgattacagaactttgcagaaggatgaaagcactgacggctgctgccggacagacacacgggtctgctcctatagcagccggtcttcctgttccacatgatatcttacaaacagcctacataatccgtaagggagaccccgtgtgtccgctccaaaacatcagcacatcatccgagcacagtaaagaaaaaccggatatcatcctccactctcatgaagagtgtctgaaagataagaagaaacaagccgaaaacttccgcttcatcgaagaggaaagcaataaatacgaagcttcccgcatcctgcaggatgtgggaaacaagaccgtagtggtcaatcctccctaccctcccatgacacagggcgaactggatatgtctttcgacttgccatacacccggctgccccatcccaaatacaaagggaaacgcatcccggcttatgatatgattaaattctccgtcaatctccaccggggatgtttcggcggatgtgctttctgtaccatttctgcccaccagggaaagttcatagtcagccgaagcaaggaaagcatcctgaaagaagtgaaagagattacagaaatgcctgatttcaaaggctatctgagcgatttgggaggaccgagtgccaatatgtatgccatgcacggaatggatgaaaacaaatgccgccgttgcaaacgcccgtcctgcatccatcccaaagtatgtccgaatctgaataccgaccatcgcccgctgctcgacatctatcgctcggtagatgccataccgggaataaagaaaagctttatcggaagcggtgtacgttatgacctgttgcaataccaaagtaaagacccggcgataaaccgaagcacagctgaatatacacgcgagctgatagccaaacatgtgagcggacgactgaaagttgcccccgaacataccagcgatcaagtattgcatatcatgcggaagccttcgttcgcacaattctatgaattcaagaaaacattcgataaagtgaacagggagctgaatctgaaacagcaaatcattccttattttataagcagccatcccggatgcacagaagaagatatggcagagctggcagttatcaccaaaaggttggacttccatctggaacaggtacaggacttcactcccactcccatgaccattgctaccgaagcctggtatacaggctatcatccctatactttgcaaccggtcttttctgccaagacgcaaaaggaaaaattggcgcaacgaatgttctttttctggtataaacccgaagaacgccgtgctatcatcaatgaattacgcaagataggccgcagtgacttgatagataaattgtatgggaaataactattcccatacaatttattattttatcatccggatacttagatgaatccgggtaactttatcgcttgaaacggtaaaattcttccgctacccgaaaagcctccctcaggcacctccggcatattccataaacctgataacccacaatattccaactggttctctttttcccttaacaaataaaaaagtgctcctatacctttgaatatcacttatttttttatctttgggaagtaacttctaaatcaatactgcgtatggaaacctatcttttctggattgtacccatcgcctctttattggcgttggtactcgcttggtatttctacaaacaaatgatgcgtgaaagcgaaggaactcctacaatggagaaaatcgctctgtatgtacgtcaaggcgccatgtcctatctcaaacagcaatacaaggtagtgggaatggtattcctggggctggttattctattctccgttatggcttacggcttccatctgcaaaacgcctgggtgcccgttgccttccttaccggcggtttcttctccgggctttccggttttttgggaatgaagaccgcaacgtatgcttcagcacgtaccgccaatgcagcccgtagctctttaaacaaaggtctgcgtatcgctttccgaagcggagcagtcatgggactggtggtggtaggactcggcctgtttgatatttcgttctggtatctattgctggataaatgtattccggcagacgtcatgaatccatctgccaaattgtgtatcattaccaccaccatgctgacattcggtatgggagccagcacacaggctttatttgcacgtgtcggaggaggaatttataccaaagcagccgatgtgggtgccgaccttgtaggcaaagtagaagccggcatccccgaagacgacccgcgcaatccggcaaccattgccgacaatgtaggtgataatgttggcgatgtagccggtatgggggcagacttgtacgaaagctattgcggctcgattctcgccactgctgcattgggggctgctgcctatataggtacaaacgatacaaccatgcaatttaaagctgttatcgcaccaatgttgattgctgccgtaggcattctcctttccattataggaatcttctctgtcagaacaaaagaaaatgcaggcatgaaagagttattaggctcactggctgtcggaacaaacttaagttctgctttaatagtcgttgcaactttccttatcctttggatactgaatttacaaaattgggtaaatatctcatttgccgtagttgtcggattgatagtaggaattatcatcgggcgttctaccgaatattacacttctcaatcatataaaccaacacaacgtttggccgaaagcggaaagaccggtccggccaccgtaatcatctcaggtatcgggctgggtatggtatctaccactatccccgtcttggcggtagtagttggaattatcctttcttattggctcgcatcaggttttgattttgccaatatttccatgggactgtatggtatcggaattgccgctgtaggaatgctttccaccttgggcatcactcttgctactgatgcttacggtccgatagccgacaatgccggaggcaatgcagaaatgagtggattgggtgaagaagtgcgcaagcgcacagacgccctcgattcgttgggtaatacgacagccgcaaccggaaaaggatttgccatcggttctgcagcgctcacaggtctggcactgctggcatcatacatagaagaaatacgtatcggactgactcgattgggacaaacaattttagaactgcccaacggcattactgttgaagtacacaatgcaagtttcaccgattatatgctgtactatgatgtaacactgatgaatccgaaagttctttcgggaatttttatcggtagcatgatggcatttttattctgcggactgacaatgaacgcagtaggacgtgcagctgcccacatggtggaagaagtacgcagacaattccgggaaataaaagggattctgaccggtgaagccgaacccgactacgcacgatgtgtacaaatttcaaccaaaggtgcacaacgagaaatggtattcccatctctgctggctattattgctcccattgccaccggactcttatttggtgttccgggagtaatcggactgctgattggcggtttgtcatccggttttgttctcgccattttcatggcaaattcgggcggtgcatgggataacgccaagaaatatgtggaagaaggcaattttggcggcaaaggcagtgaagtacacaaagcgactgtcaccggagacacagtaggagatccgtttaaagatacatccggtccaagcctgaatatacttattaaattaatgagtatggtagccatcgttatggcaggattaaccgtagcctggagtttgttctaaaccgattacagtctcatttggtaagcttaaattccggttttattagtatatcaacatatttttgtgaaaaaacgtgttgatatattatttttttatacctttgcagaatcaccaaaatatttttaaaaatgggactatcaaatttaacaaagaaattcttaatctgtgcattctctctttgcacagttagttcttttgctcaggaagtgaaagaagaaggtaaagtggtgttcaaccctcattggtttatgcaaattcaaggcggtgccagccatactttgggtgaagctagtttctcggatttgatatcaccagctgcacaagttacagggggttaccaattcagcccgttatttggtctgcgtgccggagtaagtgcttgggaagctaaaggagcatgggcttctccttccaccgtgtataaatataaatttgtacagggcaacgtagatgctatgttggacttaagtgctttattctgcaaattcaatcccaaacgtgtattcaatgcttatggtttcttaggagtaggtttcaaccatgcatttgacaatgacgaagctgtggctatcaacgcacagggacatgagttaagatatttatggaatgacagcaaaaactttattgtaggacgcggaggtttaggcgcaaacattcgtttgagcgaccatgtattcgtcaacttagaagtaaatgccaatgcgttatccgataaatacaattcaaagaaagcaggtaatgcagactggcaattcaacggattggtaggtttcacattcaagtttggcaagacttacaagaagacagaacctgtttattatgaaccggctccagctcctgctcctaaaaaagaagagcctaaaccgcaaccggttgtaaaggaagagcccaaacctgtaaaagttgaagcattgacagaaaacatcttcttcgttatcaactcttctaaaattaaagaagccgaactgggtaaagtaaacagcatcgtggactatttgaataaatatcctaatgctaaagtaactatcaccggttatgcagacgttcaaaccggtactgccgcttacaacaaaactatctcgcaaaaacgtgccaacgccgttgcagaagctttgaaagccaaaggtatcactgaaaacagaattaatgtagattacaaaggtgacacagttcagccgttctcaacagctgaagaaaaccgtgtttctatttgtattgctgaataatcaataacctactctgcaaaaaagaggcagtccctacacagcgagactgcctctttttcttttcccaaacgaatatgcggaaatcttacagattatttttattcaaaatatcacattgacatttctccaatacttgcacgcatttcttcaaatcattaggacgtataaccacatttgccgtatcaccctgagcaaaagcatacatgtattcaataaagatttgttcgacagccagacattccaggattgccgacaacgaacctgctacattcgggcaactgatacataccacatcggtcagcattacagcaaagttttctgcacggagcacttccactgctttatcgacatcagaaacaatcagacgaaggattccaaaatctgtagactcagccatgctgaacgcgtgcatattaatgtcatacttcgccaacgtctttgctacatcattaattcttccggttttattttccagaaaaacagataattgcttaattgtcatattgcgtaaagtttttattttaatactcgtttatctatcacgtgcttgctctttccttcactacgactgatactgttcggctccatcagtttaatatccgcactgatagaaagcacactctttaatttgtcactcaatgtctttttcatggcaagcatacgtcctaaatcatctgagaagaagtcacgacgaacctccacctgaacctgaagaatatcaagattattttgcctgtcgacaaccagcatatactgaggttcaaattcaggcattcccaaaataacactttccacttgtgaaggaaagacattgatgccacgaataatcaacatatcatcactacgtcccatgatgcggctcatacgaacactggtacgaccacaagcgcaagtaccctccatcaacgaacataaatcctttgtgcggtaacgcaacaacggcattccctctttggtgagcgtagtgaataccaattcaccctgctgcccgctgggaagttgttccaatgtttcaggattgattatttcagggtagaaatggtcttcattgatatgagagccattttgttcctggcactcgaaggaaacgcccggtcccatgatttcgctcaatccatacagattataacctttcaatcccaaccgctcttctatttccttacgcatattgtctgtccaaggttctgcaccaaaagcaccgatacgcaattttatatcatctttggtaagccccattcgttccaccgtttctgccaaataaagggcgtatgatggagtacaagcgataccggttatacctaaatcacgaatcagacgcacatgcttttcagtatttcccgtagacgccggaataaccgttgcacctaaattttccacaccataatgagcacccaaaccaccggtaaacaagccatagccataactcaccgagaacgtatcttcccgggtcaccccataagcggcaagacaacgagacattacttccgaccatacagataagtcacgacgggtataacctacaatagtaggatttccggtagtgcccgaagaggcatgtacacgcactatttcagaagcaggagcagcctgaagcccataaggataattatcccgcaaatcctgtttggtagtaaaaggaagtttcacgatatcatcaatgctacggatatcatcgggagacaaatccatctcctgcatcttattacgatagaacgggacattatgatagaccagtgcaaccaatttctgcaaacgcttgctttgaagcgcatgcatctcatcccgactcatacattctttatttttgttccaaatcatagtaatagattgattttatttgtgttagtctttcatctatcatggatggtcttcatggaaagctttcatacgttcttccatgacaggatacagctcctctctcattcttgatgtgcaagcccgcacaccttcctgctcacttccggtagtggaaagagaaatactgctcacaccataatacaacaattcacgcagcaactcaccacctttcatcttgccataaccgatagtgaagaaaaatccgtctccaaccacctgagtcgcatcataatcataaacaatgtggaaaccgttgtcggtaaatatcttcttcatgcgttcggcacgacgggcatactcacgcgtatcctccacaaaattaatcttaccttcggtagacaaacggagcatctctgcataagcatattgagtagatgccgtacaacctgaagttatcatataaagaatggaagctatcaaagtaggtccgaagacacctgcatctttatagcgttctgccaatgccggatactgtcggtcgaacaacttatcactaatacatgtcaatgccatacgctgacccgcataactgaaaatcttggaagaagacaacatcagaatataattatccgtataatgcgctactgtaggaggataaggcggctcaaacggatgtcccaaatcacgacggaaatccatgcagaaataagccaagtcctccatcacaatcacatcatattttgttgccagttcaccgataatagccaattcttcctcttccagacaaatccatgccggattattcggattggagtatacgatagcagcaatttcgcccgtgctcaacatgctttccaatttatcatgcaaagcagccccccgataagcataaatatcaaattcttcccactgcacccctataatgcgaagctgggatttctgaatcggaaatccgggatcgataaacaatactttattttttccggaaatgcgctgcgtacaagcaataaacgaaccaaacgaacctgcaaccgaacccgtagtcggcacacaggcacgcggagaaatttctacattcataaatgcctttacaaaacgagaagcttcattctttaattcagccacacccgcagcggccggatattgtgaaccgaccccccggtcgagcgctgctttctcggcctctatacctatttgattggcaggaagccccggagagccttgatccatccgaataaaaggaataccggtttctttctccaaatattgagcaaccaacagcacatcgccgatagttgcctgtgagaggtcggcaatatgcagttccgacacagctctttctaccaattcttcactaaatattttcatagcatcctaccgattctttgccgcttccaaacctatatcaaaagcccgcttattcatttccactatcttctcacctttagaagcgaacacccgaccgatactttcgcgcagttgttcaggtgacagaattccaataaatttagcagccatgcccaacaagatgacattcgcacatttcggcatattattttccttcgctatatcttctatttccagtttggctacacgcggaagactattcagcgtcttcatcaattcttcctcatcgggataattgggaatattcttaaacggatttgcagaagtaaccacccatccttctttttccaaataaggcaaatagcgcaaagcctccataggctccatagaaataatcaaatccgcttcccccaatgaaatgagatctgaatggattgtttcgtccgaaagacggagattagactgcacatcacctccccgctgactcataccgtgcacttcggcctgcttcaagttaagacctgcaacagttgcggcttcgcctataatagtagcgatagtgaggataccctgtcctcctacccctgaaagtataatatcttttctcatgccttttctactcttttctgtctcaatttacgatttaaagtctgcacacattcacggcgcggaatgataacagacactcctttatattctatttcttcacgaatgatacgagttatttcctccatattcttaggcaacggaaccaccactcgtacatgttcgggttccacccccaatcccagacaaatagcttcaaacttatttgtacctgccgaatcctgtccgccggtcatggctgtggtcaggttgtcggaaataataatcgtgatattcgctttatcattgacggcatccaacaatccggtcatgcccgaatgagtaaaagtagagtcaccgataacagaaatagcaggaaaaacgcctgcatccgcagcaccttttgccatagtaatagaagcccccatatccacacaactgtcgatagcacggaacggaggtaatgcccccaaagtataacaaccgatatcaccaaagatacgtgcaccgggatattctgcagcaaccttattcaaagcatcatacacatcacggtgtccgcatccctgacataaagccggaggacgaggcatcaccacctgcggagtgacaaaaggagatttggtagcccaaccgatagcattacccacattgtcaggagtcaattcacccgtacggggaagatcaccggtcaaacgacctttcactgtataatcgctagaaagaagagctttcacctgttcttcgacaaaaggctgtccatcttctacaaccagaatatatttgcaacaatcagccatcttctgaatctcttctgccggtaaaggatattgtgatacttttaatacaggaacaggtgaatcgtctgtgtcacattctttcacataattatatccgataccgcaagctataataccaaactcataagagctgtcaggattgaaattttccaaaccattgtatggcgactttcttgaaaccttttccagcagttcttgcttctttatcaaaacagcatattgattgcgcgcaatggccggcaatagcacccaatgggtacgttcactgtcaggattcagttggttttcttcccctacttcccccactttcacaccggcacgtgaatgtgccaaacgagtaacgacacgcatcaataccggcaacttcaattcttccgaaagtgtataggcatcatgcatcatatcataagcttcttgttggtttgacggttccaaaatgggaagcatcgcaaactttccataaaaacgggagtcctgctcattttgtgaagaatgcatggaaggatcatcagcagccaacaccaccagtccgccgttcactcccgtaatagccgaattgacaaaagcatcggcagccacattcatacctacatgcttcatgcagaccaaagcacgcttgcctgcataagacatgcccaaggcagcctccattgccgtcttctcattcgtacaccacgtactatgcaaatttctttcctgtgccagcttattattttgaatgaattccgtaatttctgtagacggtgttcccggataagcatacacacccgatattccggcatgtatcgctcccaaggcaatcgcttcatcgcccaacaataatcttttttctgccattatctatttattttattagttattattcgattctatccgttcttttttatagcaagctaaaagaatcggcatcattcagcaccggaaatttctcacggaatgctgctaatttctccatatctatctctgcagtgacttcactttcacaactccacggacattcggccattgtctttccgtatggatctatgatggcgctcccacccgaatattcacaagccgggtcagtccccatccgattaactcctgccacatagcattgattttctatggcacgggcacggagcaaagcactccatgcatctacacggggagtaggccaactggccacataaagtatcatatcatagtctcccaaattacgagaccacaccgggaagcggagatcgtaacatacttccaacaaaatacgcacaccccgatagtttaccaccaccctttgcgttccggcagtaaaccgtttatcctctcctccataagtaaataaatgctttttatcataatgctgcaccgagccgtcaggatgtacaaaatagaaacggttataatattttccattttcctgcactgccacacttccggcaacagcacagttacgctcgaccgctttacgctgcatccaatgcaatgtttcactgtctgcactctcggccacaccctccggcttggtacaaaaaccagtggagaacatttcgggtaagacaaacaaatcggcatccggcaaacgattaatagcctcatcagctctctctacatttgcttgaggattcgcccattctatatttctttgtagaattgttattttcattgtttttcatattataagacccacaaaggtaacaattataataagatggcaaacattttatcaccaactatttcctttacagcacatttttcttatattaaaaacacgaaaatcccgcaaatacattatattcatgtccactccattgaagcatcctatttagacagccatcctcttataattcacgaaacaacaaacccaccactatgaaccgactaatatttttcatttaagatattcacggaagaaccgttctattctgtcaaacggaattacgtttagattatcatacaaatccacgtgactggcatcgggaatgattagcaactccttgttcccgcctttcaacttcttgaaagcatcttcactgaaataacgcgaatgagctttttctccatgaagcatcagcacagcactccgaatctcatcactatacgaaagtataggcatattaatgaaagaaagtgaagaagtcttgttccacccattgttagagttaagcgaacgcttgtgataaccgcgttctgtcttataataactatgataatccttcaagaattggggagcatccacaggcaacgggtccaccacccccccggccaaagcatacgaaccgttcctcgcatcttccgtgcgctgagcattgagctgcttacgcaattcgtaacgtgcatcggcattcattgagtcaaaatagccattggcattcacacggctcatatcatacatggttaccgtaaccgttgccttgattcgggtatcgatagccgctgcattgagtgccataccaccccatccgcaaatacccaaaataccaatacgctctgcatccacatcgtcacgaatggacagaaaatccactgctgcacaaaaatcttccgtgttaatatcgggcgaagccacataacggggttctccatcactttctccggtatacgaaggatcgaaggcaatcgtcagaaaaccacgctccgccaaggcctgtgcatataaccccgacgcctgttccttcaccgcaccgaaaggaccgcttacagcaatagcaggcagctttccttcagcattgcgagggatatacatatcagcagcaaggataataccataacgattacgaaaagtcactttcatgtgatgcactttatcactttgtgggaatactttgtcccactcctgaaccaaactttgtttttgatctatcatataaacactattaaaataattattatctaccgcaaacaggtttcccatggcacaaagacttatcgtcgttactgcacataaacttcttaatgactttttcatgctgtttcattattaattcttactgtagcaaaagtagcagtttacatcatatttcattgtacctcaattactgatgttccaacctcaattacagttttcttaacctatgagtttcaaccctactcattataagctgtaaatcaggtcatataatcagtaatccgggtaataggaaagcctgaatgattatttacttttgcagagcaagaaacagaaaccgaacaatgaaaaagattttagacttcaagactgtatgcgagtgcaatcgaaacttaggttgcaagacatggcatccgcaagtaagcatcatcaatttggaaaatctcaatttgaaacaggaagccgtgaagtttgatttctataccatcctgctcattgaggaatgtcccaacagctgctgttgcggccgtaagtattacgacttttccaatacgacaatggtattcctcatgcccggtgagatatttcgcatgagtgaagagaacacacttcccgacaaagggtatctattagcctttcatcccaatctactatctcagacttcattgaaaagccatatccaaaactatacctttttccaataccggaaagaagaagcactccatctctcccaacgcgaaacatcaaagataacctgttgcctcgaaaatatagaggacgagttacatcatccaatcgacacacacagcaacaccatcctctcaaaacacattgagctctttctggactattgcacacgctactacgaacgtcagttcattacaagggaaaacaaaaacaaagctattttaaaaacagcagaaaagatactcgacgattacattgcttccggtagactacaaagcggcaagctccccacgccctaccatattgcaggaaagcttcatctctcagcagcctattttaatgacctgctgaaattcgagacaggcaagacatgggaagaatacgttcaattcaagcaactggagaaagccaagcatttattacagaaaaacgacaatagccctattgccgtagctaaacagttgggttaccccaacgtacaatattttagtttcatctttaaaaagatgacaggctgtacaccgaatgactatcggcactcacaaaactaaaagaccttgagtgtttttaaaagataaaccttctactcatgaaaactctatgtgaaacctcattcataactacccctgaaatgataaacaagctgcgaaaaatcttctgatctttcattgtctatccacaattctgtcggtgaaatattaaacatcataaactggctatatatttctgcatcacctccaaaattttgagagaattctattctcactgacaatggagcaccatatccgcctaaaatgactatattttcagggtgcaggacaaagttcatgacaccttgatccatctgatggaattcatatcctgcttttacttcaacatcacctatttcccttaagtgccgtgatatgttctcatctttaatcatctctgcaataggcgataaaggcaatttaaatattagagaatcttttgacactgctattccatcgggaaaggttgcaatttccttacctctataatatgaaacttccacggcacccttgtacgtgcctttcatatcaaaaagtgcttgttgaatctcagtagatgaaaattcagattcatcgtcattacacccggaaaatcctatcacacaaaagaataatactactatccttaacagtccctttgttttcatatcataaatcgattaattattatgttacccccaatacatacatatgcctttatcatttaaagcaaaactacacaaatattttttagtcgacgaataaaaagcaatttttttattcgcattttgcatttccttgatacacgctcagtacttcatttcgttttgcggtttataactaagccgaaacaatacagagaacttaaataaactaaaaacacccaattttacattgtagggtgtaaaactgggtgtaattcttgtaaactattgattttcaatgtttattgcggagagacagggttttgaacctataactctaaccgcttatatttcagctactttgctttcaaaatttcaaataggtaacgaaacagtaacgattttcaaccgttaagcctgtccaactttgaccgctgtttgtctgcctaactttcgggttcaaagatacggcattcttttgaaactcgcaaatatctgataataaatatttttgggttagtgcaaggtgcaagctatatatataaatatatacttgcaccttgcactaaaaaaaagcactggggtacaaatggttaaaacaaaatccgtatcttcgtaaccgattaaaaacaaacgtgt

SEQ ID NO: 6665 - DNA, 38327 bp, Unknown
  gut microbiota DNA sequence
atgctgttcctaatgggagcctctaccggagcagcgtatgcggttagcaatcccggcataaccgatgtgaaaattgcacagcaagacggagcttgtaccggtatcgtaaaagatgcaaccggtgagaccgtcattggagcttcagtagtagtaaaaggtactactaacggaacaatcaccggaattgatggtgacttctctttatctaatgtgaagaagggggacgttattgttatttcatttgtaggttatatcagtcaagaaatcgtttgggatggaaaacctgtcaatgtcactttgaaagatgatactcaaacactggacgaagtagtggttgtgggttatggtacacagaagaaagtgaatgtaaccggtgccgtgggaatggtggattccaaggttattgctgcccgtccggtgcaaaacgtgtcgcaagcattgcagggtgttattcctggtttgaacttgacagtaggtaactcgggtggttcgctggacggcgaaatgaacatcaatatccgtggtacaggtactatcggtgatggttccggatcttctccgctggtgttgattgatggtattgagggaaatttgaatactgtaaaccctaatgacattgaatctgtatcagtattgaaagatgctgcatcggcttctatttacggtgccagagcttcgttcggtgttatcttggtaacaacgaaaagcggtaaaagtggtaaaaccaatgtcaattactctggaaacgtgcgtttcaatgatgctattggaatccctgaactgatggattcttatacttttgcacaatatttcaaccgtgcttcatccaaccgtggtggtggagatattttcagtccggcagtgatggaacgtatcaaagcttatcaagaaggtacattgacagctactaccgtagacaatggttcaggtatttggcagaaatgggccaacgccaacggtaataccgactggttcggtgagttttatgacaattgggttccttcgcaggagcataacttgagcattagcgggggtacggaaaaacttcagtatgtattgagcggcagcttcttggaccagaaaggtttattgcgccacggtactgataaatttcaacgctatacgctgaacagcaaaatcacagcaaatatcactgattggttgaaagtgaccttaaacagcaaatggactcgtgaagattttcaacgaccgacttacttgactagcagcttcttccataacttggcacgtaaatggccggtacatcccgcttatgaccccaatggattccctatggacgaaggtgaaatagaacaaatggaaaacggtggtgagcagaatagtcagaaagactattataccaaccagttgcatgtagttatcgagcctattaagaattggcgcatcaacttggaaggaagtgtgcgtaccactactcagtatcagcattgggaagtattgcctgtacatgcttatgatgttaatggagacccgtattacacagtatgggatatgggatacggttcttattcagccggttcttcacgtgtagatgagtattcgtggaaagaaaattattataccactaatatttattctgactactttaagcaatttgacaatggacattactttaaggtaatggcaggtttcaatgccgagctttacaagaaccgcagtattgaagctataaagaataatttgattagtcccgatgtacctaccattgatacggcaacggatgatccgcaagcttacggtggttataatcatacttctgtagctggtttctttgctcgtatcaactggagttacaaagaccgttatatgtttgaagccaacggacgctatgatggttcatcacgttttgtaggtgacgaacgttggggattcttcccatcattctcagctggttggaacattgccaatgaagagttcttccaaaagtttggagaaaagacaaagatcaacacattgaagttgagagcatcatggggacagttgggaaatacgaatactaatgatgcttggtatcctttctatcagactatgcctacgggtagcaactacggatggttggttaacggagtacgccctaattactcttacaatccgggtatggtcagcctgttgaaaacatgggaaactattgaaacatgggatattggtttggactggggagcattcaataaccgcttgacaggttcgtttgattatttcgttcgtcatacaaaagacatgattggcccggccccggaattatcatctgcactaggtactaccgttcctaaaatcaacaactgtgatatgaaatcttacggttttgaacttgaaatcggatggagagatcaaataggtggtgtgaaatacggtatcaaagctcttttgtcagatgaccagcagaagattacccgttaccctaatgaaagtatgaatgtcagccaatactacaaaggcagaatgttgggagatatttggggattgaccactattggcattgctcaaagtcaggaagaaatggatgcacatttggcaaaggtagaccaatctacactgggaagtaactggggtgcaggtgatattatgtatgctgaccttgatggaaacggaaaaatagataacggaagcaataaactgggagatacaggtgactatcgcattatcggtaataatactccgcgctataaattcggtttgacactggatgcggcatggaaaggttgggatttccgcgtgttcttccaaggtgtagccaaacgcgatttgtggttggacggatgttatttctggggagccaatgcacaaggaaacgaatggcagtctaccggttttgttgaacattgggatttctggcgtcctgaaggagaccccttgggagctaatttggatgcttactatccgaaagtaaattttgatggtggacgtaacgcacaagtgcagacccgttatatacaaaatggtgcttatatacgtatgaaaaacatccagttgggatattctctgccggaagcatggattaagaatgccggtatgtcatcggtacgtttttatgtatctgccgacaatttgctgacctttaccagtctgtcggatatcttcgatcctgaagctacaggaagtttggccggaacaggtcccggaaaactctatccgttgcaaaaagttatttcattgggtgtaaatgtcaacttctaaaaaagattaagaactatgaaacttaaaaatatattatttcaggcttgtgccttggcaggaggaacaataattctttcttcttgcaatgatttcttggacagggagcctctgtcatcggtaacaccggaagtttattttagtacaactgaccattttgaagcttattctatcgccaaatataacaactggttttcaagccatgccggatatggtatgggaataggtaatggtgacggaggaacggataatgctgtatccgggggctataattcaacattgtatgaaaaaggagcatggaaagttcctcaatcaggtgggggatggtctttcaatgatatccgttattgtaattatttctttgaaaacgcagttcctaaatacgaagccggccaggtttcgggtagtgctgccgacatagaacattacattggcgaaatgcatttcatgcgtgcatggatatactttagttatttgcgtaagttcggtgattatcctatcattaccgaggtacttcctgatgataaggcagtgctgatggaaaaatcggtacgtcaaccccgtaacttggtagcccgctttattttggaagacttggataaagctatcagtatgttgaaaggttggggatttgcttccaacaaccgtattaataaggagactgctttgctggtaaagtcacgtgtcgctctttacgaagcaacgtttgaaaaataccataaaggtacaggccgtgtaccgggtgatgcaaattggccgggaaagaaagtgcatcctaatttcactttggatgtagacaaagaagtagatttcttcctgactcaggctttggaagcagccgaacaggttgccgacaaagtcaccttgactcaaaacacaggagtagctgatccggaaactatcagcactacttcaggatggaatccttattttgagatgttcgcttcacttgacctgagcaaaaacttggaagtattgctttggagatcgtatgctaaaaccggaagttactccattactcacggagcacctgcatgggtgcagtcaggaagcaacaacggtttgctgaaaacttatgtggaaagcttccttatgaaagatggtatgccttggtatgcagctacaacttcagctccatacatgggtgataagacattggatgatgtaaaaaccaaccgtgacgaccgcttgcaattgtttgtgttcagtgaaagcaatttcttgcctgttcattcacagcaaacagcaggtacagttcaatatttcatgccgcacccagtatcaaaccgtcaggaaatgcaagaccgcaccggctatcgtcttcgtaaatatgccagcttcgaccttacacagaatgtatggggtaaagctgaatcaactacaggttgtatcatcttccgtggtgtagaggcttatctgaactatatggaagcttattatttgaaaaacggaagaatagatggtaaagctgccaactattggagagctgtccgtgaacgtgcaggtgtggatcctgatttcaacaagaccattgctgcaacagatatgaacaaggaaacagactgggctaaaaaatcgggtgatgaaacagtagatgctactctgttgaacatccgacgtgaacgtcgttgtgaatttatcggtgaagatatgcgttataatgacctgatacgttggcgtgctatggatgacatgttgtcgaagaagttcattccggaaggatgtaatttctgggacgagctctataaagtagctaacaaagacgaaaacggtgctgaaatagaatacagatataccggttctgaaggttctaatatttctgatccttctttcaaatacttgcgtccttactctgtcatgaaagacaacaaccctgtatatgacggatatacttgggccaaggcaaactatttatcaccgttgcctatccgtgaaatagaactgttgtcgccggatgaaaatgtagaaacttctgttctctatcaaaatccgtattggccgacaacgatcaacggtactgctatagaataaacgaaagatagtaatatgaccgattaggtggagtaattccactgttgattcttaaagaaaagagagtaatccgtgatggactactctctttttttgtcttcttggagaggtttggaataccattatttcatcttatacaccaatgttcctcccttcaatatatcttcgtgtgagatatagttcttggtataaggctcaccgttcagcgtaatgctgtcaatgtatttatgttctttggagatgccgtctgcaatgacggtaaatgtctttccgtctgccagatgaagcacaatcttcggcatttgcggagcgccgaacacatagtttccgcttaccgggtccaccggatagaatcccatggcagagaacatataccacgcagacatttgtccgcaatcgtcattaccgcaaaggccgtcgggctcggggcgatactgggtatcaaatatttcacgaaccaactcctgcgtacgttcgggacgtcctgccaacgcatacagataagtaatgtggtggcttggctcgttgccatgggcatattgtccgatgaggccggtgacatctgcctgagtcgtttccagtttgagtgtgaacagcgaatcaagcttgttcaagaaaggtccctcgccgccaaagagactgatgagtcccggaacatcatgctgcacatgccaagtatattgccaggcatttccttcggtatagtcaccaccggtactttcggcgtgtgccacctgactggggttgaacggagtcttccaagttccgtccgaattacgcggacgcataaactgggtttccgtatcaaacagattcttgtagaaatccgcacgtttggagaagtaagccgcatcttctgtcttgcccatacgtttagccatgtctgcggctgcataatcgtcgtataccgattcgagggaagaagaaacagattcggtcttaatcaaatcagtggggaagtaaccgtatttcatgtacgtttcccaatcggatttctgtttgtgcgatacggtctgggtttgcttgatggcgttgaaagcgcgttcggcatcaaatccgcggaaccctttgcggtaggcttcggctatgacggatacaccgtggttgcctaccatggtataggtttccttgccccacaatccccagatgggcaggaagccttgcacttcgctctgctctaccagtgagttgacaaagccgtctaccttttcgggaaccatcagcgtgtagaacggatgtgcggcacggtaggtgtcccacaaggagaaagtggaatagaatgttcccgttcctgccttaaccacagagtcggcggcgttgcgatacaggccgtctacgtccgaaatctgattgggctgaatcaatgcatgatagaaacaggtgtagaagttggttttctcgtcttctgttccggtcacgtcgatgcggctcaggtagctgttccaatcgtcatgtgccgtttttttcactccttcaaaatcccatgcgggcacttcggcttccatattcttcctggcgccttctatgccggtagtggagagagcgactttcatcagcagttcttcgccgggctgcatgtcaaaagaggcaatgatgcgtttgcctttttcggtctcgcccataggcaggtagagggagtcggtgacgggtcggttgaacttcatcacgaagaaataatcctgattgacccaaacactgttgcgcacatgcccggtcagggtttgagcgtcttcccagttcacctcgcattccttcacctgagagtgatattggttttcgttccatgtcggtccgtgttgcaagtcgatgaggacggaagcagagtcggcattgtgataggtgtagcgatgcaaggctgcgtggggagtggcggtgagttccgctttcacgttcggctcggtcagctctaccgtgtaatatcctggtgtggcggcttcctgcttcttggagaaacggctgcggtaggcatcccaggcacgggtgcgtgttccggtgacaggcatgacgagcacgtcgcccaagtccatacatccggttccgttgagatgtgtctgagtgaatccccagatgatggagtcactgttgacatactcggagcaatatctccagcccaccgcgccggtgacagggctggtttgaatcatgccgaaaggtcggcaggcaccggggaaggtatgcccgttgtcggcagctccgataaaggtgttcacgtactttgtgtagtctgtttccgccggttcgttttcagtgggattgcaactgaacaatgtcccggtcagggctaatgtacatagaaaatagaaacttttcttcattggtattttaatttaataatgaacggattaataaagcagtgtgcccgatatgcaccagtaactgttgcttcctccttcgggagctccttgcggtatccggacggagagggtgtgttctcctgcttccaagtcgcctagatagatatattcgggcgtagtcactgtgccgggacaccaattggaacggctcaagtccgaagagctcaggccgtttgagaagttgcccgagcagggattggagttacggtacgttccgcagtcatcgcgccaggggatgaacgagattactttcttgccatccagataaacggtgttgggcttttgattgaattcatctccgttcccccaaccgccgtgtccggtggtgagatagaacaggcgtgcgttttttgccggttctttcagggtgaatctcacgcgcagggagtcattcaggaagaagacggggtaggcttgtccggcctgttccagataattcacggtgttgaacaagggcatggctttgtttacgcggcgttcgtcgtcggggtaatacttcagtttcagggagaggcgatgccctttggcatcccagttgcctatgtaggctcctatccagacttcgccttgcagttgcgaggcgaggggagtgacctccgatttgtaaatgacagagtctacccagtgttgtcctttcactttgttgtggttgaacttacgtacgccgaatccggtaaagaaacgcatcagttccacgggagcctcatagtcatctgtagagatgagtgccggatagttgccgtctttggcctggaaggacggtacgcttttcaggttccgtatggcatccaggaaagactgtttcttgtcggtcgggataacgaagacggaaccggtgcggtcgtatgcgtcgccgtccgagtattgggcaacttccacaaagatgctgcggttctttgctgattccggcagtttcacttttttcaggataagggttccgcctcctgcgctgtaagttattccgtcttccagcgtatcgggcagtttggcgttgttgaaacaaatggtctgttggtcgaatacaggaatggtgatgacaccgctttggttgatggtatactggtaatcggcggcatccatcttttcgccccatgagtccggcaacagtgcctgcgctttcttgagaggggtaatggcggaggcttcctgtatcatatctccgttgcgcaccaccttcagcaccagtccgtcgggcacgccgacattggcttgcggtgttcctctgaaaggaatgtcatgggtgtaccacacttcgatggtgttcgagttgatggaagtgcgtgctatcttgcagttcagtcccagatgcttgccttcgccggcaggagtgaaccctttaccgaattcgaaaggggttgcggcggaaataatctttccgtcaggcagctccgcccatttataagcttcgcgaccggcatagtcgatataattcttgatgacgggctgtttgtcttcgcgaatgccctcggtcgcagtctctttctcccctttgggagagacgctttccagtgccacttggttgcccgatacggtcatctttatctgtccggggcggattttacctttatagctggattgataaatgacttcaattcctttggcattctttactttcttttgaaggttctgtgcggcggctgccgaaacggtcagcagacagagcatcagtaaccatgcgtttcttattccggttcttctcatgtttaatgctaatagttagtaattagaatgattgtacgataggcaaagttaatcataaatccgtaaaagattgcatcttagcctctgtcttgagcaataatttatagatttgaccatttattagtatccttaagccgtttcctgcgtatggctaaggttttctgggcggcagattattacgtcctattgcaatggaacgtacgtcctgccgtaatggaacgtacgtcctgctgctgtgggacgtatgtcctgctgccgtgggacgtaataatccaccgtataaaaagtcttagcctaaggaaagaaaatgcttagtccgaccggtggagtgacttcctgtcaaaggaaacagctttagtcataagttatatctgttggttggatattatcattatatattttcattttgcaaatgatgagagtaaaaataaaggcatacaaatgccttaccggttaatttttagcttatttcaccttacagattgatttaaatacctatatttgtgtttctaaactaacaagagaaatggcatatcagtttacaagaatagcggtaaagattggaagtaatgtactggcgcgcaaggacggcacgccggacgtgacacggatgtcggcgctcgtagaccagatagcggaactgcacaaggcaggagtggaggttattttaatctcgtcgggggcagtcgcttcgggacggagtgaaatcaaaccgtccaagaagttggacagtgttgaccagcggcagcttttttctgctgtgggacaggcgaaactgataaaccgttattatgaactctttcgtgagtatggcattaccgtggggcaggtgctcaccacaaaggagagttttgccacgcgtcgtcattatctcaaccagcgcaactgcatgatggtgatgctggaaaacggagtcattccgattgtaaacgaaaatgataccatttcggtgacggaactgatgtttaccgacaatgatgagctttcgggcatgattgcttccatgatggacatgcaggcgttgattatcctgagcaatatcgacggtgtttatgacggctcgccttctgctcccggtgcccgggtcatcagagaggtggagcaggggaaagacctgtccgactatatccgggcggagaaatcgggtttcggcaggggaggcatgctgaccaagacgaccattgcccgcaaagtggcggatgagggtattaccgtcatcatagccaacgggaagaaggacaatatattggtggacttgctgcagcaccccgaagaaacggtgtgtacgcgttttgttccggcaacggatggcgtatcgagtgtaaagaaatggatagcccacagtgaaggttttgcaaaaggcgaattgcatttgaacgaaccggcggtgaaagtgttgaaaggaaacaaggcagtgagcttgcttccggtaggcatcgttgctatagaaggtgaatttgagaaagatgatatcgtgaaaatcatagaccatcggggaaagcaaataggagtgggacgtgtgggcttcgactcggaggaggcgcgcctgctgatggggcaacacggtcaaaaaccggtggtgcattatgattatctgtatttggactaatcaatttgactgcaatgggaaaactgacagatacttttcagcaggtgcgggaagccggcaagagtctggctttttgtggggaggaaaagataaatgaagtattgcgtgccgtggcggatgccacggaatcgcaagccggacagatattgtcggagaatgccaaggacttggcaaggatggatgagtctgacccgaagtatgacaggctgaagctgacgacggaacgtatccacggcattgctgaaggcattcgcagtgtgacgcggcttccgtctcctgtaggaagggtattgagcgaaacgctccgtcccaacggcatgaagttgacgaaggtcagtgtgcctttcggcgttatcggtattgtatacgaagcacgacccaacgtcacgctggatgtcttctcgctctgtttcaagtcgggaaatgcttgcctgctgaaaggggggagtgatgccgactgctccaaccgggctatcgtgtcggtcattcattcggtattgatacagcaggggctgaatcccaatctggttgtcctgcttccgcccgaccgtgagtctgctgccgagttgctgaatgcaagggggtatgtggacttgctgattccccgcgggggaaaaggactgattgattttgttcgtcggaatgccactgtcccggtgatagaaacgggagccggtgtgtgtcatgcttactttgacagaagcggtgatgtgacaaagggagctgctattatcaggaatgcgaaaacccgtcgtgtcagtgtgtgcaatgcgttggactgtgtgctggtgcacagggagcgagtggccgatcttccggtgttgtgcggcggcttgtcatgctctcatgtgattatatatgccgaccccgaagctttctcggctttgcaggaaagttatccggcggagcttctccggcattccaccgacgagagctacggtaccgaattcctggactataaaatggcagtcaaggtgctttccggtcctgaagaagcggtggctcatattgcccggtacggttccggtcatagtgaatgcatcgtgaccgaggacagccgctctgccgactatttcatgaaagcagtggatgcggcgtgtgtttatgtcaatgttcctacttcctttacagacggcggtgagttcggactgggtgcggagataggtatcagtacccagaaacttcatgctcgcggaccgatggggctggaggaactgaatacttataaatggatagtccgtggagaaggacagacaagagattaaccggtgagatagaatttatacatattatatataaaacgaattatgagatactttacaaatgtacacgatttgggtgatttgaaaacagctttggctgaggcgtttgaaatcaagaaagaccgctataagtatgagaatctgggaaagcataagacttgcttgttgattttcttcaacaacagcctgcgtacccgcctgagcactcagaaggcagcgcgcaatctgggtatggacgtgattgtgctcgatgtgaaccaaggcgcatggaagttggaaacagagcgcggtgtcattatggatggcgacaagagcgaacacttgctggaagccattccggtgatggcctcttattgcgatattatcggtgtgcgctcttttgctcattttgaaaaccgtgaagatgattatacagaaaagattctgaatcagttcatcaagtattcgggtaagccggtattctctatggaagcggctacgggccatccgttgcaggcttttgccgacttgattactattgaggaatataagaagaaagaacgccccaaagtggtattgacctgggcgccgcatccgcgtgcacttccacaggctgttcccaattcgtttgccgactggatgaatgaggcagatgtggattttgtcattacccatcccgaaggttatgaactcgacccgaagtttgtccgtggtgcgaaagtggaatataaccagatgaaggcttttgaaggagcggatttcatttatgccaagaactgggcttgtccgggtgtgacccggccggaggactatggcaaggtgttgagcaaggatatgagttggacggtagatgcggctcacatggcagtgaccgacaatgctttcttcatgcactgtctgcctgtccgtagaaatatgattgtgacggatgatgtgattgaggcgcctacttccttggtgattcccgaagctgccaatcgtgagatttctgcaactgtggtgctgaaacgcttgttgcaaggtttggaggcataaccgtcgagccaagtgaaacagtcgggggtatgtcaaaactaaagtgacctgtcactttgtcaactgtaggggcagggtttacctgcccaaatacacaaagcgaactgtcttcgggcgagcagatctcgcccctacgagcaaaagcacagcattgtccgggttttgacacaaccccatgcttccctcattattgaagtcggttatcacttctcaatctccatgccttcgtctatccagttcaggatacctttatccaagttgtagactttgaatcccttcttgaccaagagctttgctgcattgcggcttcttcttccgcttttgcaatatacggctaccggttggtctttctgcaacagttcatcaacggctgcggcaaagttctcgtccataacattgatgttcaggctgcccggaatatgtccttccgaatattcggcaacagtgcgtacatctaccaattggattttattgtcttttatcaattgttcgaaatgggctgttgataagcttttgaacttctcttgttcttttcctgtacaggcccataatccgagcgcaaaggcacagataaagaaaacaaaataaatagttttaatcatattgctttttgttgttaataagtaaatgaacggctggtcataccttctttgtatgtattcagcgtgaagataattttgtctcccttttgcaacacatcggcataggtccggaggggaactgaaaggtaaactttacggttaaaaccttccacatcgtcatggcggttgtggtagagagtaaggttcagtgtctttgtgccatcttcattatgggtaattccgttgtcgatgaaatgaaattcgtgtgtccggtcttttaccattgccagtgctatcaggttcagatagtcaccacttcgccagatgctttgtatggcaaccgggtctgtatgtatttccttgaatgtatctttcgcttttggaataggagagatggctatctgtgtgttatacaggatggcttccaatgatgacggctgggaagtattgacaggggcatacatggtaacagtacggtaaacgctgtcgggggtcaaaccgtccaggccggcgcggggctgtatgctccatatcaccccctcgtcgcttttcagataagttgccgtccctgtgttgtccgttaccaggtctatcatttctgtcaagacattgggatagacataatcgtcatcactgcaagcgatgaatagtaaaggagcaaaaagacataaaagaatacatttcttcatggtaaattatctgtttatcgttaactgtactgttacctttgtttgattatcgttcggatttcagccttttgccgcttccagatagttgattaacggattggcatacatcgtcaatattttgtttcgcaggaaaggaatatccttgttgggcaaatcaatcttggcaatctgtccttccagatacttttcaaacttaactttttcttcttcggtatattcttcggcaaaacgggtatctcccattaagaggtcgcacgccacataattaccggcatacagatgatagttttgatgaatatgcttgtctatcagttcagagatggcggtgaatacttctgttttggataagttgcgctcttttatctcatccagctctttgttcaggcaggctgaagtttggaaatggatgcggcccttataaccgtaaagtccggtctgcatattgataaggtcgtcttcgggagatttccggaagttggcgtcgtcccgtttctgttgcagctcttttgccttcagaaagtcacaggggtcgtattcgtaagagatggaaagcggaacgagattgagttctttcagtcgtgcgatggcgtctccttctcctgccattgccatcattttaagcacgctgtcctgggtgcggtcgttagagtcttttgcgcgtccctggcgttgggcaatccacaggttttcatgcttatgggtgatggcaaagtgcatatagcgcgacatcagcgcagatgcttccagtttttgacgcatgctgagaccgcgttgcacgatgaatgatttattgatacgtaccagtttttttatccagggataaatcagcagattgtcaccgatggcaatttccacggtattcatcttttggtctatcaagagaatgcacagaaaagcggagtcgaggataatatcacggtgattggaaatgaaggtataattcattgttttgtccgtcagggcagaacagtcgaatgtaagcccattggcgcatttctttaccaaatcccataatagtccgtagaaaaatgctttttggaactccaggtttgtccggcatagacgcatcttctcggcaagggcctcaaaggggatgcccggcataacagactctaccactgcccggaaactcgggtcggcgattaactcttcatagattttcggcaactcctcgggagtgtaaggacgaatcttgtcaaattcagctggtatgttcatggctctttttatttaagttaaaacttattttcaataatatcggtcattacatctttgatgtccagtccggcagcacgcacttgctgcgggataaagctggtagctgtcatgcccggagtagtgttgatttccaataggttgactttatctccttcggtaatgatataatcgatgcggataatgcccgaacatcctagtatatcatagatggcggaagtgagcagacgcacacgctctgccgtatcttcgggaaggcgggcaggggtgatttcctgtacctgtccgttgtatttggcatcgtagtcaaagaattcattgtcggttactacttcggtaatggggaataccacttctttatcttttgttttatagcatccgcaagttacttccgtacctttcatataggcttcgatcatcacttcatcgctttcatggaaggctttttcgatggcaggctgaatttcttcttctgttttgacttttgttacgccaaagctggaaccgccggcattcggtttgataaaacaaggcagaccgattttgctgattacttcttggtcggtgatttcaaaccctttgcggagaatcagagattcggatactcggattccgaaacctttcaaatattggttgcaagtgaacttattgaatgttatggccgaaaccagtacattacaactggagtaaggaatccccagcaagtcaaagtaaccttgcaggataccgttctcacccggagtgccgtgaatggtgatataagcgaaatcgaaaagcttcttttcgccattctccatgaatccgaagtcgttacggtcgatgggagttttagtgccgtcgggcaatatgacttcccaacggtgcccttccatctctactatatataggttataacgctctttgtcaatgaaagagtaaatcccttgtgcgctgcgcagggaaacggggagttcgctggaatctccgccggctactatcgcaatggtacgtttcatagttcttctctgttactgatatagtttctccacttgtctatcaggtttgtcatatcctcgggcaacggagaggtgaaaaacatctcttcgcctgtgcggggatggacaaagcccagcgtcatggcgtgaagtgcctgacgggggcaggtctcgaaacagttgtttacgaattgtttgtatttactgaaatgtgttccttttagaatttcgtttccaccgtagcgttcatcattgaacaaggtgtgcccgatgtgtttcatgtgcacgcgtatctggtgggtgcgtccggtttcgagcacgcattccaccaaagtgacatatcccaaccgttccagaacccggtaatgggtgacggcgtgctttccttgtgtggggtcgcttaacactgccatctgcatgcggtctttcggatttctgccgatattgccttcaacagtgccttcgtcattttccacaattccccacaccagcgcattatatttacgtttggtggtcttgttatagaattgaagtccgaggtgtgttttggcatcgggagtcttagccactacaagtaagcctgaagtgtctttgtctatgcgatggacgagtcccacctgcgggtcgttcgggtcgtatttgggattgtctttcaaatgccaggcaatggcattgaccagtgtcccgtgataattgccgcaacccggatgtacgaccagtccggcaggtttattaatcaccatcaggtcttcgtcttcataaacaatgtccaatggaatgtcttcggggataatatcattgtcgtaacgcggacggtccatcatgacagtcagcacatcacatggctttaccttataactgctttttaccggcttgccgtttgccatgacgaaaccggcatcggctgctttctggattcggttgcgcgaagagttgaccagtcgttcaaacaagtatttatctattcgtacttgcgactgacctttatccactaccacccggaaatgttcatatagctccgatgggtcttccaccactcgctctatatcatccagtgtatcatctatttcatccgcatattcttctgtcatcatcactttttggggaaaatagttagaaccaagatttgtctactacgggagtgtcatcgtcaccgatagctgtagagtctgtcaaagtcgagtcattggttaactcatcattgccattacccacatgtagggtcaataaagcttcgtgtggaactttatcgccggcattcagggtacggcctttataagtgacactgtatacccagtctttttcaccgctgatgtattccggttcggtgactctgaagcctaatgcacgcagtttggcttcggcttggcgcagtgaactgttgtccatgatatcgggaacactcactttgggtgcactgtccatattgatggtgagatagaccgttcttcctttttttacttttgaacctccggcgggattctgttccaatatggcaccgggcggcatccccttgacataactggagtcgatggcgaccgctttgagactttgtttatagatttcattctcggcctgacgcataggcaatccttttacattgggaacgaccactgcttcaccatgacgggtgtagttgtcaagccattgcagtgttcctaaagctattgctatcacaacaataatcatggccaccaggttgagccaaaagaagcggttgttcttgaacgaaaagaattctttaaatgttaccataattagttagattattccgcgtcaaagatacgacaaattcagatttgttcctatatttatagtcgaatatcatctgttaacagccgaatatcttttcttctttcttcgaaggctgtatttacattgaagcgttttttgcgttttgcataattataacggatatttttgtacctttgcgccccgaaaaaataacctattccaaattcaggattaacatttaagataaaaagatgacaaacgagacaacaaatgagcaggaggtcttattattacgtcgcaaattggaccttttgttgcgtacaggaaaaatgctcatggagagcgctgcggacactaaccgcattgaacggaacatgaagcgtgttgctgcctatctcggcattcccgaggagaagttacacattgatatccggtggactatgttgatggtcaatgtgagtgatgagaagcattctttttccaagtttcaaaaatgtgaaaagcatggcattaacatggaggctatttccaaaatcagtaaattgtcatggcgagccatcgaacaggattattcgttggataagtatgaagaagaactggaaaagattgctcatcagaaacgtaattatactccttacgttgttgccatctgtaccgggtttgcctgtggcggattctgtaaactgtttggcggggactggattgctttcttgataactgcgttatgtacttttgtcggtttccgtacccgtgcccgttgtatagagttcggtataaatgtgtatatgagtattgctatttcggcatttgtctgcacgtgtttggcgtatgccttttcgtttacgggatggtctgtaacgccttatcatcctttgttggcatgcacgctgtatattgttccgggagttccgctaatcaactttgtggatgatatgattgacaatcatttgctggtaggtatcacccgtgccgccaatacggtcatgatggttggtggaatggcattcggtattgcttttgcgatgaggcttttggtgatgagtgatgtaacgattgaccagaaattcagtgaattgagcatggtaccgcatgacggatattgggtgtatgctattgctgcggctattgctgcgatgggttttgccactatctttaatattcagcgccgtcttttgtgggtagtggctataggcggaataattgccgtgtgtacccgtaattttgttaactttgaattgggatacggtccggttatcggttcgtttatgggaagctttgtggtcagtttgttggctgtgaaggcagtacactggtttcacgtgccgaatcatgtgttgacaattccttcggtcattccgatggttccgggagtgttgatgtatcgttccctgctggcatttattaatatgcacggtgtgataggcgaggtgacaaatgctttttcaaatggtattaattccgcacttattattttgtgtatatcattgggtgttgctgtacctaatatttttgcacgccgttatattgccaaggaccgtcagaaatttcttcaaaaagagctggaagaacgtaaagcccgaggcaaatttattgagtggtagtctgttaatggatttataaggtactccgcatggtagttaagtttgggaaacttgctctgtgcggagttctttttaatactaaaaaaacaattattattcccgatagtgattgataatctgtatatttgcattaaatctatgcattattaaaatattatatcatgaataacctacattccggcttactttattcgttgacgggtgtcacggctttggcatctatgtcttcatgtgcttctcagaaaaaaacagaggagcagaaaccttttaatattgtctatatcatgacagacgaccatacagcccagatgatgagctgttatgataaacgttatatggaaacacctaaccttgacagaattgctaatgacggggtgcgctttaccaacagttttgtggcaaactctttgagtggtcccagccgtgcctgtatgataaccggcaagcacagttgtgccaataaattttatgataacacgacttgtgtgtttgactcttcacaacagactttcccaaaactgttgcaaaaagcaggttaccagactgctttggtgggtaaatggcatttggagagcttgccgacaggatttaattattgggagatcgtacccggtcagggagattactataatccccgtttcattactatgcaaaacgatacgatagagaaacaaggttatctgacaaatctcattactgatatgagtatagactggatggagaaccaacgcgataaggataagccgttttgtattttgattcatcacaaggcgattcaccgcaactggttgcccgagttgaagtatctgaatgaatacgaagacaaaaccttcactatgcctgataatttttatgatgattatgaaggacgtccggcggcagctgcgcaggaaatgagtatctttaaggatatggatatcatgtatgataccaagatgctggatatgaataaggattcacgcctgaaatcggcttatttgaactttatcggacgtctgacaccggaagagcgcaaacagtatgatgatttttatgctcctattattaaggagttctatcagaagaatccgcaaggaaaagaacttgccgattggaaattccaacgttatatgcgtgattatgccaaggtggtgaagacattggatgataatgtgggccgcgtgcttgattatctgaaagaaaagaatttgttggataatacactggtggtctatacttccgaccaagggttctacatgggtgagcacggttggtttgacaaacgctttatgtatgaagagtccatgcgtactccattgattatgcgtctgccgaaaggattcgacagaaaaggagatattaccgaaatggttcagaacatagactatgcgcctacgttccttgaattggccggtgtccctgttcccgaagacatacatggcgtatcattacttccattgctgaaaggtgagcatccgcagaactggcgcaatgcattgtattatcatttttatgagtatcctgcagaacatatggtgaaacgtcattatggtgtgcgtaccgaccgttataaattgattcatttctacaatgacattgatatgtgggaactgtatgacttacagtcagatccgatggaaatgcataatctttacggacaggctgaatatgagcccgtggtaaaggaattgaaagaagaactgctgaaattgcaggaacagtataatgaccctgtccgtttctctccagacagggataaagagtaaaatacgatgatgagatatatttatctgattattttaggcttgtttttttccgttattaatatggaagcgaataactccgcttccatatctttagtaccttgtccgaccaatgtggtgccgggcaccgggagttttcaatttactcctaaaacagtttttgctgtagaaacggaagaacaggctgccattgtccgtttgctttccgaccagtttacttgtgcggccggttttaccccgaaactgaaagtggacagtaaaaagggaaatttagtgcttcagacagataagactattaaaagtgaagcttattgtctggagattactcccaagaaaataaccgtcaaggcagcagatgccaaaggtttcttttatgctctgcagagtatccgccagctattgccgccggcaatagaaagtgcggtcaaagtggatggtacggaatggatagtgccggcaatgaccattaccgatgagccgcggttcgggtatcgcggactgatggtggatgttgcccgctttttcgtccccaaggagaatttgcttcgtatcattgactgcatgggaatgttgaaactgaatacgttgcatttgcatttggtggatgataatggctggcgtatcgagataaagaaatatccgttgctgacagaaataggagcaagccgggtggagcgcccgggtaaacttttccccgaacgccgtaaccagcgtcagggtgaaccgacagtagaaaagggcttctatactcaggatgatattcgtgagattgttgcttatgcggctgcacgccggatagaggtgattcccgaaatagagatgccggcacacagcaatgcagcgttggctgcttatcctttgctggcttgtccggtagtggataaattcatcggtgtgcttcccggactgggaggaaatcatgcggatatcatttactgtgccggcaatgacagtgtctttacttttctgcaaaatataattgatgaggtagttgcgctgtttccttccaaatacattcatttgggtggtgacgaagcccgtaaaacccattggaaagtgtgcccgttgtgtcaggcgcgtatgaagaaagaaggactgaagaatgaagaggacttgcagggctacttcatggcgcgtatgagcaattatgtgaagagcaaagggcgtgaagttatgggctgggatgaactgacaaataccaagattcccgatggtgccgttatctttggctggcagggatacgggcaggctgcattgaaagcagccagacagggacatcgttttgtgatgactccggcacgtgtgttgtacctcattcgttatcaaggtccgcaatggtttgaaccggtcacttatttcggcaataatacattgaaagatatatatgactacgaaccggtggaacgaagctggacgacgaaaatgcgttcattgctgatgggtatacagggatctatgtggactgagttctgcaacaagcccgaagaggtggaatatcttatcttcccccgtctggcggcagtggccgaaggagcatggacttttccggtgtacaaggactgggacagattcttggcggctttggataattttaccgggcatcttgatgtaaaaggaattacttatgcccgttccatgtataatatccagcataaagtgactccgatggacggcagtctgcaagtagagttggaatgtatccgccccgatgtggagatacgttacaccacaaacggaagtcagcccactgccaagtcttctctttatgaacgcaaatggcaagttaccactcctcaaatcatcaaaagcgctacttttaaaaacggtaaacagatggggcagactttgactttacccattcaatggaacaaggcaacggctaaacggatgctacgcagcaatccggtggagcgtgtgatggtgaatggcgttcgcggcagcctgaaatataccgattcggagtgggcgtcgtggactcggaatgattccattgcctttacgctggatttgagaaagagagagcatttgaataagttggtattgggctgtatcaataattatggtatgggagtacataaacccaaacgggttgaagtatggctttccaatgaagatattgaatattggaaagtagcttccaaagagcttgatccggaggaaatattccgcgaaggtacatttatagaagagttgccgttcaacttggatgataccggtcgttatgtgcgtgtcatcctctttggggcaggtgaatgtccgcttacccacgtgcgtccgggacaggaagcgcgtgtatgtgtggacgaattaataatagaataagcaaaaaaaactttagaacgatgaagaagcgaataacagaaaccttgctgggacttttggcttttgtatgctgtcttcccatgatggcacagcaacaccccgaatggcagagccagtatgctatcggactgaacaaactggctccgcattcgtatgtatggccttataagaacgcaggcgatgtgcggaatggaaattatgaggattctccttactatatgagtctgaacggaaaatggaaatttcattgggtgaagaatcccgataaccgtccgaaggatttttataagccttcattctatgacggaagctgggcggagatcaatgtaccgggtaactgggaacgacaaggctatggaacggccatttacgtcaacgaaacttatgagtttgatgacaaaatgttccattttaagaagaatcctccactggtgccttatgaagaaaatgaagtcggctcttaccgtcgcacattcagcattccggcaagctggaaagaccgccgtgtggtaatttgctgtgaaggggtaatctccttttattatatttgggtgaacggccatttacttggctataaccaaggttcgaagactcctgcagaatgggatatcacggataagttgcaggaaggtgagaatacggttgccttggaagtataccgttggagtgccggttcctatctggagtgtcaggatatgtggcggcttagcggcattgagcgtgatgtatatctttacagcactcccaagcaatatatttcagattataaagtaatttcgtctttggataagaaagagtataaagaaggtatattcggactggaggcaactgttgagggaccctctgcttcagcttcttctttgtcttatcgcttggaggatgctgcaggaagaaccgtactgaggggagagcagccgattaagtcgagaggcctcagtaacttcattgcttttgaagaacaacggataccggatgtaaagccttggagtgcagagcatcccaatctttatacattggttttggaattaaagaaccccgatggagaagtttccgaactgaccggttgtatggttggtttccgtacttcggaaataaaagatggacggttctgtatcaatggcgtgcctgtgctggtgaaaggcaccaatcgacatgaacactcccaattgggacgtaccgtgagcaaagagttgatggaagaagatattaaactgatgaaacagcataatataaatactgtccgtaactctcattatcccactcatccctattggtatcagttatgcgaccgctacggactgtatatgattgatgaggcgaatgtcgagtctcacggtatgggatatggtgcggcatctttggcgaaagattctacttggctgcctgctcacatggaccgtatacagcgtatgtatgagcgctcaaagaatcatcctgccatcgttatctggtcattgggcaatgaagccggcaatggtatcaattttgaacgtacttatgattggatgaaatctatagaacagtctcggccggtgcagtatgaacgtgcggagcagaattacaatacggatatctattgtcgtatgtatcgtggtgtagatgtactcagggcgtatgcacgccagaccgaaccgaaagtttaccgtccctttataatgactgaatatctgcatacaatgggtaacagtggtggcggactgaaagaatacatggatgtttttgagtccgaacctattgtgcaaggtggctgtatttgggattgggtggaccagtctttccgcgagatagatgaaaacggtaaatggtattggagctatggaggcgattatggtcccgaaggagtgcccagtttcggcaatttctgttgtaacggactggtgaatgccgctcgtgaaccacatcctcaccttatcgaggtaaagaaaaactatcagtatattaagtcggcactgacagaccgacgcaatctttcgttaaaggtgaaaaactggtacgatttcactaatctgaatgcctatacgctgcattggcaggtggtaggtgataatggaaccgtcatcaaggaaggtactcacaaaatagattgtgctccccatgcaactgctgattttgctttgggtcgtataaagttgccatcgaatatccgtgaagcatatctcaatctgagctggacacctgatacgcctcaaccttttatcggaactgattttgaggtggcttatgatcagtttgtcttgcctgccggcaagaatttccatgcgcaggtttccaaaccggaaggagaagtgaaatgggatattgaccggcaaacaggagccttgcgctcttatatgtataatggtaaggaaatgctggcatctcccgttgtgctgagtctttatcgtcctgtcacagataatgataaccgtgaaagaacaggtggtgcacgagcttggaaaaaggcaggcttggataatttggttcaaaaagcgacttttgtcgaatcgtctgcaaaaggcggcaaagccaaagtggaattgctgaatgccgaaggtcgtaaagtgggtactgccgacttcctgtacacgttgagaaagaatggtacactggaagtgaaaacaacgtttgttcctgatacggccgttattacttcgttggcgagagtcggcctggctttcgaaatgccggatacttataatcaagtttcgtatttgggacgcggtgagcatgaaacttatgcagaccgtaaccggtcgggacgtatcggcatttaccacacagatgcagagcgtatgttccattattatgtgagaccgcaggcaacaggaaatcgcacggatgtacgttgggtgaacctgacggatgaggcgggtaacggattgactttccgttcggacaagcactttcagttcagtgttattccttttacggatatgaatgtggacaaggcaactcatatcaatgagttgaaacggacaggtgttgtaaccgttcatctcgatgcagaacagtcgggagtgggcaccgctacttgcggaccgggtgtgttgccccaataccttgttcccgtacaaaagcatacttttgaatttatgattcgccctttggcaaaataaaaataagacacatgagaaaaacaattctgactgcagccttggtttgtgcctttttaggtgcacaagctcaggagtactatgagaaacaagtgaccttccccgtcggggcgactttggaacagaaagtggatatggcttcccgcctggtgcccactccgcaacagttggcatggcaacaaatggagtttaccgctttcctgcattttggcatcaatacgtttaccggcaatgaatggggaagcggaaaagaagaccctgctgtcttcaatcccaccgagctggattgcgaacaatgggtgcgctcactgaaagaaggcggtttcaaaatggcgattattacggccaagcaccatgatggtttctgcctttggcctactaagacaaccaaacattctgtggccaattctccgtggaagaatggcaaaggagacgttgtccgtgagttgcgcgacgcctgcgacaagtatggcatcaagtttggtgtttacctgtccccatgggatcgtaatgccgaatgttatggcgattctcccgcatacaataaattctttatcgaacagctcaccgagcttctgaccaattacggtgaagtgcacgaagtttggtttgacggtgcgaatggagaaggtcccaacggcaagaagcagatttatgattgggatgccatcttgaaaaccatccgccgactgcaaccgaaagccgtgacagccattatgggtgatgatgtacgctgggtgggcaacgaacgtggtatcgggcgtgaaaccgaatggagcgctacggctcttatgccccattcttatgcgggtgccgatgaaagttatgcaaagttgggtattaaaggaaccggtaaggatttgggaagccgtgctttattagagaaggctccggcactctattggtatccgtcggaagtggatgtgtctatccgtccgggatggttctatcatgccgaacaggacaaccaggtaaaatcattggcacatctgactgatatttatttcaagtcggtggggtataactctgtgctgttgctgaatatccctcccgacagacgcggattgattcacgagaatgatgccaaccgcatcaaggaactggcttcttatgtcaaaaaaacatttgccgacaatcaggtggaaaaggggaatgctgcatggacagccaaagccggtgagtcgaaagtgtataaactgaaaaaagatgctttggtcaatacattccttattcaggaagatatctctaagggacaacgcatagaagattttacgattgaggtgtttaccaatggggcgtggcgtcatgtggctgaaggaacgacggtgggttataaacgtcttgtccgtttctccgacagcaaagcggaaaagttgagggtgactgtaaatgccgctcgcggaacagccaatatttccaatatcggtctttattatgcacaacctttgacagaaaagaatgtgaaagtgaagttaagtgatgtctcggtgaaagactggaaaacggtgggtatgccggcggaagcggctaatgccattgacggagatcctcagactgcatggactgccaaggctctgactcctttggtggtggatatgggtaaagcatcggaagttatcggtttcggttatgcacctgcgcaaaaagaagaccttacgggaacgatttataagtataatttctatgttagtatcgatggcaagaattggactaagtgcgatgccggtggagaattcagtaacatcatgcacaatcctgttccttattttgttcgtttcggtaagaaatatccggcgcgttactttaaactggagcctgttgccgaaataaacaacaagccggcaaccaccgttggtgaggttggaatcttgttgaaataaacggaaacataacttctttatatcctttgggcagtgctcgaaggtaattctcattatcgctttgctgtgaaggcagacaaatgtgtcagcctccatagcaaagcgatttgacaaatatatttattgtatattataacacgtgcaggctcatgcgtacgtacgtgtagctcgatacgtatatacgtgtgacctgatgcgtatatacgtgtagacttatgctaccgtatgtgtattccgatgcgtacgtacattaaaaaatatgcagctcgcactgaatgttgcaaaaagaccttgatgttttccaaaaagaccttgatgtttttttaaaacctcaaagtcttttattgaaacactaccatcttttttaaaaacctcaaagtctttttttaagcccggtatgtttttcatgtaagggcaggttgcatcaccccttattaagtcggttattccctttttccgttcatccttacattttaattataacatgcaggtaatcaatttgttaattctgaaggtgttcccatcatcctcccttcatctgtgctttccaagtcccttcacaatctgccttcagtatttgtcttgccggaagatgttttacagatgaaaggaggctgaaagggcgattacgggatgttcattcactatcggaacccccatcaacaggacgtttcaacagttaatgaaaggagaaaagaagaaacagatttctatctcaaaggccggctcacgtaatatgagcagatctacggcggttatgaatttcatgccgaaaattgcattttctcctctgtggatagaaaaatagatttatctttgtaatataaacgctaagatataaatgaaagaccgatgaaagaagcaaccataaccccctttgcgaagccgctttatgtaatgaccaagcccgtgggcgcagtatgcaatctggcttgcgactattgttattacctggaaaaagcaaagttatatgaagaacagcctcgccatgtaatgagtgacgaactgttggagaaattcataaaagaatatattgaatcgcaaaccatgcctcaagtgttgttcacttggcatggaggtgaaaccctgatgcgccccttgtctttttataaaaaggcgatggaacttcaaaagaaatatgccggaggccgtacgattgataattgcattcagaccaacggtacactgctgacagatgaatggtgtgagttctttcgcgagaacaattttctggtaggcatctctattgatggtccgcaagaatttcatgacgagtatcggaagaataagatgggacagccatcatttgtgaaggtgatgcgtggtatcaacttgttgaaaaagcatggggtggaatggaatgccatggcagtggtgaacgactataatgctgattatcctttggatttttaccgcttcttccgcgatgagttggactgtcactatattcagtttaccccgattgtagaacgtctatctaaacgggccgatgggcttaagctttcttctttaaagcagaaggatggggaagtagcgccttttactgtttcgcccgaacaatggggaaactttctttgtaccatctttgatgaatgggtaaagaaggatgtaggcaattactttattcagatattcgattctacgttggcgaattgggtgggacaacagccgggtgtttgttcgatggcaaaatattgtggccatgccgccgtgatggagtttaatggggatgtgtattcatgcgatcactttgtctttcctgaatataaattgggaaatatctatcagaagacattggtggagatgatgtatagcaaagaacaggaagcatttggggctatgaagcacaacagcttgccacggcaatgcctggattgccaatatgaatttgcctgtcacggtgaatgtcccaagaatcgatttgttgtgacggaggacggagaaccgggactgaactatctgtgcaaaggatattataagttttttgatcatgtagccccctatatggattttatgaaaaaagaactgctggcagaacgcgccccggcaaatgtgatggactggatacgggagaatgaataaaaataaaaggagtaaagtgattcactttactccttttatttgttctggtcagatgaattattttccgttgtattcatcagatacagttaatttcttacgaccttttgcacgacggctagccaatacacgacggccattggcagttgccattctttcacggaatccgtgtttgttctttctctttctgttagagggttggaatgttcttttcattgtatatacttatttttatgttattattcatgctgtaacgggctgcaaaattagtgacttttttgaaataaacaaagagataactcatttttagtgatttctttttgcgttttttcttgatttacattacttttgcatccgaaatcgcaaccgtgagtgaatataatctgaaataataatcaaatataagcaaagtaaagtatgattaatgctcaagacattaaaattggaactgctatccgtatggacggcaaattgtatttctgtattgacttcctgcatgtaaaacctggaaagggtaacacctttatgcgtacaaaattgaaagatgtagttaatggttacgttctggaacgtcgtttcaatatcggtgaaaaactggaagatgtgcgtgtggaacgtcgtccgcatcaatatttgtatatggaaggtgcagactatattttcatgaatcaggaaacttttgaccaaattcctatcgctcacgacctgattaacggtgtagacttcctgttggaaggaatggtggtagacgtagtttctgatgcttctactgaaacagttctttttgctgatgttcctgtgaaggttcagatgaaggttacttatacagaaccgggattgaaaggggatacagctaccaatactttaaaacctgcgactgtggaatcgggtgcaacggttcgcgttcctttgtttatcaatgaaggtgaaacaatcgaaatcgatactcgtgacggttcatacgtgggtcgtgtgaaagcataatctttttaagccattatataaaaaggcggaacttgttgcaagctccgccttttttgtgttcctttgtgcgacaaaatgatagcagtttatgagatattcttttattataccggtttataatcgccccgatgaagtggatgagttgctggaaagcctcacacggcagacggataaagactttgaagtgatagtggtggaggacggttcgtctgttccttgcaaggaggtggtgaagcattatgccgattgtttggatatacattattataataagcctaattcaggaccggggcaaacccgtaattatggtgccgaacgcagtaatggggaatatcttattattctggattccgattgtattttgcctgaaggttatctggcggcggtcggagcagaactgcaaagggagagggcggatgctttcgggggccccgaccgtgcgcatgagtcgttttccgatgtgcaaaaagccatcaactatgccatgacttcattttttacgaccgggggtattcgcggtggtaaaaagaagatggacaagttctatccgcgcagtttcaatatgggagtgcgcgcggaagtatataaaactttgggtggtttctctaaaatgcgttttggagaggatattgatttcagtatccgaatattcaagggaggctatgtctgtcggttgtttcccgaggcgtgggtatggcacaaacgccgtacggacttaaagaaattcttcaaacaggtgcataattcgggtattgcgcgtatcaatctgtataaaaaatatccggaatcattgaaaatagtgcatttgttgccggctgtttttacgttgggagtactgttcttgttgttgggggcaccggtttgtgtatggagcttgtcgctgcttttgctttttgctttgattatatgtatcgattcgacattgcaaaacaacagcttgaaaatagggatgctctctattgtggcctcttttattcagttgacaggatacggaacgggctttttgcgcgcatggtggaagcgttgtgtgctgaagaaagacgagtttgcggcgtttgaaaagaacttttataaataatgggagagaaactggctataaatcgttgggctgaggaagaccggccgcgtgaaaaaatggctcatcatggagtggctgcactttctaatgccgaattattagcgattctgataggttcgggaaacacggaagactcggctgtggaactgatgcggaagatattgagtgactatcacaataatttgaatgagctgggtaaatgcagcattgatgatttgtgccattataaaggaataggtcccgccaaagccatcagtattcttgctgcttccgaactgggaaagcggcgtaaggaagaggaggtgaaagagcggaaaaaaatactcagttcttgtgatgtttatcaatatttttatcctttgatgtgcgatttgcctacggaagagtgttgggtgctgttgctcaaccaggcttcaaaagtgatagacagggtaaaaataagtgcaggtggattggctgctactgctgtggatattcgttgtatcttgagagaggcattgatgaagcgggctgtttcgatggcactttgtcataaccatccttcgggaagtctgcgtcccagcagagaagatgattgcctgacagaacatttggacaaagcagccaaaataatgaatataaggttgattgaccatgtaattttaacagatggcaaatattatagttatgccgatgagggaagaatatagaaccgcctcggcctacgtcttgtgaattgtgttgtatggagattcagcaagcgcataggccggatggaggcaggtggttataaggatttatttttcagttggtttcttaaacgcatcagagcttctacataataataatcggcatagctcaagggtacatcaacttcactttttccgggaaaatgtccggtggaatgcatcagagcgaaattgcagttcgtaccttttgcagccagatagtcgggacttgttaatgaacggatttgttgttctgcaaagtccagataactctttgcctcagtacttttatccagttgacttagttctatcagagcagaagccatgatagccgcggcagaagcatcacgaggaacattgggaatgcccggggcgtcaaagtcccaataaggtattttatcgaccggcatattcggatgattcataatgaatgaggcaatatgtttggcatgattcagatagtccggtttacctgtttcgcgatacatcatcgtgaagccatacaaagcccaagcctgtccgcgagcccatgccgattcgtcagctgctccctgatgagtctgttttttatgcggcatgccggttatcgtatcataagaaactacatgataacagctgtagtcatcacgaaaatggtgaagcatggtcttatctgcgtgagaaatggccatttttcggaaacggtcatcacctgatgctttcgaagcccaactgaagaattccagattcatcatattgtcaataatgaccgggaactgccaaatctttttgttgaagtcccaggaacggatggctcccacccgttcgtcataacgggtagccagcgaattggctccggttagcatcacgtccttatattccggttttccggtcagacgatagccgttgccgtagctgcaatatagcatgaaacctacatcatggctgtaagtgatgtgttttacctcttctacacggtcggtatacatttctgcatattttttcatttccggggtcggattgtattcgtacaaataccacaattcacccggaaagaaaccactgcaccaccaactgtaatcgctggtttccaactttccttctttattgattgttttcggcagacgaccattctgtgtttcaagctcttttgccattaatagagcctgttcggtcgaagctttcaaaccacggtcgatgacttcttcgataggttcctgtttgggctgtatgttacaagcggttactaagactgtaacaatccataatacactatgcgatagtttattcataatagagatagattattaggtttttgtgacaaatataccggttttaattgaaaaagcaaaaagtatttttaattccgtcctttaaagggggattaggagtaaaacattgtctatacgccttttggaaagctttctatagatatctctagaaacgtttggtatactgttgcaaaatcatcaacttctgtattcccattatcacccatactgatatgacaaaaggtgcggttagagtagtaatccccaagttcattcctataacctgcaatacgacggacagtaagactgaacatgaggtccatacaagacttttcaggtttttatttcctaaagctatggaacacaatacaccgttatagcccatcaatcccatatttaatgttccggcatctatccctggtaagaaggctggtggaataggaagaagtgctccaaatacagtataaaaagcaagcagtccgcgaattgataagaatgccggtcaaaaagaacagttcggtccatatattcccttgaaacattacctgtcctattccacaacctaagaccggtaatgaattgtataatgaaactgcttacataaatcaaaaaaacagccgtaatctaaaaaaaatccgggaacaacaattgcctttcacagttatttataaaactaacaaaaatatttaaaaaggttctcgtgcattgaaactatggaatttattaataacttgccttcaattactgaaaagcctcaatcacatgtggaaattcataattatattcatcatatcgttgtctgcctttgacaatgcttttgccggacaaccggacgggataggaaaattcatagttacagacatcaatgacaaggacagtaccctgaataaagtaagaatgttccctcctaaattttaccgaatcggaaacggaagacgtatagaaataaaggtatgtaatgaggacagtatgcagataagaagagtacgctgccttttatattattcaggctccggtaaaagaaagtgtataaataaaatttggatttcacctttggagggaaacgagacctattatttctgtatgaacattaaactgaaactgacgaaagaggaatggagtaggttgacattcaggattaaaagaggaaaaagttacaaggactacagattctcggatacggattgaagtatgtacatccgccccaatcaagcatatcaaatccgggaaataaatggtgatatgacaaaagagcttgttcatcattctggttatcattacaaactggtttgggctggtcctctattatttctacgccaaagacaagatagtagaatgaatgagataagccgagttttctatttatgaaaaatacaatgtttactttattggatacttacactgttttttagtatttcataaaatgcagatcaatttttttgttctcatctctctaatattcgagttctatactacattttataaattaatccataattgtcccgtaaaagtggataaatagttctttgaaatatactcaattaaactctatctgtaaagcacgataatttgaatttatacctttgagaccaaatcaaatggtttcaaaggaatcaagacaaatatatttttgctcaattagtagagtttttgaatggtgataaatttgaacaatcgtagataagtacgatacttgctggaaccagctttttgctatgatgttcagacaacttaaacaatcgtgagagcctacgaggcttaattattacattggaagcatatcaagtcaagtataatcattggggattgggtagtgatcccttggccaaaatcacacttgcagcagctagctaaaacagagattacagaatctttgaaggttttgcattctacatgatgaaggaagtcagtgaaaacgcgctacttccgttatgcttgataacatttccttggattcaatttcgtagtaaaaaaggggagtcaaagctcatgtcctctatgacatagaaacccaaattccggtttctttacattaactgtagcttcaaagtatgattcaacaacaatgtctgtaattcattatgcaccaaacgcatactatatatttgatagagcatatgattcgttcaaagaattatataggattcatcttacagactatttctttgtagtaagagccaagttgaatttgaaatgtaagttttgcaaatggaaatgcagactaccaaagaatatactctttgatgcagaagtaaaactattaggatatacctctaaaaaaagtattcagaatcatcaagttctatgatgaggaagatgatcgtgaatttacctttctaacaaatgataaatatatatttgcacttgacgtggctgattttcaattaaaaagatggctcgtggaactgttcttcaaatggttgaagtagcacctaaaaactttaaaaaaatctaggatatcattgaaaatgcactttgtatacaggtaagcgttgctattatcacttattatttggttattattatccaactgatttgcatttaaaccgtttaacttatagggcctacaaatttcgagtatctcattaaacagataaaaatcttttataaagttgctaaatgagactaatttcaatgatgtcaaagagcaatttaacactcttatgtcggagtagtttgattaatttttaattcgtcccgattttagcggaacactaataaaatcaatcagtgaattatatcggtacttttactgaaattcttttatctataggtaataacactttcataaaccgcgatcttatactcaaaacaaggtactaggtatgtgtttgtttttttaatttgctatgtctcgatttaatattatggggtatagacatctgttttatagcagggatttgtaataagtctatttggggaaagtataaattattcaaatctttttatgtaaattaaaactactatcaaactagatggattaatcatgcaatatcaataattctaatagagtaaacctataaatagtttattatttatacatatgtaagtagtacgattagttaatatataaaaatatatcatgtttcgtgtgcgattacattattgtttattaacatataattaatggataatatttattataatgttatatttgcaaatatataatagagaaccattatgttataccattaaatttaaaatactatgaatgatagctcgtaataaatatttgt

SEQ ID NO: 6666 - DNA, 11756 bp, Unknown
  gut microbiota DNA sequence
cccccaagaattacaactgagccaatataagagggatgaacttcatcccccccctctgataaactaaaacgagcaatcattttttttgattgctcgttttagttggtagcccctgggggaatcgaacccccctttcaagaatgaaaatcttgcgtcctaaccgatagacgaaggggccatccttggcatcgatgatttctctctcgattgcgagtgcaaaggtagtgactttttttgaattaccaaatatttcccaaactttttttctaactttttgttcatactccattgaattgactatttacctaaactcattttttatgaaaacaatcttaaaatcaatgacttgtattgctattggtgcaatgatgactgaaccggctgctgcgcaacaaaaagacaactatcctgaacttgaagggcccggtccggtaattattatctcgaaggataaaaatggaaagcaagaattaatcgatgtatttaacgaaacacaacgtccgcattttcatgaccctcgtgctccgcgtttcttgctcactgaccggcagggtaaatttgctctcggtattggcggttatttgaagactaccatggagtatgattttgacggaacggtggatgatatcgattttattcctgctctaattccgcaaccggggagtacccaagtgcgcaatcagttccagatggacgccggcacgtctaccatcttccttaaattggtggggcgcaccaagcatttgggcaatttcattgtctatacggcgggtaacttccggggcagtggcaagaccttcgagcttcagaacgcttatctttctttcctcggcttcacgatgggctatgacacggggctgttcatggaccttgcggcttgtcctccgaccatcgacttccagggaccggatggcatgactttctatcgtgccacccagttgcgttacgaggccaatctgatgaaggggctgaaagtgggcgtgggtgtggaaatgccttccgtagacggtacgcctgccaaggatgtaagaatcaataaacagcgcatgccggatattcctgcttatgtgcaatattcttggacaaagggcagccatgtgcgtgtgggcggaattttgcgtagcatgacttacgaagacgaggtcagcaacaaggcgaaatccattaccggatggggcattcaggcatcggcaacggccgggctgggtaatttccgtgcatacggacagtttacatacggtaagggcattgcccaatatctgaatgacatgagtaacttgaacgtggacattgtgccggtggctgatgaggccggacgaatgcaggtgcttcccatgcgtggatggtttgcggggttgcaatataacttctcgaagcgtgtttttgcttccacctcttatagccagtcacgtttgtttaccaaggattgctatgctcacttcaacgagacccagtataaaaaaggacaatatctggtggcaaacgtattttggaatgtgactcacaattttcaagtgggggtggagtatttgcatggatggcgtgaggatttcaatgacttgagccgcgaagcgaaccgaatcaacctgagtgcacaatataatttctagggctttacctgttttcgagcgaacacatgggatcgcccgaaaacaggtaaaacgataataattacatattctttatctcgtccagattcttttggatatcttcgtctttcaattcgtaattcatcagattacctgccagatattggtcgtatgaagccatatcaatcagaccgtgacctgaaagattgaacagaatgactttttcctcgcctgtttctttgcatttttcggcttcgcgcactgcggcggcaatcgcgtggcaagactccggtgccggaataataccttcggcttgtgcgaataaacagcctgctcggaaggactccaattgctggatatctacggcttccattaagttatcttttaataactgcgatacaatgacacctgcaccgtgataacgaagaccaccggcatgaatgttggccggagcaaagttatgacccagtgtaaacatcggcaacaaaggagtatatccggcttcatcaccataatcatattggaatttaccgcgggtcagcttcggacatgaagccggttctgcagcaatgtatcgggttttctttccttcgaggatggtgtggcgcatgaatgggaaacagataccgccaaaattggaaccgccgccaaaacatccgataatcatatcgggatattcgcctgccatttccatttgcttttcagcttccagaccgatgacggtttgatgcagcgtcacgtggctcagcacggagccgagtgtatatttacagttgggagtggtcatggccagctcgatggcttcggaaatggctgtgcctagtgaaccctgatagttggggttgcgggtaatgatatctttaccggcgcgggtagacatagaaggtgaagcggtgaccgtggcaccgaatgtttgcatgatgctgcggcggtatggcttttgattatagctgatttttacctgatagacagcagcttccaatccgaatactttggcggcataagagagggcggctccccattggcctgcaccggtttcggtggtgacattggtgataccctcttccttgcaataataggcttgtgcaagtgccgagttcagtttgtgcgaaccgatgggactcacactttcattcttgaaatagatatgtgcgggagtacccaatgcctgttccaatccgtaagcgcgtaccaagggtgtactgcgataatatttatacatttcgcgtacagcttcgggaatttcaatccatgcatcggtctggttcagttcctgtcggcaaagttctttggcaaagataggaaagaggtcttcgggtttcagggcttctttggttttgggattcagaggtggcatgggcttagtcttcatgtcagcctgtatgttgtaccagtatttaggaatttcgtcctccggcaagataaaacgtttctgttttgtactcatagcatttcaaattaatagttttggggtcaaaattacgtaaaaaaagaattgcctactaataaaacggcttcttttttttatttgtagccaaaagaaaaacaagaagttatttgttgttatagttaaaagagatattgaatttttgattaagtttgctttcgagattaaaacgggagtgaattatttgtagatacaaaataaatcgacatggagcgtttacataaacttttcatttatcgtaagaaactggtaaggccatatatcgaacaattattgaaatggatggatatcattacttatgtgatgtctgctcttcttatcatgacattggtatatgaacacggttttcttatttcgtttcaggagataggagtaattaatcgcttgtatcatattgtatgggttgtttttctggtagataccactttacatttgttgttgaattactccgacactcggcgtaaatatcgggggctggcgtggctgttgagtgttatgctttacctcactcttatcccggtggtgtttcatgaaccggagatacagggtggtattcatactttttgggcttttttcaacagcaggctttaccatgtgatattgctcactctgctctctttgttgcagctctccaatggaattgtcagattgttgggcaggcgcaccaatccttcacttatttttgcgtccagtttcctgatatttatactcataggagcggctctactgatgcttccgcgtgctacttatcacggtatatcctttattgatgcattgttcacagccacaagtgccacttgtgtcacgggattggtttcggtagacgtctcttccacttttactcccgaagggttgtttatcatcatcatgcttattcagataggtggattgggagtgatgacactgactagcttttttgccatgttttttatggggaatacatcgctttacaatcagttggtggtgcgcgacatggttagttcgcaatccctcagctccctgctctccaccttattatatatattaggttttacgttggcgatagaagctgccgggatgggtattatttttcttggtatacatggtacgatggatatgactgtcagagaggaactggctttttctgcttttcattccatttccgctttttgcaatgcggggttctctacgttaccgggtaatttaggcaatgaaatggtaatgcatgggcacaatacgatttatataactatttcgtttctcatcattcttggcggcatcggctttcctatattagtgaacttgtatgaaacagttacatacgaagtgaagcgcatttggcaccattacatcaaagggaacaaacgcatgcgacgcaagatacatctttataatctgaatactcgtatcgtgcttatcatgactgcaattttgctgatagtggggacggtggtcatcgttgtgctcgaatggaacaatgcttttgcaggcatgtcgcccacggataagtgggtacaggcatttttcaatgccacatgcccccgcaccgcgggcttttcgagtgtagggatgaccacattcagcatgcagaccttgttgctgatggtgatactaatgatgattggcggtggcacacagtctacggcaggtggtgtgaaagtaaatgtttttgccgtggtaatgctcaatttgcgtgccatcctgataggggcggacaaagttacgatattcaatcgcgagttgtctcacgattctatccgtcgttccaatgctacgctcattctctatctgctcgttgtttttgcgggtatattcagtctgagtctgttggaaccgcaagcttctatcatggcattggtgtttgaatgtacatcggcattgagtacggttggttcgagcctcgatctgactcccacattgggaagtgacagtaaattgataatcattattctgatgtttgtagggcgagtgggtgtgctcaccttgatgtcgagcatcatcaaacagaagaaaataaccaaatatagatatccgagtgataacattataatcaactaacgacatgaaatacattatcataggtttaggaaattacggcagcgtattggcagaagaactttctgcattgggacatgaagtgataggcgtggatacaaacgagcgccgggtggatgttttgaaagataagatagccacttctttcattattgatgccacggacgaacagtcactttcggtattaccgctgaaagatgtggatgtggtgattgtcgccattggcgagaactttggcgcttccattcgtgtggtggcattattgaaaaaaaacggagtgaaacatatttatgcgcgtgcggtggatgaggtgcacaaaacggtactggaagcttttaatcttgatagtattcttacgcccgaagaggaagcagcgcgcagtttggtgcaattattagatttgcatgttaatgtggaatcttttgagatagatgaagaacattatgtgatgaagtttaaattgcccggttcttttgtgggatataaggtgagtgatttgtcactggagaaagaatttaatatcaagattatcgcactggtaaaaggaaaacaggtattcaacagtttgggcatttctattatggagcacgcagtggaaaataaatttgaagaagattatctgctggaagaagaagaccggctggtatgttacggaaaatataaagactttatggatttctggaaagcattgtaatgcaaggattttttttgattttttattctcttcattaaaccttttcctttttccgaagtcttatcaatataataatttagtttagtttttagttttctctgaaagccggccaatgtgacattgcccggttttcgctttttatgggtgtttatttgtttgtgtccgttcctttttgttactttgtcatcataaaagtgagagttaaatgaaacagctatatttcatatttgttgttgtgctatgcatggcaaccggttgtggaagcaagaaagatgcttcgggcgattcagaccaacatatttttcaaatagacagcgtagaccgtgtgacaggtgtgcagcgcatgcaggtttcgcgcatcaatcaggatattgtttgcaatgggaagaaatatcggctgtttattgaccgttcgcccagtgattctctgaaaaaggtgaagagtgatgccggtatttttaccgacaatcgcattgtgctcaagattgcccgcgagaatgggacaactcttttttcaaagacttttaccaaacaaaattttgcttcccttattcctgaccgttatctgacacattccatcctcgaaggaatggtatttgatgatgaaaaaacttcaaattccaagaatatcattttggctgccagtgtcagtattccaatgaccgatttatatattcctttctctatcattattactcccgatggaaaaatgaccatggagagagatgaagacatgggagatttgccgccattgcaaggtaacggcattaattaattctaaaataagaaaataaaaagaaggcatttaatcttttcatgcattaggttgttgtgtgagttacattacaaactaaaaataagtaagattatgaaaaagatttttgccttatttgccctgctgttatgttttgtgcagttcagtcaggccggtgacaaagtgacccgtgacgtgaataaacttcccgttgctgcccgtgagatgattaacaagcattttccgcaagctaaagtggagtatatcaagattgagaaagatttatttctttccacttcttatgatgtaaagatgtccgacggtattgagctggagttcaactcaaagggagagtgggttgaaatagattgtaagaacaaggctgtacctgccatattcattcctaatacgatagtcaaatatatgcagaaaaattatggcggtcataagattatcaagatagaacgtgaccgtaaaggctacgagctcactttggagaatggactggaagtggacttcgatcagtttggaggatttttgaagttaagtgactgattatttttgtcttgttattcgtaaagtataatatgccatattaacgtgtgcgtaattccaattagatatagtaaattctatcttttaataataaagaaactatgaataaaatgggaattttcgtaagagaacaagccgaaaaagtacgtttggtgagacagcattatgcactgactttttgtgtagcccgtcattcatggattacaatagttaaaaaggagaactgagtatattgtatatcaatcacatttattccaagcgattattgatgtggttaggaaattttatataactttgcttcgattataacagataaataaaatgagattatgatatggctatatataatattgtttcttatcctgataggaggatgtattgcgtgggcggtatggaaagcgccaagtgatgtagacttgtggggagaagaacaggaataatactaataatgggcggataaattatccgcccattattagtattattccatctgttgatagtcttttgccaaaccgccttcgctggtttctttgtaaagagaaggaaggtcgtgtcctgtttgtttcatcacttctaccactttatcgaatgagacacggtggttaccatcggtaaacgccgaataaatattggcatccaatgcacgtgcggcagcataagcattgcgttcgatacacggaatctgtaccaatccgcatacagggtcacaagtcatgccaaggtgatgctccaatcccatctcggcagcatattctatttgtgcaggacttccgccaaacaattggctagcagcagcagatgccatggagcatgcaactcctacttctgcctgacaacctgcttcggctcctgaaatagatgcgttgtgctttacgatatttcctattaatcctgctgtggcaagtgctctcagaatgcgggtatcgctaaagtcacggcttttctgtaagtgataaagtactgccggaaccactccgcaggaaccacaagtgggagcggttacaatctttccgcccgaagcgttttcttcgctcacagccagtgcataagaaaaaaccagtccgcgtgagcgcaaattatctttgtagcctttggctttaatataataggtagaagcctttctgcgtaagttcagcggaccgggtaatactccttcctggtccaagccgcgttcgatggattctttcatggttttccatacttcagccagatagtcccaaatatcttcgtcttcacattgctgaacatattcccagtaattgcgaccggtacgttcgcaccaatacagaatttcactcattctgctcatgttgtatatgtcgggggtagcacctttgtcatgtccttcttctgccagtgcaccgcctcccacactgaacacagtccattcgtctgtgacttttccattttcattcaatgatttgaatgtcattccattgggatgaaagggaaagaagatatgtgctttccatattaattcgacgggggcatgcggttgcagtgtatcgaggatggctacatcggtcatgtgacctttgccggtggctgcaagacttccatataatgttacttgaaaggcttttgcttcaggatgtttttccagaaatatttcagcagccttgcgcggtcccattgtgtgactactggaaggaccggtacctatgcgatagagttctcggattgatttcattttgttttataaaggttaatattttcggaaacaaagatataaaattaaaggagaaaaaaggtaagaagaagataaaaacaatcgaaacggttaatggaagttgtttcgattgtttgtgaaatatattcttaccggtataatgatggccgtaaaatattactctaaatcgacaactgtaatacctgctccgccaaactggacatgttcatcctgatagtgggctatgcccgaaactgttgacaaatagttacgaatcaaggtacgaagaataccggttcctgttccatgtaatatgcgcacacgactcattcctaataggatagcatcgtctatgaaataagtaactgcctgaattgcttcatctccgcgcatacctcgtacatcgatatcttgtttaaagtttagtttcttttcatatacgcggtcttgtgtctcactacttacaaaagtgcttttggcagtcgatttttgtgcagcggatggagagatattgcttcgttccaacctgtcaattttgactgttgtttttatcatgccaaacatgactgttgcatttttgccgtttatctccaatacttcaccgatactcgattgtcctttcagtttaactgacgtacctacctctatcggttgtactttgggcatgttcggctgggtggtagttgcagcttgagagtattctttgtttttcttgtctttctttctttcctgtttttcacgcagtttctccattttacgggctattttgtcttctttgtctgctttttcgatatcttctattgtttctttaaagtcagacaattcttgtcgtgccagtcgtgttttttctttttcagcctgagcctctttgatagtacgaattgtattttctatacgtgcattcgactcttgaagcaggcgctcggcgtcttctttggcttttctcaagatttctttcctgcttttttccagttcttgaatttctgtctcatatttactgatagtttcctccatttgtttttcgcgtttgcgaatgttctggcgtttagtttcccagtagcgcttgtcgcgtacgatatcttgcaaatatttgtctgcattaatatattcactgcctactatttctgatgcttcctctatcacctcttcgggtaatccgattttacgtgcaatttctacagcaaatgaacttcccggatttcctatttgcagttggaagagtgcttgcatcagatgtcggtcataaagcatggccccattcactactccttcatgatcttcggcaaaatgtttcaggttttgatagtgagtggtaataacgccaaatgtacctttctcgttgaaacgcttcaatacagcttcggctatggcaccaccaatctgaggctctgttccgccaccgaattcatcgataaggataaggcttcgttcgttgcagcttttcatcattatcttcatattggtgagatgagaagagtaagtactcagatcgtcttcaatggattgctcgtcacctatgtctataaagatattgctgaagattccgatgtgactgcgttcatgcatgggaaccggcattccgcattgcaccatatattgtagcaagcccaccgttttcagacagacagatttgccccctgcattaggtccggagataataagaattcgctgtttatagttcagttcaatatcgagcggtactactttcttgttatgttttgccagtgagagttgaagcaaaggatgtatggctgttctccaatctaaaacctgcttgttttccaatgaaggttttatggcgttggtctgtatggcaaattgtgccttggcacgaataaagtcgatttcggctaaaaactcgtatgactgtaaaatggcaggaacttgagggcgtactgtaattgaaaaatctgtcaggatgcggataatctcgcggcgttcttcaccttccagctcgcggatgcggttattggcttccaccacttctgccggttcgataaatacggtttttccggtagacgattcatcatgtacaataccttttatttttcttttcagaccgggagcaacaggaataaccaatcggccgtcacgcatggtgggtgtaacgtctttatctacatatccttcagattgggcatttcgtaaaatggcattcaggctgcgtgagatgcttcctgtggtagatgtcagttcgcggcgaatgcgcaacaattcactggaggcattgtcttttatctttccgaatttatcaagaatattattgatgcgtgtgataagttgtggaaacacgataatgtctcctgccaatctttttaaagcgggatagggggatgtactttcttccatctcttcatcctcagtagtccgggtcaaaaaacgtacgatatctcgtattgtttccaatgaacggcgcaaatcgaataattcctgttcatccagatacataccctctatacggatacgtttcagagacggacgtacatcaaagaaatattggtcaggaaattcattttcttcttgaataatgcgaataaattccattacctgttccagtcgttcgtttatctcttcatatttttcagagaaagccatttcgtccacgcgttcttctcccaaggtgctgaggcattttccttttaataaatggcggatagaatcgaatcctattttttgctcaaagttctgaggatatatcatgtttaagttccttcttgcttacgttagttatttgaatgcaaaaatacgatttgaaatttttctggcaaaaaaagtacctaactatttgcagttttaaaataaaagcgtacctttgcaccgctttcaggaagaaagtacttcttaaaggagttttggagaggtggcagagtggtcgattgcggcggtcttgaaaaccgttgtactgcgaggtacccggggttcgaatccctgtctctccgctgaacgtgctggacagaaatggtcagcaaacggacaaaaagctacaaatcaatgatttgtggctttttttattg

SEQ ID NO: 6667 - DNA, 20082 bp, Unknown
  gut microbiota DNA sequence
gttatctgtaagcgtttcgccttcatacaaccgactttcgacacgatatacacgcccggcattatggaatgaatcgtagctcaactccgaccatacataaagtatgatgagtaatgctgttgcaatacagacagacaatcctattatatttaccaataccagggatttcttaacccgctggctacgtatcacttgcgaaaagtaattgatcatattgcagacttatttcaatattaatttttcattattgccaaacaattcatatccggaaacaatcacccggtccccgggcttcaacccttcggtcacctcatagtactgcggattttgccgtccgatgcgaatggggtgacgaacagcaaatttaccactttcatcgacaacatacacccatctacctccggttgtctgaaaaaagccaccgcgaggaatcagaacagccttcaccggatcgcccaactggagattgacatgataagtctgcccggcacggatattctccggacgtcccatagtaaaacgaaaatcggtacgaaactgtccctctttcacttcaggatatactttagtcacttccagcttataattttcaccatcacgtgtgaaatcggccggcaactcctgaaccacccgttccacataatgttcgtcaattaatgcttgtactttcaagtcggcggtgatgatttgccctatatgctcgcctgccgcaatggattgtcctatttgggcttcaaggtttcctacctgtccgtctatcggtgctttcaccttaagattctccaaccgttcacgtaccaaagtaagactgcgtttcatatttagaatattctcgtcaaggctggcgatctgcgtcagacgaaacaggctgtcctgacggatacgttcgtctaagataagcaattgttcacgggccgcttcatattcctcagttgccaaccggtaatcttcacgagctatcagttgttcttccagtaaacgcctgtattgttcgtaacgccgtttctttgtaagaaactctttatgtataccgatacgttcctgtttcagggccagccgttcctgttccatactgatacgggtattacggagctcattttcctgataagcaagatcagcttcactttgcatgataccaatgttaagcaacggattgcttaaacgaaggatagcatctcctttctttaccatggccccctcttcaaagagacgttcctctacccttcctccttcaatagcatccagataaatcatacggttgggaagtacctggcctatgacacgaatataatcattaaactcaccttccttgatggtagcaatggttatccggttcttttccactgtcatggaagaactggtatcgcgaaagaataaataaagaattaatactattaataaaacaacgcccaccccaccataaatttgtttcggagtaaaccttttcttatgttcaatctgtgtatccatatattatttttattaaaaactgccagtccgataataatcagccaaacgcaaagccaactcatactgcaaccttgtccgcacctgttctgcctttgccgaaagcaaacgattgcgtgactccatcaactggaagactgaaacaagtccctcctcccatttacgttccgtctctttcaagacttgtgtttcggcctgtacttgcagcatagcctgccgatgctcttcccatcctgcgtacaatgataaagtgacttgctccgtctcaatacgcaagttgttgttttttgcttcaatgcgattacgcacacgcgctacgttcaattttttctttcttaaagaagcataacgatccaaaccggtaaatagtgggaacgaaactcctacgccaatatatttattccaatggtcacgtatctggtgtaaagagaataaagaattataaaagtcagacccccacgaaaaacgggcataaatagtaggactaaactgtccggaagcaatagccaactccttacgcgcaatccgttcccacatttccattttcttataatccggcaagacacgtgtagattgccaataaagttcatcggcattcgtaacaggcaatgccaacacactatcttcatccgcacacacaacagccaattccgcggatgatttcatccctatcaattcttttaaatagagaagcgacatctcccggttctttgcatacgaactataacggaacacatctccctgatgacgcgctttcacttcctgaagatcagaagcagaccgcaagcctaatgtcaaaaacgtctcggtctgctttaaataacgtttgcccaaaagcaactgctcttcggccaactgcaaaagtttttcatccaataccaccttataataagcctcgactacttggtaagccaactcattctgttttgccagacggctccactccttttccttttgcaccaaacgggtaaagcgcaaacggttgatccgagtaaatccttcaaataaggaaagggtaacatccatgcccactgttccctgattgtaagagtcagaagtatacccgttagtgccgggatcaatagaacggcctatatgcctgcccacttctgcctgtacagatacgctaggcataaactttcccatagctgccacataatcagtatgggcttcttgcacttctatctgtgtgtttttaaattcgagattatgtttccaagcataatgtatacaatcgtccagcgtggtctgcccatctagaggcaaaaccaaccctaacaatacacacacaattatcattttatttttcatactttttttactttgacggataaagtaaagcaaatggcatgccataagcatcaaactattaattatcaacaatatataaatttagaattaccaaatactgtccatttcttagacgctgttgcgtccaactcatggacactcccactcctataaaaagaataaaaatcgatcacgagcagacttttaccatgtattttaggttatagacaccgacgcttcactataaaactgaatttagaggagaaactattaaattatcttccaaaaacgtccaattattagacacctcatttggaggaacaagcaaaagcaaatatctttatccccgaaagcaaattaatgatggaaaaaggaactattttaattgtagacgataacaaaggagtactggcatcactggaactgttattggaaacagaattcagcgaaattaaaacagccggtaatcctaaccaaatcatatccatactcaatacttcaccgatagacgtcatcattctcgacatgaacttttctgccggcatcaataatggcaacgaaggcttgtattggcttaaacgcatccgagaaatcgctcccacccttcccgtcgtgatgctcactgcctacggggacgtggaattggccgtcaaagcactgaaaaatgaagctaccgactttttactgaaaccatgggataatcaaacccttgtgcacaagataaaagaagcattcggcaacggaaagaaaagcaaagtaccttcccctatcctaggtcataagccgcaaatgattgtcggtcagtcgcccgccatgcaacaactcatgaaaatggtcatcaaggtagcacgcaccgatgccaacattcttatcaccggcgaaaacggaaccggaaaagaaatgctagcacgcgaaatccaccacctttctcctcgccggaaacaagaaatggtaacagtcaacatgggagccatcagtgagtcgctgtttgaaagtgaacttttcgggcacgaacgaggggcttttaccgatgcttacgaaaaccgccccggaaaattcgaagcagcttcgggaagtaccctctttatggacgaaatcggtaacctgcctttgggaatgcaagcaaaactattaacggcattgcagaataggaatatcacacggataggtagcaacaaagttatccccgtagacatacgactgatttcggctaccaacctcaatattcaggaaagaatagaatccggtcgtttccgtgaagatttattatacagactgaataccatccatttagaacttccccctttacgggaacgcggagatgatatacttttattcatagattactttattcgccgctatgccaacaaatacggacggaaagacatttttttgcatgaaaacgcattagaaaagctccattcctaccattggcccggcaatatccgcgaactgcaacattccattgaaaaagctattattctatgtgaaggaaacgtaatccgccccaaagatatttttgtgaaacagacatggagccctcaactatctacagtagtccccaacttggaagaagtggaacgccaagccattgaaacggctatccggcaaaatgacggtaacctgaccgcaacagccgaacaattgggcatcagccgccagacactctacaataaaattaaacgattcaaactctgatatagtatgttcttcagccgtcatctctatatcgtcatcctctgttatgtccttttgattttgggtgtagccggaaccgggctggtattgatcgtcactcacaccgggattattataggatgtttgataataataatttccttcttcataaccggagccctcgtaaaacggctaaacaaatccaatgccaaactcaagctcttcttcgatgccatagaagacaaagaaaacatgatacagttcaatgaatattccggagatagggaaatgaatgcgctcagtcgttctctcaaccgtataaacgaattgcttgccactgccaaatccgacagccaaaaacaggaaaaattttattattctttactggaagaaataccaagcggtatcattgcatggaactccgaaggaaaaatcatactggcaaacagcacggcactttcacttttaggattcgaacaactggtttttgtccgacaactaaaacaactttatcccgaaataagagatttccttcaacaaaatacggtacaaaaatcgactgtcatacattccattggcaaacggcagctttcactctctctaaactatatgaaactggaaccggaaacaataaccctgcttgccatcaaagacatcagcaatgagttgagcgaaaaagaaagtgaatcatggagtaaactgacgcgtgtgctcactcatgaaatcatgaataccatagctcccatcgtatcactggcacaaacactttctgcccgtccccaaaccgatgaaaaagtaacacgcggtctgaatgtaatacgtgagcaaagtgaacggttgatggaatttacagcatcttaccgccatctttcttacctgcccgatccgataaaaaaaacattctcgctgacaacagcactccacaacctggagatactcttacaatcggacttcgagacagcgcacatccggttcaccctgcacagcatcccaaacgacataacagttgaaggagacgagaaacaactctcacaagttttcctgaaccttcttaagaacagcatccaagctttagaaggaaaaatcggaggaaaaatagaaatcaacctcacccgatgcgaaaaattacgcatttatataacggacaacggaaaaggaatccctcccgaactacaagagaaaatctttgtgcctttcttcaccacaaaaacagaaggaatgggaatcggcctcagtctgtgtcaacaaatcataaaaaaacacggaggcaatttctatttacaggaaagccaaaaagggaaaacggtttttgtcatagaatggccggaaactccctgagtacagatttccacaatatcattgaataccacttcctccgacaataatattcatttttgtatgggcaggcattatatacctgctcatacaaaaaacttatttttttaccctcagctcatataagtcatgacggcgatcgcgcaaattgcgcacactaccataagtatgcaattcgttaagcaagtccaaatccacatctgaaacaaggatcatttccgtattcggagtagcttctgcacgtttaccatctgtggggaaagcgaagtcacaaggagtaaatacccccgactgtgcatactgaatatccatattatgcacacgcggcaagttacctacactccctgcaatagcgacaaaacattcattctcaatagcacgggcctgtgcacaaacacgcacacgcgaatatccgttttgtgtatccgtaagaaaaggcacaaatagaatctgcataccctggtctgccataatgcgcgacagttcgggaaattcaacatcatagcaaatcaaaataccaatcttggcacaatcggtatcaaaagtctgcaccatcttacctcccgacagtccccaactctttatctcgtccggagtgacatgtactttttcatacatttcataagtaccgtcacgacggacaaggaatcccacattatacagtccgccatcttcctttacatagggcatacttccggttatgatattaatattataactgattgccaggttgataaaacgatcacgcacctcttccgtatattgcgccagcccgcggatgctctgtgcttcacctaaatggttgaatttagccattaacggtgcattaaaatattcggggaaaagtacaaaatcacttttataatcagatacggcatcaacaaaaaattccacttgctcgaacacatcatccaatgtcttgtagggacgcatctgccattgcaccaatccgacacgaacagttgtctttttatctacataatcctgtgtaggaggctgataataaatattatcccattgcaacaacgtggcgcaatgcttagattcctcatcattaggaagataattcttcatgacacgtctgacgtgaaagtcattagacaactggaaagtcagtaccggatcataaatctcacgcgaacgaaccttgtcaagatattccttcggccgcatcgtatcggcatatttatggtaattgggaatacgtccgccaaacattatcgccttcaggtttaatttctcgcaaagctctttgcggtattcatacatacggcgtgccaaacgcagtccgcgataatccggatgaatgaaaacttcaatgccatacaatatattcccattcggattatgagtgcagaaagtttcatttcctgttactttggcataagtatgatctcctttcaccatgtcataatcgacaataatggaaagagcgcatcccacgattttctcatctactaccgttactacttgcccctcaggaaaaatcctgatcagcgtttcaatttgttcatgtgtccagaaaacatctttatcggcatatactcgtttaaacgattgcgataactgggcataatcttcgatctgtaaatttcggacctctactttatttattttgtgcatcggttccataacatttctttttataccttaaaattggagagcaaagttataaacaaaaagacaaaaaatagaaaacaaatagcttttatttagatttttacttaaatttgccaacatctataataataaatatatgaagaacagggtcatcttttatatggtatgtacatgcatatcattatcttcttgtttagacaagaataatctaaatctttcagacagagacaaagaagaagaattagatttatcatttgatttcggaatgatatcggaaaagaaattggaaatcacaactcgttccaatagcggttcggcaatacctgacgttccattttacgtctatttggaaaatccttatacagaagaaggagaccgccgaacggatatctttcctctttattcgggcaaaacggcagaaagcggtactataaaagcgacactcgctgtacctaatacagcaaccactctttatgtttatactcctgtctcaagttttgaaatgattcagacctgcgagattcagaataatatgaatatcaccttcaccactaccggtgtcaatgccaaatccgccaaagcacgagccggaggagaaggcgtttttaccggaagaagaaatgctaaagtgatagaagcatctactaatctatactctttttacaactttcaactcaccgatggtgccagtggaggaattatcaatgatggcaaatcaaatgataaagaagtgattgaagccggaaatactttgacttcaaaagaaataacgctggcttccaattatttcccggaaagagttaccgtagaagatgaaaaatattttggagagaattattgtacagatttagagataactcctccagccaatacagaaggaacttttcaaggtgcacacgtatgggttacactaatcggtgacggaggattcagcataaataataataatgtggcaaatgccctgtgttactatacctataccggcaatctgacagccgatgatgcccaaacgatacacaaaaccatcatctatccaaatactaatacaaaaagactgacaaactctgcatcggcaactatcggttcaaaaattcaattattgtattgggatgaaaaaagcaatcaatatgtcgatacctttcccgaaggagttaaaataggctgggtcatgattagcaatggaattatcgggaattacagtaactataaaatgataggaaattatcgtttttccacctctatcctcaatagtaaaattggcaactttcccgggaactacacaaatggtattacccgttggtgtgaagaagcacaaatgaacattgtaggtatggaaaatcgtcagcataatgatgagaatgaaaataatgataaagactacaatgatattttgttcaaagtcacctccgatcctattatgaaacccaaagatgaaataccggttgcccccgaagaatatgtttcttccatcagcggcacattagcatttgaagacaattggccgcaaaagggagattatgatttcaatgatttcgttactggttattctttaataaaaggaaacaatgataaagatgtaaaggctattcgtttaacatttataccaagggctttaggagcgtcatataatagcggttttggtattcaattgcctatcgaaaccaataatatagaaaatgttacaggaggcaacatagaaaaagacgaaacgaaagcaacgattatcatttatgaagatacccgcaaggatgcattcggaggacacggcggttttatcaatacacaaaaaggaaatgcagaaatagcaggaacaaaacaaaatgtctatattactttaaaaagcaatataggactcaattcttttaaagatttcaatcccttcatatatgttgtcaacagaaatcacgaaatacatttgactgacaaagctccaacaagcaaaatggatatatctttattcggaagagaggaagacgatgactgctcaatgcccgaaaaaggatattactatcgcatggataatgattacccatgggcacttgatatcccttcctcaaataatagtctcaacaatttatggcgatatcctatagaaggaaaaggagtaagtgaagcctatcccgactatctcaattggacttcagcgtccggccatcatataaattggctcgataagcagaattcagcttacatatattgatagagatttaaaacttttcattacctttgggacattaaccctagaacacactaaaagaaacaacatactatgaataaagaattagaaatgaatcccaaccaattagtggcttttataggtaaaccttgtgctgaatttaccaaagcagatatcatacactatatccaagagaacggtatacgtatggttaattttatgtatccggcaggagacggacgtttgaaaactcttaattttgtaattaacaaccttggatatctggatgccattcttacatgtggcgaacgagtagacggttccagcctctttccctttatagaagccggaagtagcgacctttatgtaattccacgtttccgcacggctttccttgatccatttgccgaaattccaactctttccatgctttgctctttctttaataaagatggcgaaccattggaaagctctcctgaacatacattgcaaaaagcatgcaaagcttttaccaatgtcaccggtatggagtttcaggcaatgggagaattggaatattatgtaattgcccctgatagtggaatgtttccggcaaccgaccagaaaggctaccatgagtctgccccctatgctaaatttaatgatttccgcacacagtgcatggcttatattgcacaagccggcggacaaatcaaatacggacattccgaagtaggcaatttcaccctgaacggaatgatatacgaacaaaatgaaattgaatttctgccggttcgggctgaagatgctgccgaccaactgatgattgccaaatggatcattcgcaatctggcttataaaaatggttatgatattacatttgcaccgaaaatcacaaccggaaaagccggttcgggattgcatatccatatgcgcatcatgaaagacggacaaaatcagatgttgcaagacggggtattgtcggagacagctcgcaaagccattgccggaatgatgattacagccccttcaattaccgcttttggcaatacaaatccaacttcttatttcagactggttccacaccaggaagctcccacaaacatttgctggggagaccgcaaccgttctgttctggtccgggtacctttgggatgggctgccaaaacagatatgtgcataactgcaaatccgttggaaagccaaagcaattatgataccactcaaaagcagacagtagaaatgcgttcaccggatggctcggccgacctctatcaattaattgccggactggccgtagcttgccgacatggttttgagctggagaatgcactggacatagcagaaaaaacttatgtaaacgtaaatattcaccaaaaagaaaacgcagacaaactaaaagcattggcacaactgcccgacagttgtactgcttccgctgaatgtctgcaacaacaacgtgagatatttgaaaaatataatgtattcagtccggccatgattgatggaattatcaacaaactacaaagttacaatgataaaattctgcgtagcgaactgaaagacaatcctgaagcaatgttggccttagtaaacagatattttcattgcggataaggttttactaacgaagttttataaataaggctcagaaaaagaacttgctcaagcaatgaagataaacggtcttctgcttgagcaagtttcattttatacaatcagaatcttaccggattgaattatcgtgccttttcaatgacaacctcaggtaacggagcttttcccacagaaacagttccccccaaatttcgtaaatagtcaataaaaacaacagtcggttcaagattcaaatcattaaattctttaattggtttttgaaatagtcctgcatcgtaaccatctccaccatcagtaataaaagaatccagcacaacaatacatttatctgtatcctttatctttttccctgtaaccaaatcagtgacagaagtaacagtcactccatccgatgccagaccgatagccaaatgagatgtctgcaaaaagccattcttattaatacgaccatcagccaacaatttcttcaactccttaccggagaaatggaacgcaagcaaatgtccttggaagggtaacacattccctgcgcgaagctttgtcacctcccctttcaatatacttgcacgtaaaccaccgtaatgatttaccccgacaaccgactgcttaccatatttcttcgatatctgagaatatttacggaaagtatctgcataagatgccgtcacataagctcccaccgtagtataatcttttttattaatattacggtcatggattaaatcattctcagccgtcgtgagtacctcctcaaaaccatatttatccatttctttgttcaccagcgagtcaataactgaattaccctttcctgctacacgaatggtatccccgccaatatactgaatagtatacttgcctgcatcctgtttcacttcaaaattcagtttccccaaatgagtgccatttacacctgcttggatgataggaagatgattcacctcagccagcaccactttatgcgaatgaccggaaataatggcatccacaccttctacccaaggaagccgctttgcattttcttcttcaatcacatcgggattagacatgtccgtgccaatgtgcatcagcaacaccaccatatccactttcccttcctttttaagaccggtcgcaacctgaacgcgtgccgcatccacaggatttacgaaatcaattcctctaatattttcagaccgtgtcttcacagccgtgtccgtagttgtcaatcctacaaaagcaatctttacgctgccgccattcttaagtggctgcaccaccatcttgcaaggctccagccattccaatggagcatggtcgtcttttgctacaatattagctgcgatataatccatgcataccgctgctgtatcaaccaagtaaggcaatccccagtcaaattcatgattgcctattgccgacatcttgacatccatttccctaaacatctccggcaacgggttcccgcgcgtgattctggagaaatagctgccgctgaagttatctcccacagagacaacgacagtattcttattctttgctttctcgtccaaaactgcctgaaccaattctgcggctccgggaacattgcggtctttcacaaatgcgccatgaaaatcattgaatgacaaaaacgagatggtatcgatggcattccaatcaggacggtgtcctccttcatgaatttgcccgaatgcgatgaatggcgaagcaattaacagactgcaacatagagcagcctttttcaaaagtgttctattcataatcaattaataataggtgttcatcctccctcctgctccctatcggaactccttcaaacagaacaaagataacactagtttcacaatccctatcatgtttcattgactatttttaatcccactttcccgacagggaataaaaaaggccaacgtatccctacattgaccttcttgcttagagcggaaaacgagactcgaactcgcgaccctaaccttggcaaggttatgctctaccaactgagctatttccgcaattattcattctaacagtgcccagaacaggactcgaacctgcatgcctctcgacacacgcacctgaaacgtgcgcgtctaccattccgccacctgggcttttcgtgagcggaaaacgagactcgaactcgcgaccctaaccttggcaaggttatgctctaccaactgagctatttccgcaattattcattccgatggtgaaggaaatgagactcgaactcacacgacataactgtcaccaccccctcaaagtggcgcgtctaccaattccgccattcctccatcaacttagaaattcttgtgagcagtgcccagaacaggactcgaacctgcatgcctctcgacacacgcacctgaaacgtgcgcgtctaccattccgccacctgggcttttctgtgtaactcgcttgttactacgcacaagatttctttcgtgagcggaaaacgagactcgaactcgcgaccctaaccttggcaaggttatgctctaccaactgagctatttccgcaacttccgctttcggcttctgatattcatcagctgtttcccgattgcggatgcaaaggtagtgcttttttctaaacctccaaaacttttccgtactttttataatacatttattacattatttcaccaaattcctcattatcaatacaaattggaattaagtttttcttatatatcacgacatacggtctctataatcttcatatctgaaactcttatatacctttaaggtatcgtttgtatgccaaatggcaatagaaggatgatgaattccattgaacatattcgtcttcaccatggtataatgaatcatatcttccaacacgattcgttcgcctatctgtaagggatggtcaaagcgccaactacccatataatcaccactcaaacaactgtttccacctaaacgatagatatagtcttccggccgggctgtctttacagcttcggcaggcagtgtgtcggctccgcgcactgtcggctgataaggcatttcgagacaatcgggcatgtggcaggtaaagctgacgtcaaggacagcggtcttaatgccacggctttcaacaatatcaaccaccgaggccacaagaggaccggtttgccaggtgaaagcagaacccggctccaaaataatctccagatgaggatagcgcgctttcaattcctttaaaagggtcacgagatgatctgtgtcataatccttacgtgtcatcaggtgacctccacccaaattcaaccattttatctgggaaaaccagcgagaaaactttgcttcaatatgcttcagtgtatgctccagctcataagaaccggattcgcaatggcaatggcaatgaaatccctcaataccggcaggcagtgtatcgggcaacaaatcggcagtaactccgaagcgggtaccgggagcacaagggttataaagttccacttctacttccgagtattcgggattgatgcggataccacaggaaatcttttcctcatttgcttcaatctccggataaaaatgccggaactgattaaaagaattaaatgtaatatggctgctgcacttcatgataacaggaaaatcggtttcggtatatgcaggagaataagtatgtgctttgctcccaaactcctcataagccaaacgcgcttcataaaccgaactggcagttgtatatctgatatactctctgaaaatgggaaatgacttccacatagcaaaggatttaaaagcaaggataatctctacccccgccttatcagcaacactctttatcaaactcagattctttctgagtaatttttcatccatcacataacatggagacggtactttatctatatctatcatatgattaaatctttctatataaaaactattattctaccaccttaaatcgcgcaaactttaacaacagttgtttttcccctgcattacggaaacgtacggttgccttactgttttctccggtcccttctatttttatcacatcgccgataccaaaacgttcatgttctatcacctgaccggcctgcacatttataggtaatgtggcagatgtcggcgacttcccacccatcgctgttcctatctttgtcaaattacgtggtaccgtaggacgaatcatctccactttcggttttccgcccaattgcggacgctcattttgttcgcggcggaaacgaccggctccctcgtctatccttcttgccaattgctcctcttgcggcaactgcaagaaatgcgcatcaatatctttcaagaaacggctcggactgctgaactccatctttccgtatttaaaacggcttttggcaaaagaaagataacaatgttcttcggcgcgggttatcgccacatagaacaagcgacgttcttcttccagctctttataagaattgagcgacaatgcactgggaaataagttctcttccagccccacaacaaacacatttttaaattccaatcctttggcagaatgaatggtcatcaatgttattttctcactatctccttctttatcattatcctgatctgtcagcaaagatacttcagataagaagtccgttaaacggatatttgcgctgccttcttcctcacgtgtggcacaaaagtcgtgcataccatttatcaattcctctatattttcctgccgactcaaattctcaggatcattgctctgataaatttcattcataatacccgactgacgcacaatcagcgtacctacttcatacgcgcttttctttgccgcctcttttataaagttttctatcacttcacggaagccctgcaacttggcatgcgtacctttattgatagatactccataagccaacgggtcttccaatactttccagaggctgacatgattcagcgtagcagcatctataatcttgttcaacgtagtgtcgcctattccccgcgccggataattcaccacccgtttgaaagcctcttcatcattcggattgacagccagacgaaaataagaaataatatcctttatttccttgcgttgataaaacgataatcctccatagattttatagggcaagctacgcttacgcaaagtctcttcaaaaatacggctctgagcattggtacgatatagaatagcaaaatcattgtatgaataatgttcgcgtgagcgaagcttcactatctgattggcaacaatctcaccctcttccacatcactatatgcactaaacactccgataggctcccctttcgccttttcggaaaacacttctttgcgaatttgctcgctatttttttctatcagactgttggctgcacaaactatggtttgagtagaacggtaattctgctcaagcttaaagagtctggcacctttatagagttgcgtaaacttcagtatattgtcaatattcgcacctcggaaagagtaaatgctttgtgcatcatcacccaccacgcacacatgctgatgttctttagtaagttggagcacaatgctatgctgtgcaaaattcgtatcctgatactcgtctaccaatacatatcggaattgtccggcatatttttgacgaatctcaggatggtctcggaacaacaaataagtatagaccaacaaatcatcaaaatccatggcatcactctgcctgcaacgctcccaataacgacgatagatatcgcgtgtggccggcactttggcattcacatcattctgataaagttctgcatttgatgcatacgcatccggtaacaccaaatgattctttgcgttactgatacgtgactgaatcattcccggtttgtatgtcttatcatccaaatgcatttctttcactatagacttgatcagactctttgagtccgaagaatcataaatagtgaaactggaggtaaagccgatgacttgtgcctccgcccgcagaatacgcgaaaagatagaatgaaaagttcccatccataagtagcgggcctcctcacccacccggcgggcaatacgctccttcatctcgcgtgcagccttgttggtaaatgtcaatgccagaatagaccacggcttatatccttgttctaacaaataagctattttataagtcagcacacgcgttttccccgaccctgctccggcaattaccagagagggaccgtcattataaagcactgcattgcgctggctctcattaagttcttccaaataattagtcatacgtttcatctttcgtccgcaaagatagagaaagtttgagtttatctgaacatttcgcatggcaataatgttattataatagaagtttaattcaaaactcgacttaaaatgaatataatattaacaactttaatttctctagttatgacttacgaaatgcccaaactcccgtatgcaaacaacgggctcgaacctgtaatcagccaggccactatagattaccattatggtaagcacctgcaaacttatgtaaacaaccttaacgcacttgtgccgggtactgaattcgaaggcaagagcgtggaagaaattgttgccactgctcccgatggaggtatctttaacaatgccggacaagtattgaatcatacactatatttccttcagtttactccgcagcccaacaagcacgaaccgtcaggcaaactggccgaagctatcaaacgtgactttgggagctttgacaacttcaagaaagaaatgaataacgcttccactaccctgttcggttcaggatggacatggctttcagttgataaagacgggaaactgcatatcactaaagaagctaatggcagcaacccgtggcgtcatggattgaaaccgctactaggcttcgatgtctgggaacacgcttattatctggattaccagaaccgccgtgccgaccacataaacaagctgtgggaaatcatcgattgggacattgtagaaaaacgaatgtaatagtccgaacgccacactaagcacctaatcatattcagagggtgtgccaaaacgttgataatgctatcattttaacaaagagatagaccatttcagttttgacacatcctcttttttgtactttcggtttccacccgaagttttgcacaccggcaaaaacagggggaggtaagcgaatcaaatcttgatgcaggatatgacggagcctgacacgatacatatatatgtataggccaatgcgtacgtccgtgttgctcaatgcgtacgtacgtgttgaccaatgcgtacgtacgtgtggctcgatgcgtacgtacgtgttgcccgatgcgtacgtacgtgtgacccaatgcgaatattcacgttgccaatatgaatattcgcgttgccaatgtgaatatacacgctagccatgcagcccacaccggatgttgccaaaagaccttgaggttttaaaaaaagctcggcatcttttttaaagacctcgccaccttttttttaaagctcggcatctttttgctttccttttgctcttcttttgtcctgtcattctgagctgcgcgaagaatctgtaaacgtaaagtgaatgcattcggattcttcactttgttcagaataacaaaaatgagaacacttcactttgttgacaaaaacgataaggctgcactagtgaatgacaagaatgataatacgaacggagttctcggacagaatctcccccaccaagtcagttattcccgtttcccattcatccttacattttaatcaaaacacacagacaatcaatcggttaaaactgacagagcaccctttcatcctcctttcagccacgttccccatgtcctttcaaatctgccttcagtatttgtatctacttacaaaagtgttacgaatgaaaggaggctgagacgataatgtagggaggttcattcacaaccggcccccccatcaacagggcgtttcaacggataatgaaaggagaaaagaagaaaccgacttccgactgtagaacggaaagacacagttgctttttatggataaaaactacgcatttgtataatttagtgaaagccggggcgaatacagccaagccggattatatcaatgaggctgtgtcaaaactaaaacgaccaatgacgaaattgtgtcttgtcattctgagcttcgcgaagaatctgaatacatccactttatgcttccagattcttcatttcattcagaatgacaataacaccagactgctgaaaagcttccccgtcattatcgattcggtccactgatgtaagtggtgcgcactcagaatgacagagctaaatgatagcattataaacgtttagacacagcctctgtcatttcattataagtatgcttcttcgtgcactcccttcacggcccgtccgcttggttcgttcatgttcttgaaggcggcatcccatgcaagggcttcggcggtagaacatgccacacttggcacacttggcacgctgcgggctgcgctttcactgggaaagtgctcctggaagatgctgcgatagtaatattcttccttgttttgcggcgtattgataggaaaccgttcggctgcgtgcgccatttgctcgtcactgacggcttcggcggtaagggctttcagcgtatcaatccagctatagcccacgccgtcgctgaattgctctttctgtcgccatgctacactgtcgggcaacatgtccgcaaaggcttctcggactattttcttttcaatggtgcttccgggacacatctttgcttcgggattgagtcgcatggctatgtccagaaattctttgtccaggaaaggcactcggccttccactccccatgctgcgagggatttattggcacggaggcagtcatagaggtggagcttgcctagtttgcgcacggtctcttcgtgaaaggcttgggccgtaggagctttgtggaaatagagatagccgccgaacacttcatcagccccttcgccactcagcaccattttgattcccatgcttttaatgacgcg

SEQ ID NO: 6668 - DNA, 143916 bp, Unknown
  gut microbiota DNA sequence
atcaaacacttttttattaatttctgaaccgacttatgctaactaactgatttataaacctgttgtagaacataaataacaaaacataaacaataggaaaacaaagcatatacattatcatatatattaatgcaaattgcggttcaaagatatcttcatataacatttatttcttctcagaactggaagtaaataaacggttgtatatcgctactctttatctgaataaccaaataaattaatgccaccagcaataatgcctttcccaataaaggcagtcgcaccactccacgacaacaagcgtcttgccagtcatcaggagcaaaatgtaacaaataacctattcccatcaacacaaatactttccaatatccttcaataagctgcccaagcacttcgggatgaaaagctgtaaacacttgccttatcatcgtgactgatgcttcaaaagtactgttacggaagaatatccaacagaaacaaacaaaatgaaatgtaagcatcactgcaaagacctttcgaatgccatagctcacagctgttttaggtttgcccaaaaggttacgccaaaacttgtgtgcagctaatgccactccatgaaagcctccccaaataacaaaattccaagacgcaccatgccacagcccccccagtaacattgtaagaaacaaattaatataagtgcgtatttttcctttgcggttaccgcccaatgaaatatacaaataatcacgcaaccaagtagataaagagatatgccaacgatgccaaaaatcagtaatactatctgctttataaggagaattgaagttcatcggaaaacgaaaaccgagtaataaggcaataccgattgccatatcgctataacctgaaaaatcgcaataaatttgcaaagcgtaaccataaataccaaacaaattctctactcctgaatacaaagcaggattatcgaaaatacgctcaacaaaattcacactaatataatcagaaataactgcttttttaaacaaaccactaacaacaaagaatacccccgtaccaaacatctctcgcgaaaccatcaacggctcacgaatctgagggataaaatcacgtgcacgaacaataggacctgccaccaattggggaaagaaagatacataaaacacataatccaacaaacgttccaacggctgcaactgtcggcgatatacatcaatagtataactcaatgactggaaagtgaagaatgaaatgcctaccggcaaaaaaatatccaatggttcaaagttgccattccacaatggggtcagcatctcataaaaaaaattagtatatttaaaatagcaaagcagtcccaaattgacaaacaaactcaacaacagaaggcctttcctaccccatttactttccgtcacagccatacgtcctgccaggaaaaagtctgtaaccgtcaccacccctaataaaaagaaataaaagccactgctcttataataaaaataataggaaaatagagaaacaaacaaaatacgcgccgtgtccttcttctgcaataacacatatatcaggctaaagcccaaaaacagaaacaaaaacaatccgctactaaatatcatcggttgtttggcattataagtcaatacctctgccaatttattccaatccagttgccacatactcgttatacgctttaattaatgcttgatgtaataagttaccttgcagccgatacccttcgggagtaaaatgaatcccatctgccctcaacagatgattacgcgtccaatttttgcaagcatcggtcttccctcccaccacagtatacatatcccacacagccatcccatgtttgcgcgcatattcccggatgatgcgcgatacggtcactgttctcggattaataactctggaacggcgacgtcctacatacgctcccggaggagtcgtcaaaagaaacacggtttcggggcaagcctttttcaacattgaaagcagacggtctatctgcatttcgtgtaccggagccaaatagcgacggctatgcgcttcatttgttccaaatgaaagaataatcaaatcaggccggagagcagctatttcttttatcttattttctgtagtaaaggtaacacaagtagctccgttcacccccattatatgataaacaagtccgggttcgcccgtctcatgcgccaatccacccgtacggtaggttatactatcaggataaacagcctcagcaccgaaatcactttccaagcaacgacgggtaaccaaaggatatacatgccctctcacatgagagtcaccaatatgaacgacacgtaccggcccgttcatctcattcagttttcgaaaaaaaggaaccatcgaacgtgtactgtcttctatcacattatctgctgtatgtttgaaactttccggcaaagaatcgtgaaaaacaataagccgtccgaatgaatgcatttctttagtctgccccggcaaattcaatggttccaatacgcgggctatcggaggaagtgggtcttgagcataaagcctttccaaagacgagcaaagcagaaataccaccgtcactgccactacaaagcatccgttcgttttattccgcttcataagccttccgcttttcgtattgttccttaccatacatcaacgtttcaaacaaaatgcctgacagatgttttcctcctttaaagttaatatgcgtgtagtcaagatttgccatcttccggtctatcatatcaagaatacttccttcaccgcccatagcttcatacatattccaaaatgcaatccggctatcggctgcaatagactgctgataacgaatcaagttcttcacacccggcatggtgcgcaattcaccatttcgtctgtcatccttaaattcacggtcgcctacactcaccagcaggatagcagcttcgggaaaagcctccttgagatgagcaatcaccgcaagcataccttttttataactctcgtaattcacaccgcgttcggttgctacgttcagtccgtactgaagaacaatcaagtcataaggacgcacccgttgaaaagccttcaatgtcttcaaggggatacttcgcaaatgcaagccactgcttccgcgcacactgaaattatcgacagccaccccttgcttgccatccattgctgccccaaagaaagtgacagaatcggattgttccacactccatttcacttgtccgattcgcccctccacagagagcatctgcaatcggtcgtcccccggctcttcatgcagcacatctgttcccccgtttatttgagaacgaataccggcaaatcccttgttcaggtaatagagagtagacacctcacatgtatccaaatgagaagcatacttggactgccctttcagttgcacgtatgctccctcacgagcaaaaaagtaatgcccggaaatatcttgcagacttctgtcaaaacctacagaatcattgctcgaatgactgctccaaccaccaaaagagtgacgaacagtggggcgatagccactaatagagctagttatgggcacataacctactccacaccctccaaattcactctgaaacctttcgcgcaaatcagccgtgaagatatctgcttcgataaaagaatcaccgaaataggcaatacgaacaggacgtttcattgtcctgatggaagaaagcgcttcataaaaatgcttcattcccctcatagtagaatccgaatagtcttctatgcaggtcattcccgttttgcaagtatctacaaaaatcggctttacgggaggaggaagaacaatggtatcagaatccgccacttcctccacatccggacggatatcggccagcaggtcaactttgcgaagctgttcaccatccagtttcatcgacggaagaaaatacagccccaataaagctcccacagtcagtaatgtgagaaagaatgtggctgatatataatttttcatattatgttatttgtgaatcagacgcaaaagtaatatttttttagacgagagcctttatgaaaaagaaaaaaaagattgctcagcccaataatgcttgtgcttatagcgcaaatacatagtttgccggaaagcagattgtgattgcttaaccacgggggtggttaaacctctccacccgggtggttagacttagtcacgggggtggttaaagttaaccacccccgtggttaacagatattttgctttcatgaataaaagaagatacagaaacattgcataccggcagagtacgcataagtggatgcaacttattgttataacatgaagaacggaagcgtttgggaattctttttgtttagaataccacatatagaagatagagaggagcataggaaaaacaaagtgacggcaggagaacagaaaaaggaagtgtgtcaaaagtaatatgatagcaaagattacttttgacacctccctctatggatatttaaatcgtcttttctacgttccacacaaaagcacgaagtcccaattgttcggtctccttatccattttgtgcagagcatcaagtaaagaatctactttcgcatcatccacaacagtaataatagccgaacacatactcggccatgcatgactgccgtaatgaggctcgcccttgacacttccacgtccctgtacttgctgccaatagctgaacccacgacagttttgacggtcgagcaatgccaaaatacgttcataaaaggcttggtcgaatgtgatgaatactgatttcatattttcaaatttatgatttatatattttttcctttagtcatctcttctttgtgtgactgatagtaatcgttcagctcacgatttgacttcatcttcttacgggcacgcttaatgcctgtaccggcaaatgaacaatacagcacaggaactaaaatcaatgtcaacaccgttgatacagtcagaccacctattacggaaacgcccaacggacgccacatctcagaaccttctccacctccgatagccattggcaccatacccaaaatagtggtcaatgtagtcatcagcacaggacgcagacgactccgaccggctgtcaccaccgaatggataaccgccataccacgttcacggcacagagtaatgtagtctatcaatacgataccgttctttactacgataccaatcaacataataccacccaacaaactcataacattcagtgtcgttcccgttccgaagagtgccatcaacacaccactgaatgcaaatgggatagagaacatgataataaacggataggtcagtgattcaaactgtgccgccatcacaataaataccaagataataatcagtactgccaacgtacccaaatcaccgaacgaatcctgttggtcttcatacgaacctgctatctgaatgctaattccaccgggcaagtccatcttgtcaataatggcattaccttctgccaccacgcttcccaaaggagcccccgatattaccgcagacacagtaacaatacgttcgcggtctttacgttcaatggtaggaggagccgaacgttcgactacttttcccacatcttttacacgaacagctttcccggcattattataaataaggatattctccaaatcttcaatactggtacggaattcgggcgcataacgcactttaatatcatattcgtcgccatcctcacgataataggatgacaaagcaccattcacgcgattacgcaaatacatggcagccgtagaaagattcagtccttgtaaagccagcttctcacggtcaaaatccacttgatattccggctgataatcctgacggctgatgttcacctctgatacgccttttacattcagcaaagccgctttcaagtcagcagcagccttatcggtcgccgtgaagtcgtagccataaatttcaaaatcggctgtagactgcccacccatacctccactgcttccgcccaaaattacctgagctttatccaattcgggatatgctttcaaatcctcacgcataccgtcacaaacttccgccagtgtcatctcacggtcagcagggttatacagattaatattaaacgaaataatatgactaccgttatcctgaatggaagcccaagtattatcagcatctgcctgtcccaccgtgtagttgcagacacgcatcactccatcgtactttttcaaccagttctcggttaactcttgagccaacgcctgtgcacgctccacccgtgcaccgataggcaactgaagctgcacggaaatacggctgttatcctgtgacgggaaaaactccgtacctataccttttgcacaaatcaaactgagcacaaagaatcccaaacatcctgaaatcaccgtcttacgatgacgaactgcccagtccaaacggttctgataccaagtatccaacccgtccaacgaacgctcaatcggtttatagaaagtaataaaccacttactttgctttttctgcaaacgaagcatctgtgcacacatcatcggagtgaacgataaagccgaaatggtagaaatggtcataatcacacacatcatccaacctaactgacggaacaagactcccgacataccacttaccatggtcaacgggaagaacacggcaatcatagtcaacgtagatgcaataacagaaatagccacctcattcgtaccatgaatagcagcctgcttaggctcggaaccacgttcgatatgagtagtcacattctccaaaaccacaatagcatcgtccaccacattaccaatagcaatagacagacaggaaagtgaaataatattcaaagacccaccctctgttatcgccagataaatgaaagaggcaatcaatgacatcggaatggtaatacaaataattaccgtggcgcgccaacgccccaagaaaataaacacaaccaacaccacaaagagtatggcatacataatggtttccgacaaactgtcgatggtattcaaaatattatcagatgtattgacaattacccccaatttcacgtcactgggaagtgacttttgcagcttaggcagctgttccatcacctttttggaaatatttaccgaattggctcccgactgtttctgaacaacaatcatggcaccctgcacaccattattatacgtttcctgcgcacgctcttccaccgagtctacaatctttgccacatcacgcaaatagacagatgcaccgttgtgtgtacccactacaatatctgccatctcgcgaggatctttaaattctccctccacacgcaatgaataggtattactacccacatcaaacgtacctcccggagtatttttattttcggcaccgataatagaactgattgtttcaatagtcagattataagcatccagtttattcgggtcacaatagacattcacctctctcttgggtgcaccggcaatagatacagtacccacacctggaacacgtgccaaaggattcaccacattatcatccaaaatcttataaagtgcaggctggctttcttccgcctgaacggaaagcaacaggataggaatcatgtccgtactgaacttgaagataataggtgtgttcacttcatcgggaagctgtgaactcaccatgtccaacttatcgcgaacatcattggtaagcacatcgatgtcgtagccatattcaaattccaatgtaatcacagagatattttcggaagactttgacgtgatatgtttcagattactcaccgagttcagcgtattttccaacgggcgagtcacattattttctatatcggaagcactggcaccctgataagacgtcattaccatgatggtattggtatcaatatccgggtacaagtctaccggaagtttcgacagtgagaaaagaccaaagattgctaccgcaaggaagcaaagtgaggtcataatcggtttcttgactgctccttcgtataaactcatataattatactcttaaattatttacttacttcaacttccactccatcggcaaggcgggtctgacctgcaatgactacctgcgagttatcatctactcccgaaagcaattcatattcggcacccatacgtcgtccaagctctaccttattataagacaccttaccctctttgtatacatatacataacggtcacccgaaccggcacgtttcacgatagcccggtcaggaaccacgacatgattcatcgtaccgaaactaagtgtcacacgtccaaacattcccggacgtacccgcttgttggtattggtcaatttcacttcaaccggaaaagtatgggtcgtcgcatcgatggtaggatacaccaaacttatttttccttcgaatacttcatcaccataaacatcaaattttacacttacatccattcccttttttactcttggaaaatatggctcggatacattgataagaagtttgaccggagttatctgctcaaccaccaatacaggagtagcaacagaagaatataaatcaccattatcaaaattacgcgcagtcactacaccattcagaggactcagcaactgagtattttcgagcaaattattataagaagtacgacgcacatccaatgtagtcttagcggcatcccattccgacttggaagcacctcccactttatacaattcatccacacgcttaaactccgtttcctcattttccaattgcagtttcaactgcttcaagctagcagcatccatctgcaccaacttttgacctttggaaacataatctcctacttcgacaaatatcttatctatacgtcccggagaagtcggagctatattatttttcgcttcagcttccactgttgcagtatattcttctatttgttcaacctctcgtgaagtcactgatgccaatttcaccaccggtttattcagctgcgcagcctcttcctgtgttccttctttcttctcttctccgcctgaacaagcgctcagtaaagccaccaccagcaaagctgctatttgaaaagtttttctcatactgttatctttatgttatgttgttattattccattaccacttcttcacccatcaccaaatcaagatcagcctttgccaccaagtagtcataaatggactgattatatgtaagttttgcctctgtcaaagctacctccgaactatttaattccaagatagtccctttgcccacttcatatcttttttcagcaatagtccgtcctttttctgcctgaaacacagcttctttattactaacaacttgttcagaacttgctgccatattatccagatagctggtagcctgcatggtaagttgacgttctgtattaatacgattctcttcaagctgtttcatctgaatacgggtttgtttcaacttggtaaagttacttcccttaaataaaggaatagtcagattcaaaccgagagttgaataagggcgccagtcatactccttgaatttaaagttatcattcatagaagtgtacatgtactgaaagttggcagacagtgtaggcataaaattggtatattgcagtttcagattttgtttcagttgcaatgcattcagttccaattgtttcaaagtgctgttgtttatcagattattgggtcgtggcattgcctggcgagtaaacatagacatttcataatctttcagattaccatccactgctacatttacttctgcttccattcccatcaaaactttcagttgcagagtagccagatttacaccgttacgggcagacacaaccgtcggtttcagactgcgcatctgcacttctgcactgattttatcgtactcgctgacagagccctgctcatacttggctttcaccacattatagttgtcttcgctctgcttataacttttcagcagcacctcataactatcctgtgccaaaagcaactgataaaaagcttttgttacttggtttaccatatcgagacgcgaagaccgcgctttttccacagccaaatccacatctgtctttgtcagactgatactcttataaagtgcaggtgcaaagacaggaagactcacagacagccccccgctatacgtgttgtctgttcccacttcaatcaccttcccctccatagcgaaagactgcttcttgatagctcgtgaataactacccactaaattggcttcgggaaacagacctgaataggcttcccgacgggcttccttctttaatttgatttcttgaccagctactttaatagtcggattctcgctcaacgctatcctgaccgcttcctgtaaagtaacttttaacgtatcttgtgcttgtgcactgtgtgctgctgccactgccagcaacaacaaggctaacttaggctttaaaaaaaacttcatttactgtttactctttattattaggtaactaactagttctatccattcttgttatactcctctcctttctggttatgaaggaaattatctacaatcttcaatcccttttccgtagaaatgccccgcatatgcataaatacaactgtctcgtatatttcagccagcgaataggatttacatatttcagagcgaagcaatatatccatctgctcacctaccataacgcgaacaatagcataattcacatctttgcgaaatattccttgattgacccccttttgataaaactccattgcggcatccaggttttctttacggctttcggcaatataagccacaactctaggatacttttccatatcctcaaagaacttccgatttgtattctggaaatcctgtacgctcttctgataaaaacgaagaataacttccaagacattctctgccttggaagctatttcttccattgatttcttcatctcctcccgatgcaatctcatcacatcaagcaataagtcttctttgtcatgaaataactcgtacagcgttcttttcgatattgacaaatcggcagcaatatcatccattctgactgtctttacccctttccgggtaaatgcttttgcagccgcttgaacaacatgctctcttactatcgttttatctgcttttttcttcttaacactgttcatcataaatagagaggagacaaagatacacttattttataatacccaacttcgaatttcgaacaaattccaccaaatgcactatttcagggctggaaggcacttgttcttcaatacggcgcaatgcatcctcaacagaggtattcgccttatacaaaatgcgaaaagcatgggctatgtgcttaagcaccgtttccgaaaatccttcgtgctgcaataccattgtattgatactataaaatgaagtcggctcgtgagctgccacacaataaggaggaatgtctttagtaaaacggcatccgccctgcacagctgcataagtgcccaaacgagtgtgtccctgcatcaacacattggaagtcaaaatagcataatcttcgatgacacaacatcccgatacctgcgaaccattaccaataatgcaaccattaccaataatcacatcatgcgagatacgcgctccctgcatgataaaattattgtttccgaccactgtttcatcgccgccaaaagtggcacgaataatcacagcgttctcacgaatcgtgttattatcacctatacgggcaatagtttcatcacctttatagttaaaatcttgcggagctgctgctattacagctccgttataaatcgtatttccgttaccaatgcgtgcaccactcattaaactggcgttaggcatgatgacattattatctcctatttccacattcttatcaatgtagacaaaagggtgaattgttacgtttttcccaatctttgctgacgggtctacataagccaacggactaatcatattcgtatcgtttttaaggttaattattctcgtccacctcctagtgcgctatacaaattgataacagcctgcatgcgctggaaagtatcggaaacttcgttcaactgagcacttagcaatgattgctgggcagtaatgatttccaaataagtggctttacccgcctgaaacaaatctttgttcatttctactgctttctgcatttccgaaacctgtgcctgatgttcagtcagtttcttatctgccgtgtcataaaggaacaaagcatcacttacttccttacctgcttccagaatagtttgctgatagttcatcttggcaatctgttcttctgctttcgacactttcaaattggcaaccagttttccgcgctggaaaataggctgagtcaacgaaccaatggcattccaaagcatcacagccgggttggagatgaccgttccgttagaaccgttcgtccatcccaatgttccggttatattaacccccggataaaaagccgaacgtgcctgattagtggtatagtaagcacttgccaacgccagttcagccgcttttacatccggacggttttcaagcaactgtaagggtacacctactgccaattctgtcggcattacttgttcttccaatgttccacgctctatattttgaggagccttggccaataatacggaaatagaattttccgtttcgcgcacctgacgtttcaagtcggccagcgaagcttcagtttgatgataagcccctttactctgtgctacggcagattcagtagtcataccggcttctttcatagcctccatggtgcgaactgtttctttcatcagagctacattctcttcagttacactcacctgacggtcaagcatcaacaatgaatagtaagcattggcaatacctccaatcaactgtgaacgtacagcctgctgataagctttactttgcaaataagatgctttctgcccacggtgtgcattcagtaacttgccaaataaatctacttcccaacttgcagaagcgggtaaagtatagttctttacaggagtagctttatctacactagtcaacgaaccttgcggagcaagtgccaacgaaggcagataagacaggcgggcagaattcaaaagtgctttcgattctttcacacgcaacacggcagcctgcatatccacattatttgccaatccttcttcaattaaagcctgcaacttcggatcgcggaaaatttccttccacgacaggttgcccatattagttgtatcattagcagccaacgtatcgttaactgccgccgggtcgcgatagataccactggcatctatcgactcgggacgatcatatgatttatagatgtgacaactgctcaacaaaagcgttgcacaacacagtcctattatctttttcattgtttttctattcatttacgggtgtattgttctatttcgggttcaacctctgtatcatctacattctcccattctatcggtttgaatttttcctgcaaccactggaataccacgaacaacaccggcacgatgaatatctggaaaatcataccaatcaacataccaccaatggccgaggctcccaaagtacggttaccgtgcgcacctactcccatagccagcatcaacggaatcaaaccgacaatcatggccaatgaggtcatcagaatcgggcgcaaacgagctgccgctcccaatacagccgcccatgaaatactcataccttgtttacggcgatccaaagcaaactctacaatcaaaatggcattcttcgccaacagacccatcaacataatcaatgcaatctgcatatagatgtcatttgacatggttcccaaaatcatcttcagtgccggaatacttcccaaagctgcaaatccgtttacaaacaggaagctacctaacaaaccgaacggtactgaaagcaatacggacaacggcagaatataactttcatactgtgcactcaacaacaagtaaacgaatacaaaacacaagataaagataatacctgtagaactgccactggtagatgcctcttcacgagccatacctcccaactcataaccgtaaccggcaggcaaattctcttttgctacctctgcaatagcctgcaaagcctgtccggaagtataaccgctggcaggagccaccatcactttgatagacgtataaaggttgaaacgactgataacgtccggtccatacacctttttgatagaaacgaactgggaaataggagccatctcatttccattacgtatcttaatactattcaaagactccagattcttggttgcttcgggttctgcctgaatcattacacgatacatcttaccgaaacggttaaagttagaagcatacaaaccaccgaaatatccctgcatggtagtcaggatatcattaggactaatccctgccttcttacaagcggccgcatcaatatccaacatatattgagggaaattcgggttaaaggtagtctgggccgaatttatttcgggacgtgccttcaacgcatccatataattcaaaatcacatcataaaaatgattcaagtcaccaccggtcttatcctgcatattcaactcaatatcgctggatgccgaataacccggaatcataggaggagcaaagaacaacacctgtgcatctttgatgattttctgcgcacgcataaacaaagtacccaccacaacatccgaattctgcatcatggaacgttcttcccagtctttcagtttaataatgatagaaccgtatgaaggaccctgaccaccaataaagccgaaaccggaaatcaccgtacgagaatctacagccggttcggcagccaccaagctgtctacacggtttaagatttccattgcacgttcctgtgaagtaccgggaggcagtgtcaccgcacccataatggtaccggtatcttcattgggcaccatgcctgtcggagtaaccttcataaagaataccaacagaatgatagaagcggcaaccaacccgaatgacaaccatttcttatggataaagaacactacatgcttcttgtacttcttcaatatagaatcataagccgcattgaaagctgtatgaaaacgttctacacgagtcattttcttcgctccgtgtccttcatcatgcggcttcaggaagatggcacacaatgccggtgacagagtcagcgcattcaaggccgagaaaccgatagcaatagccatggtaataccgaactggcgatagaatgtaccggccgtacctcccatgaaacttaccggaataaacacagacatcatgaccaatgtaatagaaacgatggcaccgcccagctcgctcatggcatcgatagaagcctcacgggaagatttatatccctgatccaacttagcatgaacaccctcgacgacgactatggcatcgtctactacaatcgcaatagcaagcaccatcgccgaaagtgtcaacaggttcacactgaagccaatcagtttcaatacaaagaaagtagccaccaacgccaccggaatggcaatggccggaatcaatgtagagcgcatatcctgcaagaagatatacaccacgataaacaccagaacaaacgcttcaatcaaggttttgattacttcatgaatagaggcaaacaaaaagtcattagcattttgggctatattgatgtttaaacctgtcggcaatgactcctgtgcctttgcaagcacctcttccaaattggagattgtttcggtagcattggtacccgccatctgataaacgatacaagacaccgccttgtgaccgtttaccatattattgaaagtataagccaaacgtcccaattcaatatctgccacatcacccaaacgaagcacatttccatccggcaatgccttgatgacaatatcttcaaattcagttgtttgctgcaaacgtcctttataacggatcgtgtattggaaagtctgattaccacgttcaccaaactgtcccggagccgcctcaatattctgttcggccaaagctgccgacacatcggtaggaatcagtttgtattgcgccatcacatccggtttcaaccagatacgcatagaataatcctgtcccaagacattggcatcacccacacccttcacacgcttgatttcaggaatcaagttaatattagcatagttttcaataaactcaatattatacgaatcggtttcatcatacaatgaaaacaccatcaacattgaattttggcgtttctgagtagttacacccaccttggttacttcagcaggcagcaatccttgtgccatagaaacacgattctgtacattgacagccgccatatccggatctgttccctgattaaagtaaacattaatatcagcagcaccgttattagacgctgtagactgaatatacatcatattctccacaccgtttatctgatcctccaacggagcgataaccgaattcaatacagctgtagaattcgcaccggtataagtggcgcgtacctgcaccgtaggaggtgcaatatccggatattgcgtaatcggcaatgtagcaagtccgattacacccaaaataactatcaagacagagattactgttgatagtaccggacggttaataaatctatctagtttcattctctatataccttatttatataagtgaaattaatcttttaagttatagtgattattcaaaggccgtagcaatattaccttccttttgatctttcagatgctgttggtatttagcctctttctgttccggagtaatcggagttatcgtctgtccgtccttcagagtctgtacaccttcaactacaattttatcaccgggtttcaagccaccggtaacaatataattcttgccatcattcaaattcgacacctgaatttcagtatgtttcaacgtattatccgactggagtacataaacaaattttttgtcctgaatttcttgtgtggccgactgaggaatcagaataatatcttccatagtataagggaaaattacattagccataccgccactgcgcaacacagactgcttattggggaaaatagcacgcatacttacagaaccggtagactgatcaataacaccactgacagcatcaattctaccctcttccgcatatactgttccatcagccagttccaatttcacggccggcattttttccaactggtctttcaatgtaccgcctgccttagtcatggcaagcaattgtttttcagtcatcgaaaaatagacatacatatcaccgatttcgcttacagtagtaagaggctgagccaccgatggacttaccaaacttcctacacgataagggaatgttccgactacaccattagaaggacttgtcacagtacaaaaatccaaattctgtgtggcacttgtcaattgcgcctgtgcctgtgccaaactagctttagcagagagcaactgatctactgcactttgatattcaaaatcactgatgatattcttatcatgcagatttttcttttgttgttcattcaatgtcaaggtattaacattcgacttagccatctccacagccgcacttgcctggcgtttggcagccgcatactgtgtagggtctatttgaaacaaagcctcgcctttgcgaactgtagcaccctcatctacacacagtttcacaataaagcccgacacctgcggacgtacctcgatatcctgaatacccttgatagtggccggatatgaagtggattgctggctggccgtagagtgtaccgccattacggtaaattcgtcatcacccaatttcataccactctgaccgcctccgcaactgcttaacacggtcattgccgccataataatcgctgtgcggcttaatgaaatgcatttcattttgtttactgtcatcttcataactaatattattgaactttacttatttagcaaaagaagttggacttatcagaaaactttctagcccaattaagtttttaatggcgcaaaattagttattttttcgccatttatatccttattcagtgagctttaactataaataactcgtagctaaaaagtgtttggaaaggtttaaataagcagtaggtataatccgtcataccgatacacaaagacagggaaattatccggaattttatatctttactaccacaataaaataagcctgtgtcaaatatcgcatttaaaatttcaacaattcgacatcattttacagcacaagagcgtcattttataattttatttgtatttttgccaccaatttaaaacaataacactaataaataagaaaatattatggttaagattaccaaagaggctgccctactctatcactcacaaggtaagcccggaaaaattgaagtagtacccaccaagccgtacagcacacaaacggacctgtcactagcttactcccccggagtagccgaaccttgtctggaaattgaaaaagacccgaaaaccgcatacgactatacagcgaaaggcaacttagtagctgttatctccaatggtactgctgtcctcggactaggtgacatcggtgccctcagtggcaaaccggtcatggaaggtaaaggactgttattcaaaatttatgcaggcattgatgtgttcgacatcgaagtcaatgaaaaggaccctgaaaagttcattcaagctgtaaaagctattgctcccactttcggaggtatcaatctagaggatattaaggctcccgaatgttttgaaatagaagaccgtctgaaagcagaactagacattccagttatgcacgatgaccagcacggaacagcaatcatctcttctgccggactgctgaatgctctcgaagtggcaggtaagaaaatagagaatgtaaaaattgtagtaaacggtgccggagcttccgccacttcttgcaccaaactatatgtagcactgggggcacgtaaagagaatatcctgatgcttgacagcaaaggcgttatcactagcgaccgccccaacctgaccgaaagcaaaaaattctttgccaccgaccgccgcgacgtgcacacactggaagaagccatcaagggcgcagacgtattccttggcttatccaaaggaaacgttctcacacaagacatggtgcgcagtatggccgatcatccgatcgtattcgcccttgccaaccctactcccgaaatttcctacgaagatgctatggcatcacgcccggatgtcttgatgtctaccggacgttcggattatcccaaccaaattaataatgtaatcggtttcccctacatattccgcggagcactcgacacacaggcaaaagctatcaacgaagaaatgaaactagctgccgtccgtgctattgccaatctggcaaaacaacccgtacctgatgtggtaaacgaagcttatcacgtaaataacttcaccttcggtcccgattatttcattccgaaaccggtagatccccgcttgataaccgaagtctcaatggctgttgccaaagctgctatggattcaggtgttgcccgcaaaaacattacagattgggaagcttacaaaacccgtctgcgcgagcttatgggacaggaaagcaaacttacccgccaactgtatgaaacagcgcgccgtgccccacaacgggttgtctttgcagaaggcatccatcctaccatgctgaaagctgccgtcgaagccaaagcagaaggcatctgccatccgattttgttgggtaacgatgaacgcatcgagaaactggcaaaagagcttgatttgagtttggaaggcatcgaaataatcaatcttcgccatgatcgcgaagcagaacgccgcgaacgctatgcacgcattctttcagaaaagcgtgctcgtcaaggggctaatcttcaggagtcaaatgacaaaatgtttgagcgcaactatttcggcatgatgatggtagaaacaggagaagccgatgcgtttatcaccggtttgtacaccaagtattccaataccatcaaagtagcgaaagaagtaattggtatccagccggaatacaagcacttcggcaccatgcatatcctaaattcaaaaaaaggcacttactttgtggccgacacactgattaaccgccacccggacacagatacactgattgatattgctaaattatcaaagaaaactgtggaattcttcaatcataccccggcaatggccatgctgtcttactccaacttcggttcggacacagaaggcagccctgccaaggtgcacgaagcagtggactatatgcagaaggaataccccgaactcgctatcgacggtgaaatgcaggtaaacttcgccctgaacacgacacttcgcgacgagaaatatccatttacacgcctgaaaggtaaagaagtaaatacattgatattccccaacctaagctctgccaatgccacttatcaactgattcagtctatgagcagcgaaacagaagtgcttggtccaatccaaatgggactgaacaaacccatccacttcaccgactgtgaagcatcggtacgcgatatcgtgaacatcaccgctgtagcagttatcgacgccatcgtagaaaagaagaaaaaggcaaataaataataacctgtttcagaaaagggacaaaagaacaaattttctcagtagcgcaatctgcatatacttaatatttgttcttttgttctccaacctgataaaatctgtcactaaaaacacctgtatattaccatgagccgaaaaccactatccctcccccaaatcgtaatccttgcccttctatggataacaatctgctatatcatcctcaccggaagcgaacaaatagacggaccactaatcttatccattatcatttcgggcactttagtctttattcctttactaaagtttttaaagaatagggagaaataatcttttattcatgtttttgcttacattttgcacaatctgatatttttaatcgcattttatttatattttgttgcacaatccaattcttatctatatttttgcatcatcaataaagcaataaaaactaattagtaaccataaaagaaatagattatgaatgcagctaaggtattagatgaattaaaaagaagattccctaatgagcctgaatatcatcaggcagtagaagaagtgctcggtacaattgaagaagaatacaacaaacaccctgaatttgataaggtaaacttgattgagcgcctttgcattcccgaccgtgtatatcagttccgtgttacttggatggatgataaaggcaacatccgaaccaacatgggctaccgcgtacagcacaacaacactatcggtccctataaaggcggtattcgtttccactcttctgtaaacttgggaatcctaaaattccttgcctttgagcagacattcaaaaactcactgactaccctgcctatgggtggcggtaaaggtggttcagacttctctccacgcggtaaatccaacgcagaagtaatgcgtttctgccaagctttcatgctggagctatggcgtcatatcggtcccgaaaccgatgtaccggccggtgatatcggtgtaggcggacgcgaagtaggttttatgttcggtatgtataagaagttgtctcacgaattcaccggaacatttaccggcaaaggacgcgagttcggtggttcactgattcgcccggaagcaacgggttacggtaacatctatttcctgatggaaatgctgaaaaccaaaggaaccgacctaaaaggcaaaacttgtctggtatcgggttcgggtaacgtagctcaatataccgtagaaaaagtaattgagctaggcggtaaagtagtcactatgtcagactctgacggttacatctacgacccggacggtatcgaccgtgaaaagttggacttcatcatggaactgaagaacttatatcgtggacgtatccgcgaatatgcagaaaaatatggttgtaaatatgtagcaggtgcccgtccgtggggtgagaaagcagacatcgcgctgccttctgccactcagaacgaactgaacggtgacgaagcacgccagctagtcgccaacggtgttatggctgtcagcgaaggtgcaaatatgccttctactcccgaagctatccgtgtatttcaagaagccaaaattctgtatgccccgggtaaagctgccaatgcaggcggtgtatcggtatccggtctcgaaatgactcaaaactctattaagctaggttggagttcggaagaagttgacgaaaagctgaaaagcattatgaagaatatccatacagcttgtgtacaatacggtacggaagaagacggatatgtaaactatgtaaaaggtgcaaacattgccggtttcatgaaggtagcaaaagcaatgatggctcaaggcatcgtctaataaagctcatgcctttatattagtcataacatacagagagggtgcaggaatttatttcttgcacctttttttgcttctataccataaaaaagaaaaacgaccaattcattttattgcaataatcagaaaaatttcaggaaaagccttaactttgtaaactatatatatgtttattatcaaagaacttataaaattaccaattcatgagattgaaagacttactaacctgtaccataggcatattcctttgtacatcgtgcatcaaggacgaagcacctaatgcggaagcagatatcgaaaaatgtatattgcccgccgatattctttcaggaacggaaatcgactacaacttaccattcgatgaaagcctaaatgcctatcccatttacatagaagtaaacaatggaactgacctgaccgcacaggcaccaacttttgaactgactccgggagcaactattaatccggccagtggaacgacgcacaactttacaaaaccagtgcgctataccaccacttcggaagacggaaaatggcatcgtacttatgccatcagtcttcattatccgtcaacaacaaatatcccgacttctttccattttgagacagtaaaaaaagtaagtaactattatgttttctacgaagaggcgcccggacatgccaccctgacctgggccagtggaaaccaaggattcgcactgacaggaggaggtaactctcccgaggagtacccaactaccatcagctcagaaggacgttccggcaattgtctgaagctggtgactcatactaccggagacttaggtaataaagtagggaaacctattgcagcaggtaatttatttatagggaaatttgaactactcaacgcattaggagatgctttggcagcaaccaagttcgggacaacattttactatcaacctaccaaactgaccggctattacaagtataaagcaggacctaaattttacgaaaacggggaatataccgaccgtaaagatgtgttcaatatatatgctttattttatgaaaaagatgataaagtacaaaccttagacggacatattgcaacaaacaattacgaacaccccaatatggtggctttggcaataatagaccaagcagatgccgtggaaactgaagaatggaaacgttttgaattgcctttcgactacgaacgctttggcaaaaccatcgacttggaaaaactggccaaaggacaatacaacataagtattatcctgtccgccagcaaaaacggagacgaattcaaaggtgcccccggcagcacattacttattgacgatttggaaatagagtacaaataacttaaaagattctcgatatgaaaaaatatatattgcttttggctatcacattggtaagtgtccacacatgggctcaagaaaacaggacaaagaccttgataaacgctgcattgcacggttgggagtatgaattgaaagccggcttcaacattggcggaacattacctttgccttttcccgaagaaatacgcaacatcaaaagctataaccctaccctttcgattaccatcgaaggtaatatgactaaatggttgggagaacaaaagcgttggggggtagttaccggacttcgtctggagaataaaggtatgcgtacaaaagcagaagtaaagaactatggtatggaaattatcggtgaagatggcaatcgtttaaaaggcaactggacgggaggcgtacgcaccaaggtacaaaactcatacctcaccattcctattctggctgcttataaattgaaccagcgtgtaaatctgaaagccggtgcttatttttcttatctgatggacggtgattttagcggacacgtatatgaaggttatctgcgtaaagatgatccgacaggagaaaaagtaaactttaataacggagcaattgcttcttatgatttctcttccgatttacgcaattttcaatggggagcacaattaggagtagactggaaagcattcaagcatttaaaagtatatgctgacctgaattggggaatgaatgatatctttaacaaggacttcaaaacaatcactttcgatatgtatgcagtctatttaaacgtaggcttcggatatgcattctaagcttcatttctaaaagactttcttctttttcccaaagattcatcatagcacaaaaaaggcatcccgaaaataggatgccttcttttatattattatattcttcagaaagaacaattattgttttcttccttcaaaatcaacaacgactttcattgtagcaactgcaatatccaaatcaagctctttaccatcagcatcacctgtaataactacagccaattctcccattccaagagcactcatatcaatcgtagtttgaccatttaacttcaattcgtttgtcgaaggaaccacatcgcatgtcgcatcaattgtcataggaacaggcaatacgccgggaatagtaaagttggataaagaaaccttcactttactatcgtccactctagttacaacaatagatgcagcaacatctttagctacttccgttcctgcaagcgttacatccaagtcaccgggataagtacctacaatattatcaacagtcaaaattttgttatcatcatcgtcatcactacaagctgtaaacagacataccgtacatatcacagcaaacaaataataaaaaacactctttttcattgttacatcgttttaaattaacacttaggtttataataattttcaatcagctttggctttccctttcttgtagtggattattttacctgagttaagtccaaacctatctccaattgagtcgtgtttttgatgatttcaggcaataacttcaaagtgggaaccatcattcctgccatgccaccaaactgaggatcgcttttcatcgcttcaataaccatattaaggaactcttcatcctcaaacaacggagctacaatattcttcattaacggcaataataggtcggtacctaagaataccttcattctgttaccttcttttgtataagttaaaggtacaccgttaatcaacataggatataattcagctattgcttgttgcaagatagcacctacatctaccgttctgacagatttctcaacattatcaacattcgccataatagcctgcggattgaggaacaagagcaattgattgtcaccggtcactacatattgagccatattagaaggagatgtaacccattcagtaccgccattagcagcatccatataagtggcaacaatattaccatctgcccctaatgtcacatcttttaaaacagaacacaacatttgttccacactgactctgtctccacttccatcgtcaaataaaggaaagcgcaacgccaagagcagtaaatcgtttatctctacttctgaaggatgaccggataatatttcaatagcagccttcgtgccggatttccaaacaaaatgaatcggttcgtccatcccgccgtcttcagtatttgccaatggagtaggcttccaaacagtaccggccaaagctgtatttttcaaagtaacatcagtaaaggacaaatccattgtgcctgcagttactttacctgcataagaaaatgtgcaatactctgtctctgaaacaccggaaaaagtacattgatttccgttgatagacaagtcgacagacaaagtagtcacaggactacccggaaatacaccgggaccggtcggagaagtcatgttcgagcgttgtcctttcaagatgccggacaagtcaaactctccttctaaacgtaaagtagctttagtcgcttcggttgcatcaggggtgaaagttacttttttacccaacagaggcgcaccgttataagtaagttgcaaaccattctcactgttaaaagttgtctgtggaatagggtttaccaccttttcgtcatcatcgctacaagaggtaaataatcctattgtgcatatcacagcaaacaaataataaaagagattctttttcattttctagttaattaaatttatactcaaaaatcgtgcaaatatactaaaaagttaaacgtccgaccacctttttcgatatttagaacatattttgtgttatttggaacactattcaggcaacatcaccactccctgtttcttctttccgtccatcttcactatcaaagggttatcaaaacggacatgcctgataaactgagtttcctccaccgccggttgtgcgttgagtatgtcctgattatatacaccatcattcatatacgaattaattgtgaaataacccactccaaaagaagtcagattctggaaaaaatgagttccctggctcggatctacacgataattggtcaaaccggcttccactataatacgggcagccgaaatatgaggccacttcacaggaatccccaaccaagaatcactgcttccccaacgccccggtcctaccaatatataatgtttgccttcatccagaaatttgcggttcattttctctatttcatacgcaatggtaggattgtttgaagctgtataaccttctgtttttacatagattatatcatgaatatcctccataatgccatgtcccaatgaattattactccttaataaaacattctcatccttaataaggttcaagtcttcatccaaaacagccttgatatctaccatcggacgaatttgtaacagataaaatacacctgtcttcttctgtgcattcagcgttacggcaaactctatctcgacaggacgacgcatctcactctgcccatattcttgagccaattgcaatatgcgaggcaatggaaagacatcgtgctgcaatacgttggcaaaagtaatcagttttctgcctcccggataaataccgtcacgaatcaccatatcgtatggatcgtaagtagacgcaataaagttcaacgctccgtcattatcggcttctttcaccgggagtttcaataaattaaagccatcatccaaagagaaattatgacctgtattcttcaaatcgagtgcgtagaaccgggtttgggtttcgcgaagcgctatctccatctcactggtttgcaacacctgattcggatgatacgggcagatacgcaaagtcagtcctccatctacaatgtatttgcccaagcctaatgccagacttaccgtaccttcttccgccgtctcgttgccaatcggataataattgagcgaacgtgcaaccccggagatggaaggatagaaacggtcgccatattgtgttcctaccacttcctgcaaaattacagccatcttttcctgatcgatgacattgctggtagcctgcatataggctttgctgtctctataataaaccgaggcataaacacctttaatggcatcgctcaacatacgcagcatctcatacttatcttccaaatagggaatcatataggtagagtaaatacctgcaaaaggttgataatgggaatcttccaacaaactggaagaacggatggctatcggagacttcaccacatcaaagaatgcaaaaaagtcctccaccaaacggtcgggcagcttggcacgaagaaaagctttcaatatcgtatcgtcatccgcatcactcaaagccacctgatacagtccgttggtatccatgaattcgtcaaaaatatcggtacagagcactaccgttttaggtattacgacagtagcattttcaaattcatcgaattcgatatgacgctttaccatattgtctataaaagcaagtccgcgtcctttcccccccaaagacccttcaccgatacgggcaaaattggaataacggtcaaagcggtcacgctgaaataccgccaccacgccttgattcttcatcttacgatacttcacaatcgcttcgaaaattatccggcgatgcgcatctatgtcctgcaaagacttccaagtaatctgtttcaggaactcggcaggcggaaacatggcacgggagtagagccaacgagagacgtggttgcggctgatgtgataaagcaaagattccttcggaatggaaaagatgatattctgtaactctttcaagttgcggacacgcgccacttcttcaaaagtatcgggattacggaaaataaaatccccaaagccaaaatgctcggaaatgatttcacgcaagtctatattcatttttttggagttcttatccacaaaacttgcatcgtatctgccggcatataccttattatcaacttccgatgattggagaattaaagggatgaacgggtcacgggaacgaatttcggcaagtaactttatacctgccatcgggtctactaccccaccgcggggatagcgtgcatcggtaatgattcccaatacattcttctcatatttgttatataagtccattgcctcttcgtatgtacgtgtcagaacaattttgggacgtcccctcatacgaagtgtacgctggtgggcattcaatgcttcagtggcaaattcctgactttgtttcaaaacaaacttatataaattaggtaacacggaagaataaaaacggatagagtcttccaccagcataatcatctgtaccccgacctcttttacatcatgctccaaattcatcttgtcttctatcaatttaatgatagacaccagcaaatcagtgtttcccaaccaacaaaacacatactcaaaaatactcaagtcttcgtgttccatacgtgctgtaatgccatgagaaaacggagtcagcaccaccaacggaatatgggaatacttgtttttaatgctgcgggcaatctcaaacgtatcactgttatcagtacccggcatacagatgacaagatcgaatgtagtattcgccaattgcttccaagtctcctcttcggtagatacctgtgtaaaacgaggaggataacgaaggctgaggttcatgtattcattaaatatcttttcatcgattcgtccgtcatcttccaacataaaagcatcatacggattagcaaccaaaaggacattgaatattcgtttagtcataaggtttacgaacgaagtatccttgaaatacaattgatttaattttaacttgctgagcataattcttagatttacacagataatgtaatagcaaaatacgttaataatattgtcttatgcaacttatttgcaagaaaaaagaacttttggaaataaaggaggaaagccccctattaactttttattatagtaaccctaatttttccgcaaaaatattttgccaagtcggataaaaacatacctttgcatcagaaatgaatttcattttgtcaaaaccttaaatgcaaactattatggatatcaatcaaatcatggcttctcttgaagctaaacaccctggtgaatcagagtacttgcaggcagttaaagaggtgctgctttctattcaagacatatacaatcaacacccggaatttgaaaaggcatcacttatcgaaagattggtggaaccggaccgtatctttacatttaaggtgccttgggtggatgataaaggcaaggtacaggtaaacttaggctaccgcgtacagttcaacaatgccatcggtccgtacaaaggcggcattcgtttccatgcatcggtcaatctctccatcctgaaattcttgggattcgaacaaacatttaaaaacgcattgacaacattgcccatgggcggaggtaaaggcggttccgacttctcacctcgtggtaagagtgatgccgaaatcatgcgcttctgccaggcattcatgcttgaattatggcgtcatgtaggtcccgatatggatgtaccggccggagatatcggtgtaggcggtcgtgaagtcggctacatgtttggtatgtacaaaaagctcacccgcgaatttacaggtacatttaccggcaaaggtttggaattcggcggttcattaatccgtcccgaagcaaccggattcggcggcttatattttgtaaaccaaatgcttaagaataaaggtattgacattaaaggtaaaaccgtagctgtttccggtttcggtaacgtggcatggggtgctgtaaccaaggcaaccgaattaggagccaaagtggtgactatctccggtccggacggatatgtttatgacccggacggtatcagtggtgataaaatagactatatgctggaattgcgtgcgtcaggcaatgacatcgtagctccttatgcagaaaaatatccgaatgccaaattcgttgcaggacgtcgtccatgggaagtaaaagtagatattgcactgccttgtgcaactcaaaatgaattaaatggcgaagatgcttgcaatttaataaaaaattccgttctttgcattggagaaatatcaaacatgggttgtactcccgaagctattgacgcatttatcgaaaacaagatgctttatgcaccgggtaaggcagtcaatgcaggcggcgtagcaacatcaggtttggaaatgagtcaaaatgcaatgcacatgagttggagcgcaaaagaagtggatgataaattgcatcagattatgtatggcatccatgaacaatgcgtgaagtacggaacagaacccgacggatacatcaactatgtgaaaggagcaaacattgcaggctttatgaaagtagctcacgcaatgatggctcaaggaattgtataaagcattctattagcataaaaaaatatctcgtttagttgtatttgtattttgtattgtagcttgcgctgcccgcctgtgaaggtatggcagcgttttttattgaaaattccaaagtttatttataaatttgtaccaatttgaaaagctcataaattgatattctatgaaagtaatacaactgaaaggtctggacactgatttatacccattaatcggtccgttagtgatgaatccgaaagtactgaaggctaataacaattatccattcaagactacggcaaatcatcaatggtatattgcagtaaacgatcaagaagaagtaatgggctttctgcctgtggaaaacaaaaaaagcacttctgttattaataactactatcttaaagaagacgacggagaattactgaaactccttttttgccaaattgatataaaaaaagatataactgcgattgtattatccaagcacttggacatattcaagaaattggggtttgagccggaacaccaatggaccaattatattaaaatgatatataccaaccacgacaaaaaatgaagaaaaagggaaccaataccgaaaatgtttacgaactgatacaaaagcgacttaaatttatttttgacgaatttgataatatttatgtctccttttcgggaggcaaggatagcggggtcttactcaacctatgcattgattatatccgtaaacataatctgaatagaaaaataggcgtcttccacatggactatgaggcacaatacaaaatgacgacggattatgtggaagaaacattcaggcagaatttggatattctggaaatctatcatgtatgcgtaccattcaaagtcgttacctgtgcatccatgtaccaacagttctggcgtccctgggatgaagagatgcatgccaactgggtgcgtccgatgccgaagaattgctataagaaggaagacttccctttttataacgacgaaatgtgggattacaattttcaagtggaattcggaagatggtatcataaaaaaaaggatgccgtacgcactgcctgcctcgtaggtatccgaacacaggaaagcctcgaccgctggaggactatttacagcaacaatcgcctgttcacatatcataatttaaaatggtcacgcagaataggatacgacctcttcaacctttaccccatttatgattggcgtaccgaagatatatgggtggcttatgcacgcttcaaatggcccttcaatcagctctatgaactatattataaggcaggagtccccttggacaagcaacgcgttgccagcccttttttaagtacagcacaggaaaccctgaaactttacaaagccatcgaccccaatacatggggaagaatgttgggccgggtaaatggcgtaaacttcaccggcatctacggaggaacccgtgccatgggctggcaaagcataaaactccccaaaggctatacatggagagagtatatgtattttctactggaaacactccccgaagatatgaaaaacgcctatcttgaaaagctaagggtaagcagagaattctggaaatatcggggaggatgcctcagcttggaaaccatacgcaaattaaatgagttaggcatcaatatgcatgtacagaaaacaaccaactataagacagataaactgcctgtacaaatggattatctggacgacatagatatacccgaattcaaggaaattccaacttacaaacgtatgtgtatatgtatcctgaagaatgaccatgtttgcaaatacatgggatttgccctgaccaaaaaggaaaagctgagaagagataaagtaatgcaaaaatacaaaaatatcatgagatgaaaaaagaatacgagagtcctgtatatcatgtacgccgtgtaccggtagagaaagtacgtgccaacagttataaccccaaccatgtagcgccccccgaaatgaagctgctcgagcttagtatttgggaagacggatacaccatgccttgtgtttgttattatatcccggatgaagatgtttacgaactcgtagacggctatcaccgttactgcgttctcaggacttccaaacgggtattcgaacgcgaaaaaggattattgccggtggtggttattgagaaagacttatctaaccgaatggcaagtaccattcgccataaccgtgcccgcggcactcatagcgtcgaactgatggtcgacattgtggcagaactcactaaagccggaatgagcgacgaatggattaagaaatatatcggaatggatgccgacgaactattacgtctgaaacagatatcaggactgatggaactgtttgccgacaaggagttttctatcccggaggaagcatgacaacaatcagcctaaacaaacgaacaaattgaaatacactcatttactattggggttatcggcatcagtcttctgcgcctgttccgataaccttactgattttatccaaagcgatagaagcataatcacaggcaactgctgccggtttatcaataatccgacaaacaccacttcattgccttcaggcagccgggcagtgctgaatgccaccggaagtctgcaattagagaaccaaattttcacctattcgggagatgtgtgggaaagcgacttacccatcgcatggactgatttatcggggacgaccgatattgttgccttataccccacttataaggacaatctgtatgatgacctgtacccggaaggacgattggaagacgtgctctacataaaagacagattcgaggccggacggggaatcggttttcaatttaagcatctcttttcccgcctcacctttcacatcagtgaagaattacaaggagaaataaaagaaatcagactgacaactcctgtcattgtcgacaagattattcctgccacggcagacctgaaacttgatgcagaacaaagccatacgaccatcacccccggagatgcttccgaaagctattcatttatcattcctccgagcgagaatatcggtttgaaggtcgagattatcaccaatcatgcgagctttgtcaaagaattgaacccacaagatttcttaagcaattacgaatatacatgcaatatcaagattcttgatgaacaatcgaatattggcatttcctctgctgaagatttgattgcattcagtttattaatcaataataaagaatacaatggtaaatcgctgagcgacttcggcatcaccaaagacggcgttaccacttataggcttctgaatgatattgaattgacggacgaggattgtaaacggatgaagcctataggaatggacggtaaaacattagaatataaagacatctttgacggacaaggattcagcatctgcaatctcactcttcccaataccagttcgggaaaaagcggactcttcggtcatacatcagaaaatgctatgattaaaaatctttgcataaagggagcaaagcccaatgctcaaagaaagtcggacgccggaatactggtaggttacaataaaggccatatcataaattgttcaattcagaaatcgacggtaaaatccaatgcccgttccggtggtatagcggctttttcaaccggaaccattgtaaactgttctgttgtgtcttgtcacctggaatcgcaaagtgccggaggagcagcaggagaagcaagcgggaaaataataaatagtttctttgttaatgacactataaaaaacaatactaccggagccagtgccggtggaatatatggtaaagggaatgcaaattctttaacagtcatcaactgttatgtggattgttcttcaaatcaaagttcatttggcataatcaccggagaagccaattccagcagaaccgaacattgcttttacaaatattacagtggaaaaaaaaccggactcaaggaaagtcaaatgacaaatacctacagttatgatgcaaacttcatcggctcgaacggcaaatccgttttatcttccctcaatgaatgggtggacacaaactccctcctctaccccgaatacgaactcaaacattggacaagcggaaacaatgagattcccgccatcttcatcggcatcaaataaaagcaatatccatatatacctgtctcacaacaaaggaaagaataagccttttcctacggacggctaagtctttttgaacggcagattattacgtcctgcggcagtgaaacgtacgtcctgctacagtggaacgtacgtcccattacagtgggatatacgtcctgcggcagcagaacgtaataaccggacgcagaaaaaggcttaatccaaggtaagcaaacgcttaccctgtccgaagaaacaacctagaaaaaatgcaaggaaatgacaaaggaaagcaaccaaggagacagggatataaaaaaagagactgtccgttttgccagacagtcccttttactaatatatattgtttggattaaagagcacctacttcgtgcaaagcagcgttagtcttacgaacagcagcagcacttgcagcaaatttagctttttcttcttcgttcaaaggcaattcaacgatcttttcaataccattcttgcccaagattacaggaacgccacagcaaatgtctgattcaccgtattcgccttccaaataaaccgaacaaggaaccatcttaccctgattgtggatgatagattcaaccacgaatgcaccggctgcacccggagcgtaccatgcagaagtacccagcaacttagtcagagtagcaccacctaccatagtagcggcagcaacttcctgcaatttttcttcagacaagaagttagaaacaggcatacctttgtaagtagcgaagcgagtcaaaggaatcatagtagtatcaccatgaccaccgattaccataccttccacttcgtttgcattgcaacccaaagcctgagacaagaaatatttgaaacgtgagctatccaaagcaccacccataccgatgattctgttcttcggcaagcccaaagctttcaatgacaaataagtcatagtatccatcgggttagaaataacaacgatgatagcgtcaggagaatatttcagaatgttctgagctacagatttaacgatacctgcattaacaccaatcagttcttcacgagtcatacccggcttacgaggaatacctgaagtgataacaacaacatcagagtttgctgttttttcataatcgttagtgcaaccaacaatgtttgtgtcgaagcccaacaactgagctgtctgcatcatatccattgctttaccttccgatacaccttctttaacgtccagcattactacttcgtctgccacttcgttaaaagcaagaacatttgcacatgtagcacctacgttacctgcgcctactacggttacttttgacataatctctattttatttaaagttgataataaaatcgtgttcttaaaagcactgcaaagttacaatgatattccgaattagggaaaaatttccataattattttcgggcagtatgcacaaaatattgtacttttgcccaaaattcaatgtaacactatggataagagcaaaaaactgattattgtcattattctgctgattattatcatcggcggagtttctttctatgctttccatcaggcaaaggagaataaagaaatgagcgaactctttgctgtcgaaaagttggaaatggagaatgagtacaccacttttgcaacgcaatatgatgagcttcaggtgcaaatcaacaatgactccctgcgcgaaagactggaaagtgagaaattgaagactcaacgactgctggaagagttgcgccaggtaaaaacaagcaatgccgccgaaatcatgcgactgaaaaaggagctgaagactgtccgcgccgtattgcgcacctatgtcatccaaatcgattcactgaacaagctcaatcaggctttggcagaagaaaaccaggaagtaaaacagaaatatacgcaggcaacccgccaaatcagcaatctgtctcaggagaaaaagaacctgaacgaaaaggtgacgttagcatcgcaactggatgcaaccgccatcactgtacttcccaaaaacaagcggggaaaaacagccaagaaggtgaaagatgtaaagaagatagctgtttccttcactatcgtcaaaaacatcactgccaaaacaggcgaacgcaccttatatatacgcatagccaaaccggacaacgatgtgttgaccaaaaatgcatccaacacattcccatacgagaaccgcgaactgacttattctatcaagaaatatatagagtatacaggagaggaacaaaacgtgactgtttactgggatgtggaagaataccttccggcaggcacttaccatgtgtatatctttgccgaaggaaccatgatagggcaacaggcattcagcatgaaataaattcctttattgtattataaaaagggagtgtgtcaaaacgtggataatgctgtcgtttagtttgtaggggcgaggctcgctcgcccgaaaacagtttgctttgtgtcttcgggcaggcaaaccctgcccctacagctgacgatgggatagaccggtttagttttgacacactcctttttttatatctttttattcggctgatattgcctattcacattttagtcgtatctttgcatcgttgcataagcaactttaaacacattagcaacaacactaagatgaagagaattttcggttttgtcctgtctatatgggtatcagtaggggtttcagcccaacacacactgacattggatagttgtcgtgctatggcactaaagagcaacaaagagctacgcatatccgccgagaaaataaatgtggcgcattatgaaaagaaagctgcttttacgaactacctgcctaagattgccgctatgggaacgtatatgcgcacccaaaaagaaatctccttattaagcaatgaccagaaaggagctatcggcaacataggaaccgccgcacaagggtctatccaagaaactttccaacaactggccgcttccagccccgaactgggcgccctgctccagccgctggctccgctcatccccggcatagggaacaaactgaatggcatagggcaagggctggtcgatgcgttgcacaccgatacccgcaatatgtatgcaggtgccgtcactctcacccaacccatctttatgggaggcaaaattgcagcctacaacaagataacccgatatgccgaacaactggcccaatcacaacatgccaccggcatgcaggacatcattctcggtaccgaccaagcctattggcaggtcatctcattggtaaacaagaaaaagctggcggaaagttatctccgactggtacagcaattggacagcgatatagacaaaatgatagccgaaggagtggctaccaaagccgatggtctcagcgtaaaggtgaaagtaaatgaagccgaaatgaaactgacgcaagtggaagacggactgagcctttctaaaatggtattgtgccagctttgcggcattcccttgaatgaggacatccgattggcggacgaagaggtagagaacctcctggttgccgatgaagcacaggcctccgacaatgttgccactgcccttgccaatcgcgaagaactgcgaagcctcgacctggctgccaaaatatatgcacagaaagtcaatgtcacccgtgccgagttcttgcccactgtagccctgacagccaattatatggtgactaatccttcattggtcaacggatttgagaacaaattccgcggtatgtgggccgtaggagcaatggtgaaaatacccatttggaattggggcgaaggaatgtataaggtaaaagccgccaaagccgaagccaatattgcccgctatcagttgtcggacgtaaaagaaaaggtggagctgcaagtcaatcaggccaccttcaaagtaaatgaagccggaaagaaactggcaatggctaccaagaacatggaaaaggcggaagaaaacctccgttatgccaagctgggattcagtgaaggagttatccccaccagcaacgtactggaagcacaaacagcatggttgtcggctcaatcggacaaaatagatgcacagatagacgtgaaactgactcaagtatatctacgcaaatcaatgggaacattaaaataagaacaagatatggcagaaagaacacaacgcagcaacattttgctggcattcatttcactgacggcagtcattgcagtcgtgtctctgataggtttcttcacattgggcaaaggtcccgaaattattcagggacaagctgaagcagacgaataccgtgtgtccggaaaagtcccggcacgcattcttgaactccgtgtaaaagaaggagataaggtaaaagccggcgataccctggttatcctcgaagctcccgatgtgatggcaaagctgtcgcaggcacaagctgccgaacaagcagcccgggcaatcagcgagaaggcacagcgagggactcgccgggaacagttgcaagctgctttcgaaatgtggcagaaagccaaagccggagtagaaattgccgagaagtcatacaaccgtgtgaaccgactctttgagcaaggcgtgatgtccgcacaaaagcgcgatgaagccaaagcacaatttgacgcaatggcagccaccgaaaaagctgcccgttcacagtacgaaatggctaagaatggcgcccggcaggaagacaaagcagctgccgccgcacaagtggaacgtgccaaaggagcagttgccgaggtgtcttcctacatggatgagaccatcctcacagctgctgccgacggtgaagtgaccgaaatattccccaaagtgggcgagctggtcggcaccggtgctccgattatgaatatcgcccgactggatgatatgtgggtgactttcaatgtgcgcgaagatttcttgaaagacttcactgtgggagaagaaatcaacgcctttattccggcattcgataaagaagtgaaattcaaagtgacttacatgaaagaccttggcacatacgccgcttggaaggcaacgaaaacaaccggacagtttgacttgaagacatttgaagtgaaagccgttcctgtggagaaagtagaaggcttacgccccggaatgagcgccattatagagaaataaatgagaacaacgcatatcatcttccagatagccaagcgcgaagtgttccgcatcgccacaaggccgctatacctgttttgcatggtcatagctcctttgttctgctacatcttcttcacaacgctgatgtggaacggacttcccacggatatgccggcaggggttgtcgacttggacaatacagcaaccacccgcaacattatccgcaacctggatgcctttcagcaaaccaaaattgtggcacattatgccggctttgccgatgcgcgcaaagccatgcaggaaggaaagatttatgctttttactttattcccgaaggtacaacggcaaaggcacttgccagtcgtcagcccaaggtttctttttataccaattattcttatctggtagccgggtcactgctttataaagaccaacgcaccatgtccgaactggcaagcggtgccatcggtcgcgccactttgcgtgccaagggtgctaccgacgaccaagccgtggctttcctgcaacctattgtcattgattctcacatactgaacaacccatggttgaactattccgtttacctgagcaataccattataccgggtatcttgatgttactgatattcatgaccaccatctataccatcggaagtgaaataaaaggcaacacccagaaagaatggatgcaaatggccgataattccgtcactttggctctatccggcaaactgttgccacagaccctcatattctttatcatggccaccttttataatgtatacctgtatggattcctgcattatccgtgcaacagcggtattctccccatgctcttggcaggactgttgctggtattggcatcacaagcctttggcattttcttgttcggactgttcaccaccatgcggcttgctttaagcacagcttcgctatggggagtcatttccttctccatttcaggaatgagctttcccgtcatggctatgaatcctgtgttgcagggattagcctatctgtttccgttacgacattacttcctcatctacgtcaacctggcactcaacggctatcccttgatttatgcatggcattcggtagtagcattgatgcttttcatgctattgcctttctttatactgaaaaggcttcgcaccgtgctattgcactatgtatatatcccttaaaaaactaaccggttatgaaagagaagagattcaaagagatagtttcggaaggcattgcagacctgttctatatttggtggcaagagctgaaggctgtggtaaaagaccaaggtgtattgattttctttatcttggttccattgggatatccactactttatacctttatatatacgaacgaaaccgtccgcgaagtaccagcagtggtagtagacaataaccgttccacgctcagccgggagtatctgcgattggtggatgccggtcccgacctccacattgtttctcattgtgcggatatggaagaggccaaggcattgctgaagaagggaaaagcatatggcatcatttatattcccgaaagcttcagccgagatattgccaaaggcatccagacccgcgtcacactttactgcgacatgagcggaatgttatactacaaagccatgctgactgccaataccaatgcatcgctgaccatgaacaagcagataaagatagaacgctccggcaacaccaccgagcgtcaggacgaagtcagctcctcacccatcgagtatgaagacatctctatcttcaacccgcaaaacggatttgccggctttctgattcctgccgtattgatgctcatcattcagcaaaccctgctgctgggtatcggtttatctgccggaacagcccgtgaaaccaaccgtttccgcgacttagttcctttaagccgccattatcacggcacactccgcattgtattgggcaagtcacttacctatttcatgatttacgtcatcatgtcggtctatatgctttgtctggtacccaagatgttcagtctggtgcagatagcacaggcaggcacacttttcgcttttgtactaccttatatattggcatgcattttctttgcgatgacttgctctatctttatccaccaccgcgaagcctgcatgatgatatatgtattcacttccgtgccgttgctattcatttcgggcatttcatggcccggttccgccattcctgagttttggaaagttgtttcatggatatttccctccactttcggcatcaacggctttgtacgaatcaataatatgggggctacactgcccgatgttgccacagagtatcacgccctatggctacaagcgggcatttatttcctcactacttgcattgtctatcgccgacagataaccctcagccgtacacatgtatatgcaagactgaaagagataaaaaacagacataaacccaaagaggtctgaatttgttttataaacctaaaaagaaagacttatgaagaaaattttcatgctggcctgcgcctgcctattgattgctgcatgcaacagtaacaaaaagagtacagacaatactactattgctgccgataccgaagtcaccgatatgcataatgcagaaaacgcattggactacgatgggacttacaccggaacattccctgctgcagattgcccgggtatcaacatcacccttacgctgaacaaggataagacatttactcttgtctcagaatatatcgacagaaaagatgccaccttcaccgataagggaaactataccatcgaaggtaacctgataactctgcagaatggaacagaaaagaattactataaagtaggcgagaatacgctgactgcccttgatcgggacaagcaagaaataaccggtgagttggcagaacactacatattacataaacaacaataattgaaaaattctcccaataatgagggtgtcaaagtcaacttcagagaaaagaagttttaatctgaaacctgacaccctatatcaattcttatatttatcagctacaatctgtaacttttcagggggcaaagcattgataatactgttattttgccggtagaggcgaggttcgctcgtccgaaaacagtttgctttgcatattactcccaaagttgtgaccgttggttcgggcaggcaaaccctgcccctacagttgacgattcgataggccgttttagttttgaataccctcttacagtaaataggataacagttactccggatttttggtacgccttcagacagatttttccccctccctcccatcttttatcactttcctccgttttattcatggctttttactacctttgcgcccatcaatcaacagattaaacatgaaagaatttatacagatactccgtcggttcgtacctccctataagaagtacctagctttaagtactctattcaatatattatcagccgttttaaacatcttctccttctcactcatcgtgcccatactgagcatcctgtttcagatggagaaagccacttatacttttatgccgtggagttcggatgcttccatcaaggacatcgtcatcaacaacttccaatattacatcaccgagctcatcaatcaatacggtcccagcaccaccctgttgctgttgggactgttcatggcgtgcatgaccttcctgaagacaggatgttatttcctctcttccgctaccatgattcccattcgtaccggcattgtccgcgatatccgggttcagctctataagaagctgctcagccttcctctcggcttcttttcggaagaaaggaaaggcgacatcattgcccgcatgagcggcgatgtgaacgagatagaaaactccatcatgtcctcattggacatgttgctcaagaatcctattcttattatctcttatttcactacacttattattatcagctggcaactcaccttatttaccattgccatcgtgcccatcatgggctgggtaatgggaacagtaggaaagaagctgaaacgcggctcgctcatcgcccaaggacaatggagtgacttaatgtcacaacttgaagaaacactcggtggtctgcgcatcatcaaggctttcaacgcagaaaagaaaatgaacacccgcttcaccgaatccaacaacctataccgcaacaccatcaaccacgtcaacatccgccagcaaatggcacaccctatgagtgagtttctgggaacgatactcattgtcatcgtattgtggttcggaggtacgctgatattacacaataacagcaccatcaccgcgccttcttttatcttttacctgaccatcctctacagtgttatcaacccgctgaaggatttctcaaaggcaggctacaatattcccaaagggcttgccagcatggaacgtgtagacaaaatcctgatggcggaaaataagatgaagataagtccgaaccctgttcccgtcggtccgctgaaggagaaaatagaattccgcgatgtctgcttcaaatacgaaaaccaatgggtgttgcaagacatcaacctcaccatagaaaaagggaaaacggtagcactcgtcggacagtcgggctcaggaaaatcaaccatggtagaccttattccccgttattacgatgtacaacagggtgcagtcctgatagacggtatcaatgtaaaggatactacactgcacgacttgcgcagcattatgggaaatgtaaatcaggaagctattctgtttaatgacactttctacaacaatatctccttcggtgtggagaatgccaccatggaacaagtgattgaagctgccaagatagccaatgcacacgatttcatcatggcaagcgaaaacggttacgacaccatgattggcgatcggggcggtaaactttcgggcggtcagcggcaacgtatcagcattgcccgggcaatcctgaaaaatccgcctatcctcattttggatgaagctacttcggcccttgacaccgaaagcgaacgaatggtgcaggacgctttggagaaattaatgaaaaacagaacaaccattgccattgcacaccggttgtccaccatccgcaatgcagatgaaatctgcgttttacacgaaggacgcattgtggaacgcggcaagcacgaagacttattagccatggacggatactacaaaaaactgtgcgatatgcaacaaatgagctaatcctcagcacaacaaaccataagtagagctgtccaggcatcccgccggactgtctcaccggtacggaaatagacaatcactaatttaatgcaccctctttgcattaattaaccctccttgcattgattaattacggtaatttcgtaagtttgcgaaaacatcgtaattaattcatatacttatggaaaaactaacaatacaagaagaagaagtgatgctctacatttggagcataggagattgctttgttaaagaaattgtttcaaaatttcctgatcccaaaccgccatacaccacagtcgcttccattgtcaacaacctgaagcgtaaaggttatgtggctgctcaacgctttggaaacacctaccaatatactccattgataaaacaaagcgaatacaagcgtacattcatgggaggagtagtacagaactactttgccaactcttacaaggagatggtgtctttctttgccaaagaacaaaagatttcggcagatgacttgaaagacattatcaacctgatagaaaaaggaaaagaaaaataacctcatcaacaagtcaatactatgactcccgaacttatctacatgctgaaagtgaatgtaggcattgccttattctatgctttctacaaactgttttgcggcagcgacacattctttaagtggcgtcggattgctctgctcagctttcttacgctttctttcctttacccattgctcaacatacagacatggataaaagaacagcctgccatatatgaactgacagactattatacacttttaatcaccggcaacacaaacacaaataatgaaatagtaaccaccgcggttactgctcctactcccacgctaatgaccttgtttacatgggtatattttatcggagtagcgctgctctccgcccggttcatcatccaattgctcagcatcttccggctctctttgataagtaaggaagaaacagtaaatggaattcggataaaaaaccttccttatccgaacaatcctttctcattctggcattgggtttttatctatcttccggagctgaaagaaaatgagagacaggaaatcctgacacatgaactgactcatacacgtcagctccattccattgatgtcattgccagtgaggtagtgaatatcatctgttggatgaatcctttcatgtggctgttgaaaggtgaaatcaggctgaatttggaataccttgccgaccacacggtcatggagtcgggaaccaacaggcaacagtaccagtatcatttgctgggacttgccaaccaacacaaacaaaccggtttatataataacttcaacttattacatttaaaaaaacgcattattatgatgaacaaaagaagaacccgcacagcaggtcgtatcaagtatgccctgtttgcaccgctgaccgctgctctactcttggtcagcaacattgaaacggtggcacggactaccgaacgtatcaccaatgaagtggtcgaaacggtagcagccatccaaacacccaaacccggagctgtagacacaccagcagtttaccaagacaacgatcagatatttaccattgttgaggtaatgcctgaattcgttgatggcggaatgcaaggatgtctaaagttccttatggataacaccaagtaccccgaacaagccaagagagataaaatatcaggcaaagtatcggttaagttcgttatcgaaaaagacggaagcattacggatgccaaagtcgtaagaactgacaacccggtattcaatgaagaagcattgagagtggttaactccatgcccaagtggaaaccgggtaaacaaagaggtaaggaagtaagagtatcctacactgtccctgttatattttcattagacggcaaaggttatcagaaagcaatgagtacagctaagggtaataccaaaagcaatgcaacgcaagctcaatccggctccgatttcgatgaaaaccaactatttcagattgtagaagaaatgcctgaatttcccggtggtatgggagcttgtttaaaatttctcatggctaataccgaatatccggaaaaggcaaaagctcagaaagtggaaggaaaggtatctgttaagtttgttgtagaaaaagacggttcaatcagtaatccccaaattataaaaggtggtaacccattgctcaacgatgaagcattacgagtggtcaattccatgcccaaatggaaacccggaaaacaaagaggtaaagttgtacgcgtaggatatactgttccgattattttcaagttacaataaagaaatctatcattcataagagggtgtacttcaaaatgtgaagtacatcctctttgatatctgacatctcaatatgtagaataacgtctcttacaacaggttatttgatcccaacacggtcaacatggaatatcctaatatcagtcctatgattcccattataatacccactttctccatatccttttgctgaatcatgccggtggcatgtgccaaagcattgggaggagtagatataggaagtaccatggctaaggaagaacctatggcaataccgataagcaacgtttccacaccacctaaaggcaacaaattttcacgcatactgacacctgcaattgccaaaatggggactaacaaagcagcagtagccgtatgagaaataaaattggccattgcatagcaaataagaccggaaccgacaatcatcaatataggaggccaagtgttaaacggaatagcctcaatcatgtgttgagccaaacctgtttcttgcaaagcaacacctaatgcaaaacctcctgccaccatccaaagcacactccaactgatttcttccaaatctctctttgttatgattcctgttacacagaacactgccacaggtatcatggctactacatttgaattgactcccgtaaacttgtccgacatccacaaaagtaccgttacggcaaaagtaatataaaccaagatagaacgccaatctttttttgcttcaccttctatatgcaactcaatagtcttctgcttgaaagggaataatcgcaacaaaataaaccaagcaatgaataataccacaatagtataaggcagcatgaatcccatccactcaccgaaacctatgttcagattcaaaccttcagggtcattcaaatacttcaatgcaatagcattgggcggagtaccaataggagtagccataccgcccacattagcagcaaccggaatagccatagccaaaccaatttttccttttccatcagccggaagtgctttcagcacaggagtcaaaaaggtcaacatcatggcagccgtggcagtgttactgagaaacatagaaaacactgcagtcaccaaaataaaacctaataacacgtagcgcgactgagtaccgaaaggccgtagcataacacgtgccaacaacacatccaatccactcttagtagcggcaatcgccaaaataaatccaccaatgaaaagcataataatagggtcggcaaaacagtgcataatggatttatacttcactgcttttcccaattcctcagcaggaataccttgcacgaagaaccataggctgctgtccgaaacagtgagtaacaataaaactacaatcagcacagaagtagtccatgccggaactgcctcgaacacccacataaacgttgcaaaaataaatatggaaattaatctttgttcaataacagtcagcccctccaccccgaagatttcgataggcagacaccataatacaagagatacaacaatggctattgccagcttcacaaaccgtgatacacttttattttcagctaaacgtttagctttcttcaaattttgataggcttccaccaaagcgaagccatgaaatattttatacatagtactagattaaatggttattcatttcaaaagaaagtacaaaacagacttccatttaaaattaaagaatataaaaaatgaaaataaacaggagaatgtgcccatagcaataagcttacctccagcatattctcctgtaaaagttcaatgcatcgttactttttcaactctacaatatgtgtcggtgcttgctcggcattacgcttctcagtctgtttcactacattttccgccaattccaagaaagcacgtcccgtgatagtcgtttcgtccaaagcagcaggagtacccttatcaccattctcacaaatactctgtacgataggaatctgccccagcaaaggaacattcatatcttctgccaactgcttcgcaccttctctgccaaacagataatatttgttttcgggcagttcggcaggagtaaaccatgacatattctctatcaatccgagaataggcacattcaccttatcattggtatacatattaatacccttacgcgcatcagccagtgctacttgctgcggtgtgctgacaatcacagctcccgtaatggcaagtgtctgtaccaaagtaagatgaatatcgctggtgcccggaggagtatcaagaatgaaataatccaattcaccccaattagcatcacctatcaattgcttcaaggcattgcttgccatgccgccgcgccacaaagtcgcttggtcgggatctacaaaaaaacctatggaaagaagtttgatgccatacttctcaatcggaataatcaaatcgcgtccgtcaatctgctcggcgtatgggcgtgcatcttccacctgaaacattttaggcatggaaggaccgaatatatcggcatccagcaaacctactttataacccaacttagccaatgctactgcaagattggcagctacggtagatttacctacccctcctttgcctgaggaaacagcaataacattcttcaccaaaggaagcatctttcccggttcggggcgtgccgcctgacggctctccgtagagatagttacctgaacatcaggagatacataagtatgaatagctgtttcggcagccttcaacatagatttcataaacgggtcggtgggcttctcaaatatcagagagaaactgacagacattccgtcaatacggagattgtcggcaaccatctccgcttcaaccaaattctttcccgttccgggataacgcaccgttgccagagcgtctaaaatcaatttcggatataaggtcataatttacatatttattatttacttgtttgcaaaccgcttcgcttgctgcggttgtaactgcgatactcgtccagctctatttccacatcgggttcgcgcaactctccttcctgcggcaaacggaacttcatatatttgatattcaaaccacggtccagccattgttgttcataataagtgcgaatgcccaagatatcgtccacaagtcccgaatgatacaaatcttcggtcaggaactcgacgggaagacgattctcctccaccatatagcgagtgtaagtgaacataaaattgctgtctgtcttcaaatgaattaatccgtccggtttcaagaacttgcgataacggttcataaaataagtagaagtgagccgtttggtagccttcttcatctgagggtcagagaaggtgagccagatttcacttacctcgccgggagcaaagaagcgttcgataatttcaatattggtacgcagaaatgccacattcttcatgcctgctttcagcgcatctgtggcgcctgtccacatacgggctccttttatgtctactccgataaagttcttatcagaatacatacgtcccaatcccacggtatattccccgcgtccgcatcccagttcaagcacaatcgggttatcattcttaaaaaagtcacgattccagttccctttcatctcaaacggaacattatcgaccaccgaatagggatattcaaacacgtgcgggtagtcacgcatatctgcaaatttctccagttttccttttcccatgcaaattcttatgattattgttttgtcgggcaaaggtagggaatatctaagaaagagaaaaaaataaggcttgcaattcgcttgcaaaccttattattctttatctattaatcgagaatagtaacccagttatgagtatcaggttcatcaccatactgaatggcacgcaactttgtgtacagcttagtacaaatcggtcccggtttaccatctttcgagataacatacgatttgttgttttccaaatcatcaattcgctgaatggggctgataacggctgctgttccgcaagcacccgcttcttcgaaagtttccagttcttcttcgggaacaggacggcattccacttttatacccatatcctctgccagttgcatcaagctcttgttagtaatggaaggcaggatggaagatgatttcggagtgatatacgtattgtttttgataccaaagaagttggcggcaccgcactcatcgatgtatttcttttctttggcatccaaatagaactcgcaagagtagcccaagtcatgtgctttcttattggcacgcagactggcggcgtagtttccacctaccttgtaacgaccggttccataaggagccgcacggtcaaactcacggatgataacgtacggattagtagagaaacctcccttaaaataaggcccgacgggagttacgaataccacaaacatatattcgttggcaggatgtacacctacctgtgcacctgtaccgataagcaacgggcggatataaagagaagcgccgctttcgtatggcggaatgaaacgctcattggctttcaccaccttcttcactgctgcaagaaaagtctctgtcggcaattcaggcatcagtataccgttacatgtactctgcaaacgctgtgcattggcttccggacggaaaatacggattttaccgtccttaccgcgatacgctttcaatccttcaaaagcttcctgtccataatgcagacaagtggctgccatgtgaatgttcaatgtttcttccgaacaaagttccaattctccccatgcaccgtcgcgatagtaacaacgtacattataatctgtcttcatataaccgaaggacagattcgcccaatcaatctctttcattgtgtatgcttttaatgttattatttacgattgcgagcaaaattaaggtttatatttgcaaattccaaccaaatgaaaagaattgtttatcatttatcttcctcttccaatattttcttgatttctccgtcagccttataaagcttctcacgacagaacttaatgagttcctgcgcctccttaaggctttcgcccagactgtcgatatccagttcattgctatcgatgcgggttactatctcttcaaggcgcttcatggcctgttcgtatgtctgtttctttgctgccatatactttgaatgttatttatcggtgattactatactttctacttctccttttgcaaaacgggtgacgagtttgtcgccctccttcaggcaggaagcatccgtgactgctttgccttctttaagggtaatgctgtaaccgcgtttcagcagatgttcgggcgaggctgcctttatctgttgctccaggaaccggagacgatgattctcttccgtcagtttcttctgcaacagactgcccaattgcttctcaaccaattccaaccgatgactttccctcatcaaccgggattgcaaattgacttccatctgcctgattacacgttcctgccgataacgttcttcgcgtaagcgcatccgggtttgcatcggtatacgttccaccaagcgggtgagtcttgtcttttccctctccatccgggtagtgaccgcataaagaatggacgaagcataatcttctagcgtttcggccgtgctgcgcagatggttgatgagaaactcggcagcagctgtcggagtttttacacgtgtatgcgatacactgtcaagaacagtatcgtcgcgttcatgaccgatgccggtaatgacaggcaacggaaactgcgcgcaatttgccgccaggtcgtatgtatcaaagcccgaaagatcggaagtggcaccgcctccccggataatgaccaccacatcccaatcatcgcgccgcgcattgatggtatcgagagccgcaatgattgtctcctccaccctgtcaccctgcatgacggcaggaaaaagacgcggatagaatacaaagccatacggattatgttccaactgattacagaaatctccgtaacctgctgccgtggccgatgaaatgacagcaatccgctgagtgagcaaagggagttccaactctttattcaaggtaaggacgccttcttcgtccaactgtttcaatatttcacgccggcgacgcgccatgtctcccaatgtataggtggggtcgatattgagtacggtcagcgaataaccataaagttcgtgaaactccaccgatacttccaccaataccttgatacccgccacaaatgcctgtccggtctcttcctcaaagtaaggtttcagcaggcgatacacattattccaaatcgttccccgtgccttggctatcagattgtttcctctcggctctttttgcacaaattcaaggtaacaatgaccggagtagttgctgcgcacatcgctcagttccgcctgcagccaataagtatcgggcatacaagaggtaatactgcgctttaccagcgcattcagttcatataaagacagaggatgtgcatccattattttcttttctttaattccgtttgataagctttccaaatatttgaaacaccatagccataaatattatcgggagcatctgcccggtctgccgaacgacgtaccgcttctatcacctcctttgccgtgagccacggacatgcctgccagaaacaagccaccagtccgcaaaatgtgggcgatgcaaacgaagttccattggcacgcgacactgtcccgtcatttccggccaccgcagaacttacccccactgccattacatcaggttttacgcgaccgtctgccgtattaccgacagaagagaaatctgcattcaccagatttttatccatggcacccacagtaatgacattctccgcatctcccggaggagtcagcttcttccaagtaccgcgaccggaattgccggcactgcacaccactaccagtcctttatcggcagccatcgaagccgaatgtgacatcagagaataatgcccgtccaagtcacgataacgataattacacgttttatcgtcaaactcataataacccaacgaagtattcaccacatcgactcccacgctatcggcaaattccaaagccgctgcccagtaatcttcctccaccggctgctccgtatcatcgtcttcactgcgaagcaaccaatatgaagcttcgggtgcggtccctaccaatacgtccggttggttggcagccaaacacgataacactttcatgccgtgatagttctcggcataaatatccgactgcggatttacaaagtcacgaatacccaaaagatgcattttcttgaaaaacttcatctcgtcggcattataaaaacctgcatcgatgactgcaatctgcattccttcccccttgaaccctgcggcatggaggctgtctccccggtgaaccgcaatctgccggtaagcctgaccgtaataattatctgttttcgagaacttgttcgtcacctctttcctgcgctccgggttacgagccggaatactgtcgggagaagtccataccttctttgttttcgtgacaaaaggcagcctcgctatttgttctatcaaggtggtgtcgaccacttctaccaccactgtattgttccatttactttttgtcaccacagaggcacccttaccgataatggcgtcaatataagtacggcacaccggcaagtctgtttcatccaccttcaacccctgccgttcccggcgttccaaggcgcgctcggaaagataagcttgcggactgccgacagagtaagcagtttctgccttatcacgaagattgatacgatacttataagtcttttccgccgatacttgcaatgtgcatgccccaagcaggcaacttattataattctactcttaaaattcatcttagcaactcttacttattattttttttcatcgcaaagatacataatcttttccctcaagctcaatttttgcgtacctttgcaacgaatttcagaattaaacaggtaaaaagtaaagaatatggctaaagcaggaacagcaacagaactaggcacagaacggattggaaaattattgatgcaatacgcaatccccgcaattattgcaatgaccgcctcatcactttacaacatggtagacagtatctttatcggacacggagtgggtcccttggctatttcaggattggcaattactttccctcttatgaatctggcagccgccttcggttcgctggtaggcgtaggtgcttccacacttgtgtctgtccgattgggacaaaaagactatgataccgcccaacatattctgggcaatgtcatcaccctgaatctcattatcggcatcggcttcaccatcctcacactcctcttcctcgaccctattctctatttcttcggagccagtgcagacactatttcatacgcccgcgactacatgtacatcatccttttaggtaatgtggtgacacacatgtacctcggattgaacgctttgcttcgggcatccggacatccgcaaaaggcaatgatagccaccatcaccaccgttatcatcaatacactgctcgaccctatcttcatttatatattcaaatggggtattgaaggtgcggcgattgccactatcctggcacaaatcatttcattgacatggcagttcaaaaccttcaccaacaaaaacgaattgctccatctgcgccacggcatttacaaattgcgcggcagcatcgtaaaaaacaccattgccatcggtatgtctcctttcctgatgaatttggcagcctgcttcattgtcatctttatcaacaaaggattgaaagaatatgatggtgaccttgccattggcgctttcggtattgtaaaccgtatcgtattcttgtttgtcatgattgtgatgggtctcaatcaaggcatgcaacccattgccggatacaatttcggtgcccgtcaataccatcgggttaaccaagtattaaaactgaccatctacggagccacccttgtcaccaccagcggattccttgtaggcgaactgatgcccgaactggctgtatccgcctttaccacccacgaaggattgattgagcgttcggccaccggactgcgtatcgtagtcatgttttttcccattatcggttttcagatggttacttccaactttttccaaagtatcggaatggcatccaaggctatcttcctgtcccttacccgccaattgcttttcctgttaccttgcatcattattttacccatgttctggggttcaaaaggaatatggatgagcatgccgatttccgacttggcagccagcatcgtggcagccgtcatgctttatcggcaatttcagatttttaagtctcatgcacagaagcaagtttcaaattaaataattatatttgccgatatactcactaatttattacgactatgaacgagaattatgtcataaacctaggccgtcagctaggcagtggtggtaaagaaataggcgagaaactggcaaaagaattcggtatcgccttttatgataaagaattgataaaacttgcttccgatgagagcggattgtgtaaggagttcttcgagaaagccgatgagcgcgcttcacaaagcatcatcggcggtctgtttggtactcgtttcccttttatcagtgacggtgccatcccctatggaagctgtctgagcaatgattcactgttcaaaattcagagtgatgtgatacgcgagttggccgaaagacagtcctgcctttttgtgggaagatgcgccgattatatccttcgcgaccatccgcgatgtgtcaatgtatttgtatctgcttcaaaagaggcgcgaatagagcggctgatgagaatccacaacataccttcggaggctgccgaagagttaatggagaaagccgataagaaacgctcttcctattataattattacagctataaaacatggggagctgcagaaacctaccacctgtgcattgactcatcggtattgggaatagacggaactgtgcagtttatcaaagagtttgtcaagctgaaactgggaatccaaaaataacactcaaaaagaccttggaaaatatgtccagaccaaaccaacggtcacggccttggaagtaatgcacaaagcaaactgttttcgggcgaggtttgctcgcccgaaaacagcaaaatattggagattcataccatccaccgcaaatgaagaattcaccggactacagccgattacggtcattcttctctttcagatactcataaaatgcatattgggcgcgtaccggttcttcattcggattctttttcagcacattctttaagttctcatccacccatcctgccttttggttatccctcaactggatatgaagcatatcaatcatctcctgtttcaactcttcgtccatgacaggagtcaccgcctctatccgccgatacagattacgcctcatccagtccggcgaccccatgaaaagaagcggtttcccaccgttcaggaagtaccagatacgggcatgctccaagaagctgtccactatacgggtgatacggatattcttgctgtatgcctggccgggtatcaaacagcagataccacggactatcaaatcaatcttcacccccgcttcactcgccttatagagttcatcaatcatagccgggtcttgcagtgcattcattttcaaaatgatatgtgcctcttttccggctttcgccatatttatttcataaccaatccgcctgcgcaactccggcaacagattgaaccgtgccaccagcagacgtttgaatttcggttcagtcacctccttacgcaacacacggaaaagtgtatgcaagtcattgacaattacttcattcgaagtaaacaaacccgaatcggcatataccgttgccgttttctcattaaaattccccgtactgatataagcatagctgcgcacttgctttccttccttgttgcggcgaagcaccaatgccaccttcgcatgcactttcagtcccggaatactatatataatgtgtattcccgctttctccatcagttcggccgtcgccaaattattttcttcatcaaaacgtgccttcagctccacaaagacagtcacctgcttaccgttttgtgcagcagctatcagcgtattgataacctccgagttttctgccacccgatactgggtaatcataatctctttgcaagaagggtcgtgcaccgcttcgtaaaggaaatggataaaatggtcaaacgaatgataggggaagtgcaacagcaaatcacgcttattgacatatcggaagatggattctttttcatccagataattcagtttcatgggtaccggcttgaccggtgcttcattaccacgattaggattgggcaaatgcgacaagtcttcaaggttgagatgcttgtcacccggaaccagctcatcacgattgatgtcaaaggcatccacaaggaattccagatagtccactggcatcttgcggtcatacacaaaacgacataccgcccctatcttgcgcttcttcaccttctttttcagttgctctaccatcttttcagaactttcggcatcatcgacaaaaatatcggcatcacgcgatatcttgcaacaatagctgcaatccaactcatagccgggaaacatacggtcaatatttgccttgatgatatcctccatatacatcagatagaaatactcacccacccggggaagctcgatgaaacggggcactttgctatatggcagtttgatgatataatattccttctcaccggtgtcacgacggatgacacgcaccgaaagataaagacggttgtcacgcaaaaaagtcttgatgcgattcttacatacaggcacgggctgcaaataaggaaaaatctcctctttgaagaagttcctgatgaactccgtatgcacgggctccacctcctgcttgctttggtaaaacaccacatgctgctgttcacgcaaagcaggaatcagcttgcgttcataaatgcgaatacggtcttccatctgctcattcaccacctcggttatctgatgaataagatgttttgcctcttcctgagtaatatcatcactgtgaccgcccgaagcaatcgctttatgttctgccacacgtatcttatagaactcttcgagattggaagaatatattgaaacaaaatttattcgctcatatagcggaagggagtcatcatcggcctccagtaatacccgatgattaaatgataaccaactgatatcacgtttaaaataatgatatttgctctccataatatgctaagatttgtgtcaaatatagtacctttgttggaaataaacaaacaaacaatgactagaattggattattatcggatactcattcatattgggacgataaatatttaaaatactttgaggaatgtgacgagatttggcatgcaggcgacatcggctcggtggaagttgccgaacggttagctgccttccgaccctttcgtgccgtatacggaaatatcgacggacaggaaatccgtaaactttatccacagataaaccgttttaccgtcgacggtgcagaagtactgatgaagcacatcggcggttatccgggcaattacgacccgtccatccgcggcagcctgtttgtaaagccgcccaaattattcatcagcgggcattctcacatcctgaaagtgaaatatgacaagactctcggcctgctgcacatcaatccgggagcagcaggcaaatcaggtttccacaccgttcgcacactggtgcgttttgtaatagaccaaggagaatttaaagatttagaagtaatagaattggcagaataagttggatagtaagaaaatctttccgaactttgcgccacaaaaacagtaataactaaaaatatgaagacttatctcgttacaggagctgccggatttatcggcgccaactatttaaagtacattttggccaagcatgacgatatcaaggtcgttgtccttgacgccctgacctacgccggaaatctgggaaccatcgcatctgacattgataatgaacgttgcttctttgtaaaaggagatatctgtgaccaagcacttgcagaccagctctttgctgaatataagtttgattatgtggtgaactttgctgccgagagccacgtagaccgcagcattgagaatccgcaactgtttttacagaccaacatcctcggcacacaaaacctgctggatgctgcccgccgtgcatgggtcaccggtaaggacgaacacggatatcccacttggcgcaaagacgtgcgctatcatcaggtgtctaccgatgaagtatatggcagtctgggagccgaaggtttttttacagaagaaacaccgctttgccctcacagcccttacagcgcctcaaagacaagtgccgacatgattgtaatggcatatcgtgatacatacaagatgcctgtcaccatcacccgttgttccaacaactacggtccttatcattttcccgagaaactgattccgcttatcatcaagaacattctggaaggcaagaagcttcctgtctacggcgacggaagcaatgtgcgcgactggctgtatgtggaagaccattgcaaagccatcgatttagtggtacgccggggacgcaacggagaagtttacaatgtaggcggacataatgaaaagcaaaatatagaaatagtcaagcttaccattgccaccatccatcagatgatgaccgaaaatcccgaatatcgcaaggtattaaagaagaaggaacggaaagagaacggcgaaatcagcattgactggattaacgagtcactgattacgttcgtcaaagaccgtttgggacatgaccagcgttatgccatcgatcccgaaaagattacaaaggaactgggctggtatcctgaaacaacatttgaagtgggtatcgtgaaaacaatacaatggtatctggagaatcaagcttgggtggaaaatgtaaccagcggtgattatcagaagtattacgaaagtatgtataaaaacagataatacaccaatagaccggaagcggtgacagcaggtaatcaatgtatcgtgaatctgctgccaccgctttccgattattttaacttcagcttgaccaacaccggaacagttctatcttaaccgaggacttgcatacaagaataaagaaacggctaatgaagtatgtcctttcatcagccgtaacaagcattctcatccgttagattacccccttttatcagtcgaagtattatagtcttcggcaatggactgtacagtctattaccggagactgtacggtctactacggtggactgtacagtccgctgccggagactgtagtaatcttccgtttaaaagcccttggccgacagcaggaaacgacttaatcttccctttggccgcggttaagcagcaggaggctatacaatgtgacttttacattatttcttttcaagctcttgcaagctttccatcttcttcgtttccaggaattcatagatgccgcaaagatgctctttcactttcttgttgccgaattcatacaccttgctcaccagcccgtcaaggaaatcacggtcatgggataccacgataagcgtaccgtcaaagtcaagcaaagcctgtttcaagatatcttttgtcttcatgtcgaggtgattggtaggctcatcgagaatcagcagattgaccggttcaagaagtaactttatcattgccagacgggtgcgttcacctcccgaaagtaccttaaccttcttcatcgaagcctcgggactgccaaacatgaaagcccccagcaagtcacgaatcttattacggatttcacctttagccacatcatcgatggtttgaaagaccgtcaggttttcatccagcagcgaagcctgattctgtgcaaagtagccgatctgaacattatgtcccagtgtgagtgttccttcgtgctctatctccttcatgatacatttcaccagcgtagacttaccctcaccgttctttcccacaaaagccactttatcaccgcgctcgatagtgagagacgcattgctgaacactacgtggtcgccatacgtcttgcctaccccgtccataataaccggataatttccacttcggggtgatgggggaaacttaaggcgaagcgccgaagtgtcttcctcatccacttccaccagctccagcttttcgagcatcttgacacggctttgcacttgcaatgtcttgctataagttcctttgaagcgttcgataaagtcttttgtctcctgaatcattttctgctgctcttcgtattgtttcatctgttgctcgcggcgttctttacgaaggacaagatattgcgaatagttcactttatagtcatagatacgtcccatggttacttcgatggtgcgcgtagtgatgttatccacaaacttacggtcgtggctgatgacaatgacagcctttgcacttgttatcagaaaatcttccaaccattgtatggactcgatatcaagatgattggtcggctcgtcaagaagaaggacatcaggattctgcaggagcagtttcgccaactcgatgcgcatacgccatccgccgctgaaatcactggtctgccggttgaaatcttcgcgcgtgaatcccagcccgagcaacgctttttccacatcttcctcaaaatgggtaagatcgatggcataaaacttctcgctcatggtagaaactttctcgataagttccatataagaatcgctctcgtaatcggtacgcgtagccaactcattgttaatggcctcaatctccgcttccatggcatgaagatgggcaaaagcctgagaagcctcctcaaaaaccgtacgaccgtcctccgtcatcaaatgctgtggaagataagcgactacacaatccttgggggcagtcacttttccgcgggaaggctgacggacacccgccaaaatcttcaacaaggtagacttgcctgcaccgttctttcccatcagggcaatacggtctttctcgtttatctggaaagaaatgtcactaaacaaggtggttccgccaaactcgacggtcaatccatctactgaaatcatatttattctttttctttgttattataataaagcaaatcaggcacggatgacacggagcccacagtctgtccgtaaaaagaaagaaccgtgttttccgcgtaatccgtgcctgactatattttcactcactaaaagttatgaagccaatatcaatatcagcaactgggctgtcaggatgcgaaggaacatggacaccggataaacggtagaatatcctactgccggcgcattgtttcccgctgtctgattggagtaagccaatgcaggggggtcggtgttactacctgcaataagacccatcagcataaaatagttcatcttataatggaaacgggctacggcacccattatcaataaaggtataaccgttatcaagaatccgcaacctacatataataatccgtcaccgtctaccaccgtgctcacaaaattggctcccgccttgatgcccacactggcaaggaacagagcgataccgatttcacgcaacatcaggttggcactcatcgtggtgtaagtgaccagcttcatcttataaccgaaacgtccgatcaaaatagatacaatcaacggaccaccggcaagacctaatttcaccggagtaggaatgccggggaatgcaatgggcagactgccgaacaggattccaaggaagatacctacgaatatagtcacaatattaggatggtcaaggcgtttcaacgagttacccatcaaaccggcaacacgctctactgcatcctgtgcacctaccaccatgacacggtcacctacctgaagagtcaggtttcgtgaagcaaagatatccatacccgaacgattcacacgggtcacatttactccatacatactgctgaaatgaaactcacccagttgcttaccgttcattttgggctgcgtaatcaagatacggcgcgataccatcggagtatcctgcttctcccagtctacttcaatcttcggaccaatgaaagcgatgatagcttcggcatcatcttcggcacaaaccacaaacaactggtcaccgatgtgaaaaacagtatcacggttcggaatactcacatgtccgttctgaagaatgcgggaacatacaaaatcacgtcccataaagtcttttacctggagtaatgtcttcccttccaacgcctcattatgcacttcaagatgcatcattctgggagtaagatgagggttagccgcctcttccctggcaatagcttcttcttcttttttcagattaacacggcaaatgtaacgaatggcaatgatagaaccgataatacccaacacaccaagcggataagcacaagcataccccatggctatctgcgggccgttatagctcagttgcgacaaagcttcgttggcagcaccaagtccgggcgtattcgtaaccgcaccgcaaagaatacccaccatcatgggcaattcgatacgtccgttcaacccataatacaatccgagggcaactgcaacgttcagacaaacaatgccaatcgctatcaggttcatggcaacaccacccttcttgaaagaagagaaaaaagacggtcccacctgaagaccaatgcaaaagacgaacaaaataagtccgaaatcttgcaagaatgtcaaaatctgcgtgtttcccgtaaaaccgaaatgcccacagacaataccggtaaacaagacgaaggttacacccagtgacaccccgaaaatcttaatctttccgagtaacacacccactgctatcacaaaagaatatagcagcactatgtgtgcaatcgagttttcatcagtaaatagattttgtaaccaatccataatatttaatgtgttttaaaaattgccgcaaaattagcaaattcattccactcagcccaataatccgggcataattatttcacctgcatgatttattttgcaatatccacatagcaaaccccacagttacctacttctttccttaacaaaatgacagaaatcagcagttgcttgctgcgaaaataagtaaaaaagggaatctatttaaaaggaattactatatttgcccgaacacttgaacaagatacaagatattactaacttaaatattaataccaaataaactatggcagatagtaaagagaaactcttttcagattttcccggcgtttctacggaagcgtggatggaaaagattacagcagacctgaaaggtgctgactttgaaaagaaactggtttggaaaaccaatgaaggctttaaagtgaaacctttctaccgtcaggaagacttggaaggtttaaaaacaacagaagggctgcccggacagttcccttatgtgagaggtataaaaaaggatgacaacacctggctggtgcgtcaagatatccaagtggaatgcccgaaagaagcaaatgcaaaagcactcgacattctgaataaaggtatagactcccttggtttcaaggtcaatgcaaaagacttgaatgccgaatacattgaaacattgctgaacggtatttgtgccgaatgcgtagagctgaacttctctacctgtcagggacataccgtggaactggctaaattattggtggaatatttccaaaagcaaggttatgacttgactcaactgcaaggttctgtcaactatgacccgatgggcaagatgatggcaaaaggcaaagacctgagcaatttcgctgctactgccaaggaattggtagacgttctggctccattgcccaagtatcgttgcatctgcgttaacgcagtagagttaaacaatgcagggtcttatatttcacaagagttgggatacgcattggcatggggtaatgaatatctgaacaaactgatagaggcgggagttccggctacatcggctgcaaaaagaatcaaattcaacttcggtatcagctccaactacttcctcgaaatcgccaaattccgcgcaggacgcatgttatgggccaacatcgtgaacgaatataaacccgaatgtgaatgtgcctgcaaaatgattgcccatgcagaaacatctacttttaacctgactctgtttgacgctcacgtaaacttgctccgcacccagacagaaacaatgagtgcagccttggccggtgtaaactctattaccgtcactccgtttgacaagacttacaagactccggatgatttctcggaacgcattgcacgcaatcaacaattactgttgaaagaagaatgtcattttaataaggtagtcgacccggctgccggttcttattttatcgaaaacctgactgtctccatcgccaaacaagcatgggacttgttcctcaatgtggaagaagaaggcggtatgctggaagctgtcaaagccggcaaggtgcaggaagccgtcaatgcaagcaacaaggcccgccatgatgctgtttccaaacgcaaggaagtattgctcggcaccaaccaattccctaacttcaacgaaaaagcaggcgaaaagaatccggtcgaagcacaatgctgctgctccggcaacagttgcgagaaacctatcgcaacactgaacttcaaccgtgccgccagcgaatttgaagcacttcgcctgcaaaccgaacgctcaggcaaacgtccgaaagcatttatgctcaccataggcaatctggctatgcgtcaggcacgtgcacagttctcttgtaacttcctggcttgtgcaggttatgaagtgattgacaacttgggcttccccactgtagaagaaggtgtagaagctgcaatgaaagcaggtgccgacatcgtagtgatttgctcgagcgatgatgaatatgccgaatatgctgttccggcattcaaagcgctcaacggacgcgccatgtttatcgtagcaggtgctccggcttgcatggaagacctgaaagccgcaggcatcgaaaactttatccatgtacgtgtaaacgtattggaaactttgaaagaatacaacgctaagttaggaattaagtaaggaagacaatgaaaccgaattttaaaaacatagatatttatgccggattccagccgcagaacggtatggaatggcaaaaagccaacggcattaccgctgactggaaaacaccggaacacatcagtgtgaagcctgtttatacgaaagaagacctggaaggtatggaacatttgaactataccgcaggtattcctccctatctccgtggcccatactccatgatgtatacgttccgcccttggacaatccgccaatacgccggcttctctaccgcagaagaaagtaacgcattctatcgccgtaatctggcctcaggtcagaaaggtctgtctgttgcattcgaccttccgacccaccgtggctatgaccccgaccatcagcgtgtagtaggcgacgtaggtaaagcaggtgtatctatctgttcactggaaaacatgaaagtattgttcgatggcatccccttgaacaagatgtccgtttccatgaccatgaacggagccgtacttcctatcatggcattctatatcaatgcaggactggaacagggagcgaaacttgaagaaatggcaggaaccatccagaatgatattttgaaagagttcatggtgcgtaacacctatatttatccgcctgccttctctatgaagattatctccgacatctttgaatacacctctcaaaagatgcctaagttcaattcaatctctatctccggctatcacatgcaggaagcaggtgctacggcagatatcgaattggcttataccttggccgacggtttggaatatctccgtgcaggtgttgcagcaggtatcgatatcgatgcctttgctccgcgcttgtcgttcttctgggctatcggtatgaatcactttatggagattgccaaaatgcgtgccgcacgtatgttatgggcaaaactcgtgaaacagttcaacccgaaaaacccgaagtcactggctttgcgtactcactcgcagacttcaggctggtcactgaccgaacaagatccgttcaataacgtaggccgtacctgtatcgaagcaatggctgccgcactgggacacacccagtcactgcacaccaatgcattggacgaagcaattgctcttccgacagacttttctgcacgtattgcacgtaatactcagatttatattcaggaagaaacttacatttgtaagaatgtagacccatggggaggttcttactatgtagagtctctgacaaatgaactggctcacaaggcttgggaacatattcaggaaatcgaaagcctcggcggtatggcaaaagctatcgaaaccggtgtgcccaaaatgcgtatcgaagaagctgccgcacgcactcaggcccgcattgactcaggtgcacagactatcgtgggaaccaacaagtatcgcttggaaaaagaagaccccatcgatatcctcgaagtagacaacaccgccgttcgactggaacagattgagaacttgaaacgtctgaaagagggccgcaacgaagaagaagtgaaaaaagcattggatgctattacccgttgcgtcgagaccaaagaaggcaatttgctggaactggcagtagaagcagcccgtgtccgcgctaccttaggcgaaatttcagatgcttgcgaaaagattgtaggacgttataaagcagtaattagaactatatcaggcgtgtattcatcagaaagtaaaaaagatgcagatttcgcaaaagcttgcgaactgaccgaagaatttgcaaagaaagaaggtcgccgtccgcgtatcatggttgccaagatgggacaggatggacacgaccgcggtgcgaaagtggttgctacaggttatgcagactgtggtttcgacgtagatatgggaccgttgttccagactcctgccgaagctgcccgtgaagctgtggaaaacgatgttcatgcagtaggcgtttcatcactggctgccggacacaagactttgattccgcaactgatggaagagttgaagaagttaggccgcgaagatattctggttattgccggaggtgtaattcctgcccaagactacgacttcctttataaagcaggtgtagcagctatctttggtccaggtacttctgtagccaaagcagcagtacagattatggaaatattgctggaagaataaaagtcttccttaccacattcaatttataaaaggcgaacttcgaacaagtttgccttttatattttacccaaactacacttcatcccgataattgtctccccaaataaaataatccttgtttttaagcttttattcccatcttttattcgttatcaacgattttttaattacatttgcttgattaacatcttaaaatgatatgaaggatttaacaaaatgcgtgctaatcacagcaacgctgttcgtgttatatagttgcatggacaaaaacggactgaacggtgcacccgaaccgactcccgaaccggaaaaaccttccgtagaggactactttgacttcaacacaatgcaaactattaaagtgaacattgattatggtttcaatgactatctcgtactttttgaactcttcgatgaaaaccccacagaagaaccggaggatggatctattattaaaaaagagaatataaaagggctttttaaagcctcaacggataaatcaggacggttctcaggcaatgttaccatcccggcccgaaccgagaaaatatggttatactccgattatttgggaacagtttcccccatagaactgacaatcaaagacaaaagtatcagcttcaatcaaaacgactatattgcctcgcacagagacaggacacgggcagtgacccccgtcaatgaatttaaatatcctgatgaatacaagatattaggagattggagcgaaagtggaaaaccgacatatttacttcccaaagcaaatacgccagactatatactttataatataaaagaaacatactctaccataaagaataaatacatatccatagtacatccggaatttctcgaaaacaacttcagctcggatatcattttatcgaaagcaaccaaaataaaattggtatttgtgaatagcggagccggatacaaaaatgtagttggatattatacttatccgaaaaatgaaacccctgaagaaaataaaataacaaagattattgcatttcccaatatcaccagaacagaccaggcttctatattttcccgtgaccaagtagaattaaaatattgggatggaacacaattccaagatgaattcccggcaggggtcgccatcggatttttccttcaacccaatgggttctccaacaataacggtactatcgaaaacccggtaaaaggaaatgcctggaatgccactaaatattcaagccccaacctgaactatcaaggtgaaaaacgaaccatcgctttattggacgccatttctacacaaatggtaactatcggttttgaagacggtaaggataacaacttttccgatgctacattctatcttgacattgaacaaaaggatgcagtggaaaaaaatacaattcccgatttaccggatgaaaacgctccaactccggatgacaatgtacaaacgacttttggtacacttacctatgaggataaatggccggaagaaggtgattatgacatgaatgatgttatgatagactatgaatccactatttacaaaacattagaaaccaataaaatcaccaaaattatcgataagtttacccctcgtcataacggaggtatttataacaacggctttggctaccaattgacaaatattacttatacagatgtcaaaagtatcactatcgagggacctgaacgttccacattcatcggcaacgacaatatggaaagcggacagacctaccctactgtcctcctctttgacaatatcaaaaacgtgataggaaagacctatactgtgaccatagaaatagcaaatgcagactataataaactaattccgccctataatccgtttattatctgtagcacagaccaaggaagaggcaaagaagtgcaccttgtcaattacccgccgaccgataaagccgacaacaacttatggagtacaggagaagatgcctctcaacctgagcacaatttgttttatgtatccaacgacaatatgccctttgctatccatttaccggatgtaaaagacttccctgtcccggcagaaaaggtacgtatcactacagcataccccggatttgctgaatgggtaagatcttccggtgcacaaaacaaagactggtatcttcataaaaacgaataaagagaagcaggtaaaaaaataaccgaaaagctgcaatttgcttcaaatttcagaatctttttagattctccctctaaatttgccgcaaagaaaccataaaaataaaacgattatgaaaaagaactggatgttatttttattttttgcagctatcagtgtatttactttcagcgcatgtagtgacgacgacaatgatactcccgatgcatcggcggtatccaatcttgtccgggaagcatttaattccaaatatccacaagcccggtctgtggaatgggaagtaaagggtaattatgccgttgccagtttccacagcgaaggaacatcgcatgaagcatggtataatccttcgtcggcagaatggtatatgacggaaagcgatataccttatgaagcattgccacaaccggtgaaagagactttcaaacaaagtgaatatgccggttggaaaatagacgatgtagacatgctagcccgagcaggcatggaaaccatttatgtaatcgaagtggagcaaggcaaacaggaagtcgatttatattattcgcccgaaggtgttctgaccagaactgaagttgataatgattcggactactatgaagatttcattccccaaccggatttggacgatttctctgccctcatcaaagagatgtaccccaatgcccgtattcttgatatcgaaaaagaaaaagattacatggaagtgagtatttgggatgaaaataaagaaaaagacgtttatttcgacagtaagaagacatgggtgggaaccagttgggacgtacgtgcttccgaacttccccaagccgtgatacaggctgttaatgcccggtatcccggatttaccatcgatgatgccgaatacgtacaaacacccgtatccgaagaatggtatatcatcgacttggaaaacaaaagcacagacgaggaagtggaaaacctgagaataaaagcagacggtacatggattaaatagcatatcaagtacagatagcggctgaaagcagtttctaaattctcataaattaaagagaaaagagagttgctttcagccgtttttgttacctttgcaatcctattagacagaacgaaaattatgatagtttgtattgccgaaaagccttccgttgcacgcgatatcgccgatgtattgggagcaaaaaacaaaaaagacggatacatagaaggaaacggataccaggtgacctggacattcgggcatctctgtaccctgaaggagccgcatgaatatactccttcatggaaagcatggagcttgtccagccttccgatgattcctccacgtttcggaatcaaactcatcaatgacccgggtgtagagaagcagttccgcataatcgaaagtttaatgcagaaagccgatgagattataaactgtggtgatgccggacaagaaggagagctgattcagcgatgggtgatgcaaaaagcaggcgctcactgcccggtgaaacgcttgtggatttcatcactgaccgaagaagctatccgtgaaggtttccaaaacctgaaagaccagtccgatttcaagccgttgtacgaagccggcttaagccgtgccatcggcgattgggtattggggatgaatgccacccgtctttacaccttaaagtatggacaaaaccgacaggttttatctatcggtcgcgtacagacacccacccttgctctgattgtcaaaaggcaactggaaattgagaacttcactccccaacagtattgggtacttgccactgtatatcgtgatacgacctttaccgccatcatccgaaaaagcgatgaagaactggcacaagaggaaagtgaccaaaaagaatcggctaaaaagagcaagaggaatgtagaaaacagaggaatacctcccatcactgatctctccacaggagaagcattgatggaacgtatcaagaatgttccttttaccgtgacagaagtgaccaaaaaagcaggaacagaagcgcctccccgactcttcgacttgacctctttacaggtagaatgcaataaaaagtttggatattcggctgatgatacattaaaacttatccaatcgctctacgaaaagaaagttaccacctacccacgtgtggatactactttcctgagtgacgatatttaccctaaatgtcccggcattctggcaggtctgaaaccatacgaaacactgacagctccgcttgccggtaccaagctgaataaatcaaagaaggtgttcgacaattcgaaagtcaccgaccaccatgccatcattcccaccgggcaacctcctgtcaacctgacggatatggagaaacgtgtgttcgaccttgtggcacgccgcttcattgccgcattttatcccgactgtaagttttctaccacaaccgtgattggcgaaacagatggaatagaattcaaagttaccggaaaacaaatattggaaccgggatggcgtgtcatctttgccaaaccgcagaccaatctgcccgacggcatgaccgaccctgatacagaaccgcgtgaaggagatgaagaacgcactctgcctacctttgtaaaaggtgaaagcggacctcatctgcccacattgaacgagaaatggacacagccgcccaaaccctacacagaggctaccttgctgcgtgccatggaaactgccggtaaactggtggacaatgacgaattgcgcgatgccttgaaagagaacggcatcggacgtccgtctacccgcgctgccattatcgaaaccttattcaaacgtcactatatccgaaaagaacgcaagaacctgattgctactcccaccggagtggaacttatcggactgattcacgaagagctgttgaaatcagcagaactgacaggtatctgggaaaagaaactgcgcgagatagaacggaaaagctatgatgcttccacttttctggacgaactgaaacaaatggtagcggaagtggtgcacagcgtattgagcgacaacaccaatcgccgcgtcactaccatggaagaaactgtcaaagaagaagcctccaagaagactgctgccaaaaggaaagcaagtccccgcaaaccgaaagccgccaccaaagaagcgaagccggaaaatccgcctgccgatgaatgggtcggtaaaccttgtccgctatgtgggaaaggaacgattatcaaaggaaaaactgcttacgggtgttccgaatggaagaacggctgcacctttcgcaaaccgttctgatagatgccggaaggtatcagtcgtcccacaccatgctaagcacatccggcaaataaccgctacggatacgccactcttgcggatatagattgttggcacggttgcctatattcttggcaaagcctaacggaatctttttataggtaagcaatatataaccgcggggaatggaagagtccaaaaccacagcctctttacgcaaataaccgatagcctgttcataactcagttcagcctgtagaaactttccttgtctcattgctatagtcattgccagagaatgatcgggcacaatatcttttcctttcaattcgcccaatgtcacaccggcatgaatgacctttaaaacctgttgcaacagcgcatacgtttcacaatgttttttgggaaaagcaacaataccagtacctttcacctcgaactgatagtcttcagggtgctgcaaccagtcttttacttctttaggaacggtcatcacctgctgtttctctcttccacccttctttttatcttttctgcagccggcatgctctttcaggtaatctcctgtcctttcctcttctcctccttcggtatccttgcgaagtacagccaagaagaaaccttccccttttgtcttatgaggtaaaaagcgatacaccggaaaatccgcttcggtcaagttgccggtaatattccattccgaccggacaggtacctccagcacttcagctcccaattcgcgggctatccaggctacattatcttcatcttcctccctattatacgtacaggtactgtaaataagcagaccacccggcttcaatgccgtccacacatccgccaagatgcggcgttgacgctgccggcagatttgcacattatcagcactccactcctctaccgccacagcatctttacgaaacattccttcacccgagcagggtacatccgtcaaaacgacatcaaacatccccggcaaagcggcaaaatccgaagggtcgttattggtcactaccacttccgtatttccccatttaataagattctcggctaaaatctgcaccctgttgcgcatcacttcattcgctaccagcaaactgccatcaggcaataccgcccgtgcagcagtggacttacctcccggtgctgcacagaggtcgagcatcactaccggagacgagacataggtcttcaacacctgttccacaaacatagaagaagcctcctgtacataatagcatccggcatgaaacaaaggatcaaacgtaaaagtcggacgttctgccaaatatattccattggcagaccagggaactcgctccccttttacctctctatcacatttggcactattaacacggatgctcacaggcgcttcgtcctgcaaggcatcctccaactgtctataatcattatcacccagtaattcatgggttctttgggaaaaatcagatggtaaattcattgttgtcagcatacattatgctgcaaatatactctttttccccatattgctaagtctatttcgtacgttttaccgtataaattacttttcccgtcttgtcgaccatgtgcatatccaactcttttttatctaccgtgaagatagagaagcccggttcgggactacagaactgtgtgccttccacagccttcaccttccgactcagagaagcagaggtattcaccacgtaatcaatatcactgcccggcacacgaatatgctgaaagttatgaatatgtccgcaggcatagatatccactttatgtttacgcaatatagggtccagacgtttctgcatatcactgcgttcactgttgtctttcggagtctccgcataaatgggatgatgaccgatcaccactatccagtcttctttggcaacagtcagcacagagtcaatccacgcaagctgcttgtccatatcctgtttgcaagcatccggataagtagtgctttcgttgcggtatttgtcaatcaacggagccgtatctatcatcacaaagcgaacacttgttcccttcttatcgaatactttcgtataataacggtccggcattgaccaacggcgactcacgttcgtataatccaatactgcctgtgtattcccacgatactcatgattacccaaaaccgggaaccagtctatcatcaactcgggatggctgtaaatcagttcatagttagtcatccaaagcggatcattcacactgcgtaccccctcaaagtgatgtacgtcaccggcagcaaacacacattcgggaccgattgcatcagccatttcgcccattaactcggcaataggtttctggtcataataaccgtttcttcccaaatcattagccatatagaaattcagttgtctttccagccccttccactcctgcggagtctgagcgcatacattcacacagatagccgtaccgataacggcaatccacacccatgtcaatacttcttttatttttcctatcatcttcaacatattcatattattcatttatttaaaaacttactttaaaacctgcatttactttcactccataatattcggcctgcattgtccggtctttcgttccctgatagtaacgaagcggctggttcaataaattatttgcttcggcatagaacgtcattttcacctttctgccaaaagtatagctggcatttacatccatataattcacagcatcatagaatctgtcataaaatgtgctcggtcccatttcatcgataaagctggatgcatggttatagcttaagcgtacattcaaccctcctttttcaaaatagagagaagcattggcagtgtgttcgggagaccccggcagactcagtccgctttcgttttcgcgaccttcaaagttaaagtcttctacacgtgagtgggtatatgtatatgttccgtagaaacctacacatttcaatgccggagcgatgaaaccgaaatcacgctgataagaaaactccaatccccacagattagcgtttccggcatttttaggctgagtgaaacgagtatattctgtgccttgatattcatagttggtcagcacctgatcgacaatgaagtcatctatcttcttataaaagaatcctgcactcaccaaaccgatactcttgaaataataatccgcactcaaatcgaaattataagagagagtcggtttcaagtctgagttaccaatctttatctcgttgtcgccacggttaatattcacactcggaaccaaagccgaatatttgggccggctcaaagtttgtgtgtacgaaccgcgaatcttgaaatcatcatttacatcccatttcaccaagagagaaggaaggaagttcacgtagctgttggtcatacggtcggtcttagtggtctggtccgtttcatcgtcatagttgcgcccggtatatcgaagagaagtatgttccaaacgcaatcctgccatcaggctgatgtcacggctgaaccgatgatcgaaacgtacataacccgaactgacagtctcacgcgcttcaaagttctccgccaattctgcctgcacctgctccttttcgaactgtgaagggtcattcagattcaatccgccgatatactctttaccagcaaacgaacctacctgatatttattgtccggcataaacttatctgtactttggtcgactatattccgcagactgttttccataaaggcatcctcatctatcggtgtatattcataaaagtctatttctttttctttggttttacgcaccactttcgctccgaacttcagtttggcaccattattcagcgttgccttgaagttggtagagaacttcaagtcttcttcttttatatcctcctgttgctcggtcagttcctttaagctgaatttatcactcaacgtcagggtagaacccgattgaggagtagcaaacggttgccgttcatcactcaaatccatatcaaactgctgcttctttaactgaaaatcgagataacgttcattcggacgttcttccgtagctttggcataactggcgttccagtccatgccgatagctccccacaaatgttcaccgcccaaagcaaaatccatagtgcgctgacgttccaaacgggcattacggttatcgggtgtaccggctttagtctgaatacggacagttccctttccgttctcatccaaatcctttatagtcgtgcggtaacggttttcccagtcgttacggttattgaaaatacctttgaaagtcaatttatggttctcattgatatcgaaatcaaatgctgccgaataactttggcgctcacgggtaacaaagtattgacgcatctggtaatcattgacatacgcctttccgtcttcgcttttttcccacataaactcggtatcataagaacccgaaggagcattttgataagaagcagaaagcaacattcccagcctgtcatgaaagaaacggtcaccataagtgaatcctaagttcagttgggctttctcactaatccagttataaccgcttcctgctgtcgcattgatagtacgtttataaggagaattcttagtcaccaaattgatagagccaccgatagcatcaccgtccatatcaggtgtaacgaccttacttacttcgatggtctgaatcatatctgccggaatcaggtcaagctgcacgttgcgcgtatccccttcggcagaaggaacacgattaccgttgatggtaacggaactcaaatcggcgctcgtaccgcgtacctgtccgaaacgggcttctccctggtcgtattgcacattgataccactgatacgcttcaatgcatcaccgatattcgaatccgggaacttgcctacctggtcggccgacaccacattggtgattcccatattgtttttttgcgtattgatagctttcttctgtccttgaaaagccccttttacctgcacagcttgtaactccagtccttcactcatcacaatatccttctccaatgtcttgccttcgggaactgtgatgttcatttcgatagggctatagcccacataagttaccttcacggtataagtacccggtttcagattgggtaaggtataaaaaccgttcacgtcactaatcactcctgttttcagattctcaataaaaatagaagctcccggaagcgtttgtttgccgttgtctatcacacgtccgcgaatggcaccttgttttaccaccgtttcattgttccctgcaaaagcatttccacaaatacctgctgtcagcagcatacaagagactaatctaataacctttttcatatatttttttatgcgttataaatctgccgcaaaagtagatgaaccggattgcgtgggagttacactgcattaaaggttttgtaacaatcaggtttcatttctgttgcaaggctccaagcggcaggctgatggcgtcctgacaaaggaaataccacctttttctctgttttatgaaaaatatttcgtctatttgcaaccaaaaggaagtcatcttccgtctaacttatagaaaataataataaacagataaaacgtatgaaacagctttttttaatctttgccttcctgataggatacagcctgacggcttcagcagaaaaaataaaactggttccttcggccggtgacagtacacgaatggatactgtagtgataagtgaacttagcgatgcggatgcttatgccccgaccgatgcccattcaaataccaatttcagtttcttcggagacaacatgtcaaacgatatgggtgggattattgtactgatttccgtcattatgatattcggactgcctctgttcatcgtcgctatcacactatggttccgatataagaataaacaagccaaatacaagctggcagccgaagcgctcgctgcagggcacagcattccgcaggaactcttcaatgagagaaaccgcaacaacgagattatgaccaaagggattacccatatctttttaggtatcggactgggagttttcctatgggttatgaccggtgtcaaaggactggccgctatcggtttccttatcttctgtatgggaataggacaagtgctgattgcttataccaccactccccgcaaacaaaaaaaagacggctcctcccctacccggatgagcggtgacggacacgaagacactccacacaacgaacaataaagaatggggcagctcaacgacatatcgttggtagcacaagtggtggtcttcaaaaacacccgggcgtttgatactttggtcaaaaagtatcaatcgcccgtgcgccgtttcttcctccaccagacattgggcgatggagaactgagcgatgacttggcacaggaaactttcttgaaggcatacaccaatctgagctcattcaaaaacctctccagcttctccacctggctttatcgtattgcctataatgtattttatgactatattcgcggcaagaaagagacttcgggactggaagagcgggaaatagatgcctcctgccaagtggaacaaaccaaggtaggcgagcaaatggacatatatcggggattgagccgactgaaagaggcagagcgaacatgcatcactctgttctttatggaggacctgccgatagaaaaaatagcgatagtaaccggtatgcctgccggaactgtcaaatcccacctctcgcgtggaaaagaaaaactttctaacttcttaaaacagaacggttatgatggaaaatgataataaattgattagccaattcatgcatgccaacaagcatgaaatagaagacaacggattctcacgccgagtgatacggcagctgcccgaacatgccaaatggatgtccgatgtactcactacagtctgtaccgtgctttgctgcatactgttctatgtgtttgacggtttcaatttcttgttcggtgtcattgtagaagtcatcacttcgcaatcttacaatctgatgagcaacacaaacttcatttcattggcaattgctacggtggtggtcatcattataggtgtccaacgagtagtcagtttccgataaattgtgtacttttgcagtctgtaaaatgaaaatccgaagatgaaacaatatttaaacctgttaaaccgcatcctgaccgaaggtgtccataaagaagaccgcaccggtacgggaaccatcagcgtgtttggccatcaaatgcgctttaacctcgaagaaggctttccctgtatcactaccaagaagttacatctcaaatccatcatacacgaactgctttggttcctgcaaggagataccaacgtgaaatacctgcaagacaacggagcgcgaatctggaacgaatgggcggacgaaaacggtgacttgggacatatctatggctaccaatggcgctcgtggcctgactataaaggcggattcatcgaccaaatcagcgaagccgtggagactatcaaacataatcctgattcacggcgtatcattgtcagcgcatggaatgtagccgacttgggcaatatgaatctccccccctgccatgccttctttcagttctatgtggccgacggacgtttaagtcttcaactgtatcagcgcagtgccgacacattcctcggagtacccttcaatatcgcctcatatgccctgctgttgcaaatgatggcacaagtcaccggactcaaagcgggtgattttgtccacacgctgggagatacacatatttatctgaatcacttggaacaagtaaaattgcagctcacccgtgagccgcgtccactcccccaaatgaaaattaatcctgacgtaaaggatatattcagcttcaaatacgaagacttcgagctgatgaattacgacccgtggcctcacattgccggaaaagtatctgtttaacactgtaatacctcaaaaagatgaataacctgtctatcatagtggccatcgcaaaaaacaatggcatcggaaaggacaatcaattattatactggttgcccaacgacttgaagcgctttaaggcactcaccaccggacacactgttatcatgggacgaaagacctttgattcactgcccaaaggtgcattgcccaaccgccggaatatcgttttatcacgtcaggacagattggtctgtgcaggtgccgaatgtttcacctctttggaggaggccctggctcattgtaatgccgaagaggaaatctttatcatgggaggtgccagtgtgtataaggaagcactgccactgactcaccgtttatatatcacattggtgcatgacaccggcaagcaggccgatgcctttttccctgaaatagatgaaaaagtatggaaagaaacaggtagagaagaccatcataccgatgagaaacatctctacccttatagcttcatcaactacgaacgaagataaaacaaaatattaatcctcgtctgccaaattcaaaataggcatttgtcttttaatcgcttcgttgaaagaaataatggtctccgaacgagccaagccaagcggctgaagtttatcatggataatgctaagcaaatgatgattgttcttggcatatatcttgataaacatatcatactgcccggtagtgaagtgacattccacgacttccggaatctttttcaacgcttccgtgacagagtcaaactgttcgggatcctttaaataaagaccaatgtatgcacatgtttcataacctatcttctccgggtcgataacatactccgaacctttcagaatacctaagttggtcagtttctgaatgcgctggtgaatagccgcacccgacacattgcacgcacgggcaacttccagaaacggaatacgagcattatcggctatcaacttcaaaatctgctcatccaaactgtctaattgatgatgtcccattctttttagtttaattttctgcaaagatatgacttttcccgacaatatttgtacaatccataacttttattgcatgaatatttataaattaatagaaagtcgtatctttgttcaaaattaaagaaaacatgaaaaagacacttattttccttttatgcagcgttatgaacatcactgcattcgcacagaattttgatgatttttttgaagacaagactcttcgggtggattacatctttacgggagatgccgggcatctggatatttatctggacgaactttccagcctccccgagtgggcaggccgccggcaccatttgtctgaaattcctttaggaggaaacggagaaataaccatgaaggataaagctacagagcaagttatttaccgcacctctttttccagcctttttcaggaatgggtgaccgaagaagaggcttcccgcgtgagaaaagggtttgaaaactccttcttgcttccttatcccaagaaagaggcagtggttaccgttgcccttaagaatgtatatcataaggtaagcacttcgctgacgcacgaagtcaacccgaatgacattctcatccatcagagaggattggcacgtatcacccctcatcgctacttattacaaagcggaagctccaaagattgtatcgatgtggctattatggcagaaggttacacagagcaagagatggatcttttctataaggacgcacagacagcttgcgatgctttattcagtcacgaacctttcaagaagttgaaaaacaaattcaatgtggtggcagtagccagtccgtcgcaggatagcggtgtgagtgtgcccggcaaaggtgaatggaaatcgacggctgtcagctctcatttcaatactttctattccgaccggtacctgactacaagccgggtaaaaagtattcataactggttggcaggcatcccatacgaacacattatcatattggccaataccgacacttatggaggaggaggcatttataattcgtatacactgaccactgcccaccatccgatgttcaaaccggtagtggtgcacgagttcgggcatagcttcggaggattggcagacgaatatgcttatacggaagctcccagcccgcaatatccttacgaggtagaaccgtgggaacaaaatatcaccagtctcgttgactttgaaagcaaatggaaagatatgattcctgcccatactcccattcctaccccggtagcaactcaaaagccggatatatacaacaaagtaggagtttatgagggagccggttatacccaaaaaggcatttatcgcccggtcaccgaatgtagaatgaaaatcaatgaagcacctgctttctgccccgtttgccagcgtgcacttgaaagactgataaacttttataccgagaaataagttatatattacatgactaaaccaagacagaaatgattgaaattaaacaagtcaagacagaaaaccaagaactatacggttttgttgaagagttgatgcacacggcgtttcctgcacaggaacgccgtgatactccccaacagcgtgagtattcggacagtaatccccttttctgcaacaatgtgatagtggaagacggaaaacccgtcggtatgatcagctattgggacatgggagatttctactatatcgagcattttgccatcgacccctccctgcgcaacgggggttacggcaaacgtgtattagaaagtatccaaaccaaactgcaaggccccatcgttctggaagtagaagaaccgacagaagagatgagcatacggcgtatcaacttctacaagcgattgaatttcacactgcacgaaaagccatatatgcagcctccttaccgtaccggcgactcaggtctgcccatgttgctgatgacttatggagatatagatatggaaaaagactttgataaagtaaagaacatgctatataaagaagtatacggtcagccggtctgaccatataccatgtagaaacaaaacaaaaaaggaagttgccgaaaacaacttcctttttcatatcatgtattaactattttactgacgttgagtagcagagtagttaatattcaaagcatacgcctgacgaagagcctgttttacatcctgtacaatacccattttagtttcactatccaccttcatagatactgtcataaacggctggtcttcttctttcatgttttcacgttcctgataaatataatcctgaacttctgaaacttcagcgaacttatcattcaactgaatacggctttcagcacccattttcttctggaattcaggcaatggcttaccgatatagataaaggaaaccaaagacttcttttccagcttttcaagttctgtagcctgcggaactctaaattgaaccttcaatgtaacctcacgcattgttgttacaatcataaagaagaacaacatagtaaagataaggtcaggcaaagaagaggtattcaattcaggcattccacgtttacctgttttattaaattttcccattacttcttacctccatactttttaggttcagcttcagaaattttctgctgataatattcacgaatcgctttctgttcgtcttcgctacattcattgtaagccttgccaaacttagctttaccaagttcgtcacgaagttcattatatgcagcaaccaattcattctgaacattgatatatgcctgatagctggtaccaacgtcattctgaacagaaattacatgctgttctgtaaccatgcaatcacccaacaaaggaatattcttcttatgtttttccgggagattttcatcatcgtacggattggcgataaattcttttgccttttctctcaattgctttatatcaatatactccttaccacacatcagttggtcgtctttattcagacgtacctggagcacattacgttctttctttaagatattatcatctttctgattctgttcggggggaggcggcaaacgtctcgccaaaccacggtcagtatccatagatgtagtaatcaagaagaaaataagcaacataaaggcaatatcggctgttgaactggagttaatcccaggaactgctcttttcttttttgccattttacttatttcgtttttttattgttaatatcaatgtttattatttcttgaagataccgctcaggttaaggatagtaccaacagcagccactccaaacaagcaatagatagagtaaatcaacatatcggtaatcttcaaccagaaagcatccgaataaggaccgtcaccggtcatgatagtagcttccgatcccatgctgtaagaaaccaccaatacaacaaccaataatacgatacctaacaaagatttaacagcactcattggattatctctcaatgcagctccgaattgtgcaatggctcctacaagagttacagctacacaaacaccaaacatgccatacatcaagtaaatcaatgtttctgtatgagccggttcgttatattcaccgaccgggttattatatcctacgaagtagaacatgcccagcaccaccagaatcagtgcaaaacagacatataatgcatagtaggacattttatatgataacttagccattgttctaattattttttgtatttcaagttatatttcataatcatatcaagcaaagtgatagaagaatcttccatctggcttgtgatagcttcaatcttagaaaggatgtagttatagaatacctgaagaatcaatgctacaaccaaaccgaagatagtagtaatcaaagccactttcataccgcctgctacaactgtcggagaaatatcacctgcctgttggattttatcgaacgccataaccataccgattacagtacccaagaatcccaaagacggagccattgcgatgaacaatgtaatccaagagcatcctttttcaaggtaacctgcctgaacaccaccgtaagaaacaaccgaacgttcaactacgtcaacaccttcgtcaattctcatcaagccctgatagcagatagaggcaacaggaccgcgagtgttacgacatactgtcttagcagcttctacatcacctttttccaaagcagcttcgatgttagccatcaacttctttgtgttcacttcagccaagcttaaataaatgatacgttcaatacagaaagccaaacctaaaaccaatgcgatagctaccaaagacatgaagctggcatcaccttcgataaatttggttttaagttctttgtggagaccaccaccttcttcaactaccgctgtctgttctgtttgagccggagcttcatcctgagccataataggctgaactgatcccaaagtaaggactcccatcactgcaagaattgcaaataactttttcattgtgtgtctaatttttaagattaattaattaattgttattttattgttttaattgttttccactttttgccctttcacagcaatgcggagagagcgggattcgaacccgcgatacacttttggcgtatacacgctttccaggcgtgcctcttcaaccactcgagcatctctccttttaggggacacatttacatcctcgttttgaaatcgggtgcaaattacaaagaaatttgggaatagcaagcgatttcagtcacaaatgtatccttttttttcgtcttacacagaattcggcgcctcaatattggcatatctcctcaaatttaataaactttaaaaacttatttggccattttgaacacttttaaagcgttatcggtcgttatggcatctatttctgacaaactcatgccataaatttccgccagctttaacgccacctcttttatataggaagtctcatttcttttccctctgttgggcacgggagccaaatagggagaatcggtttcgagcacgattttactcaacgggacattcttcagtgtttcgggcaacgtacttttcttgaatgtgaccaccccgttgattccaattctgaaagcaggatagtccgacaattgctccgcctcttccgcatttcccgtaaaactatgaaagatgccgctcaaattcgtattcttataaggagagagcacttcaaacaactcggggaaggcttcacggcagtgaataatcaagggtaagtcatactccagtgcccaatgtatctgttcgtccaaggcagcttgctgctctttgaggtaggtcttatcccaatacaaatccatccccacctctccgatggcgatataagggtgtccttcggtcaacaactttttcatcggcatcaggcgggctttataatcaccgtccaccgatgtcgggtgaaaacctagcatcggataacaaaaacctttatatacctcacatacctccaacaactcacggatggttgtatcatcaatgttgggcataaaaaccttcctgacaccggcagccttggcgcgttctatcacttgcggcaaatcatcggcaaactcttctgcaaaaagatgggaatgggtatcaatcatcacacttttctattcattaaacgacaaacaaaagactttaactcttcttttctctctgccggcagactcacaccatccagcaaagccagcccttttgcgtaatattcattgattttttcatcgcagattttatcaatgccaatctcattatagattcccgtcacagctttaatcttttcttccgggcaatactccgcacacgaaatccatcggtccagctcttccttctgccgcggattgcccaaggccaatgcgtttatcagcataaaggttttcttattacataagatatcccccccgatattctttccaaacaccttgggatcaccatacacatccagataatcgtcttgcaactggaaggccagtcccatctgaatgccgaaatcataaagtttgcgggcatcctcctcggaagcatcccccaaaacggcaccgattttcaatgccgccgataacaagacagacgttttcagacgaatcatttctatatattccggtacagtcacatccgtacgtgtttcaaattccatatcccattgctgtccttcgcatatttccaaagccgtctgtgtaaagatatccatcacccgcttcaaatacttttcctgacaatcagccatcaggcggtaagccaataccaacatagcgtctcccgacaagattgccgtgttgtcatcccatactttatgaacagtaggtttattgcggcgcatatcagccttgtccatcaggtcgtcatgcaataaagtataattatgataagtctcgatacctgccgcctgcggcaaaatacagtccacatcttccttatacatattataagcaagcaacatcaagacaggacgaatccgctttccacccaacgataatacatattcaataggagcatacagccctttcggttcacgcatataaggcatttcagaaagatagccgttgatcttatccgacaattcggttgctaaaaaagccataagaaaaagaattaaatatattactaaaaaaagaggctacccaatgagcagcctcttcatgatttttatccaaagattactgtaatttaaagattacgggcacggtataacttacacgtaccggtttaccacgttgtttaccgggtttccatttcggcattgacttcactacacgcagagcctctttatccaagtaagggtctacaccgcgaacaacaaccggatcagcaatagaaccgtctttttcgataacgaacttcactgatactttaccctgcacaccgttttcctgagagatggtcggatattttgcattcttcatcaagaacttcaaacattctcccataccgccggggaattcgggcatttcttctacaatctggaaaatctgttgttcttccggttcttcctcttctactacaaccggtgtatatttaacttccacagctttttccgtatcatctgatgcctgaataacggtttcttctactttagcatcattttctacgatttcaataatttcttccgctttaggtacttcgggaggaggagcttgttgctgttcttcctgttctgtgataggaaccatttcttcttcaaatacaactgcggccatacctgtatctgtagtcacctgcttatcgcgttcagtccattcgaaagcgacaaacataagagctaagataaacacataaccgattagcagccaggtactttttttaccttcaagatctgctttgggcgattttttaacttccataaattgttgtttaaaattaagtgtttctcattcaaggcaaatgtagtacttttcttttaaacaaaaagtattttcaccgtaaaaatttgctaattcattatattttaattctttttcatggaagggcacctaacttttccctatctttgaaccgcatatagcaatatactcatctatacattaattatatatgaaaaaaataacaatagccatcgacggttactcgtcttgcggaaaaagcacaatggccaaagatttggcacgtgaaataggatacatatatatagatagcggtgccatgtatcgtgccgttactttatactgcctcgacaacgggttgtttacagacagcggcatccgggaggaggagctccgaaacagcctgcccgacatcaggatttctttccggctgaacccggaaacccagcgtcctgtcaccttgctaaacggcgaagaggtggaagaacgcatccggaccatggaagtttcttcacacgtaagcccggttgccgccctcggatttgttcgggaggcattggtgaaacagcaacaggaaatgggcaggcagaaaggaattgtgatggacggacgcgatatcggaaccgtggtttttcctgatgccgaactgaagattttcgtaaccgcctctgccgacatccgcgcccggcgccgatacgacgagctgaaagcaaaaggccggccggcttcttacgacgaaatattgaaaaacgtggaagagcgtgattatatcgaccaaaaccgggaagtcggtcccttgaggaaagccgaagatgctattttgttggacaacagccacatgaccattgccgaacagaaacaatggctggcagaacaattccaaaaagcaaccaatggttaatgtagagatagacgaaggttcgggcttctgcttcggcgtaaccaccgccatcaaaaaagcagaagaggaattggcaaagggcaccacgctctattgcctgggagacattgtgcacaacggacaagaatgcgaacgtctgaaaaagatgggcctcatcaccatcaaccacgaagaattcgcccggctgcataacgccaaggtgctgctccgcgctcatggagaaccgcctgagacatacgcactggcaaaagccaaccatatcgaaatcatcgatgcaacctgccccgtggtattgcggctgcaaaaacgcatcaaacaggaatttgacaacacccccgacagccacgacacacaaatcgtgatttacgggaaaaacggacacgccgaagtgctcggactggtgggacagacacacgggaaagcgattgtcatagaaaaaccggaggaagtggtgcagctggacttcaacaaagatatccggctgtattcacagaccacgaaatctttggaagagttctggcagattgtggaatatatcaaggaacacatatcgcccgaagcctcctttgaatacttcgacaccatttgccggcaagtagccaaccgtatgccgaacatccgtaaatttgcggcagcacacgatctcattttcttcgtttgcggccgcaaaagctccaatgggaaaatcttgtttcaggaatgtaaaaaggtaaaccccaactcctacctcatcgaccaaccggaggaaatagaccgcaacctgctgaaggatgtccattccatcggcatttgcggagccacttctactcccaaatggttgatggaagagtgtaaaaaggttatcctaaacgaaaaacagaccaataaaaaataatattttatcgctgtccaagtgataaattgctaactttgcatcataaaaacattaaaatgggtatttatgggaacgattaaaagtatcggtattttaacatccggaggtgatgctccgggaatgaacgccgccattcgcgcagtgacacgctctgccatctataacggcctgaaagtatatggcatttatagaggatacaagggcttggtaacagatgaaattcaggaattcaaaagccaaaatgtcagcaacatcatacaaatgggaggtactatcctaaaaaccgcccgctgcaaggaattcacaacacccgaaggacgtgcacaagcatacgagaacatgaaaaagcacgaaatcgatgctttggtcatcatcggcggtgacggttcactgaccggcgcacgtatatttgcacaagagttcgatgtaccgtgtatcggacttccgggaacgattgacaatgacttatacggtaccgacaccaccatcggatatgacactgccttgaataccattctcgatgctgtggataagattcgcgataccgccacctctcacgaacgtctgttctttgtcgaggtaatgggacgcgatgcaggttttctggcattgaacggcgctattgccgcaggagcagaagcagccatcatccccgaattcagtacggaggtggaccaactggaagaattcatcgaacacggattccgcaagtcaaaaagcagcagcatcgtgttggtggccgaaagtgaacttaccggaggggctatgcattatgcagaacgtgtgaaaaacgaatatccccagtacgatgtgcgtgtcaccatcttgggacacttgcaacgcggaggacgtcctactgcacacgaccgcatcattgccagccgcatgggagtagccagcatccaggcactgctcgaaggtcagcgtaacgtgatgattggcattgatgacgataagattgtgtatgtgccttttgtcaaagccatcaaaaacgacaagcccatcgacagagaactggtgaacgtgcttcacgaactctccatttaaagagaatacaactccctacaggatttaaaatattccaacacaacctgtctcagagataacgaactccgggacaggttgtttggttttacataatatgcttattatcaggcaaataagcattatctttgggaccactgggtccagggcccacctttatgctttcccggccccataaaaacacatcaaaacattgattatcagactcataaagcgtacaagcccagatactgtatttttcacttcaccgaaggatgaaaacaggcttaaacagggggaaatgaaagatggaggcatggaatatccaacagctaaaaagtaaattaattcaccttctgtggaaaaaagagtccgataacacaagtagagggtgtgccaaactgtagataatgctgtcactttaccggcaggggagtatatcaaaacaaatgcgaaaaacatgataatgtgattaaaatgtatacttatttctcataaagccattgcttgtccgttttaaacagacataatacattgataaacaatcaaataacatcttacaagagcacaattccggggccaccaaagcataaagatgggccctggtcccagtggtcccaaacaaaacagtcaatacactgttattcagcactttgaccatattaccaccttgtaaacccaacaccattttccaaccaggtagaaacaagcacccaaagcattgcttatcaatacattaagttcatttttcagcactataacacccctcaaaaaagaccttggagttaaaaaaaaagactaaggtctttgctaaaaactccttgctcttttgataaaacactttagtctttcagagcctgttcaagtttcattcgaaagctcttttacaacagctaatccgaacatttcctctgccaaacccgattgttgcatgtatgttttcggcagaaactcctataattatcaaatcatattttcgttttctctcttgcacattcaggattttattgataacttgccgtagtatttcttccaaatccgtcgaacatacaattattttaaacttgttaacccaaaataatcatttccgaggaaagaggaaacacgcttttcattttaaactttcattttcaaacagttcttaaacatgaaaaaaaacatcttttttttattactttgttatctcttcatagaatccactttagcacatgcacaaggaacaattgcggtacgtgagttaattcagcgtgtttcccggcaatcagaaattcctgtctcattaaaactgaaaccggaaaagaactctacatattatcagtatgaggtgcagaaaggaatattgcgtattcaagcctcggataatgtttcgttgtgtcgcggtttttatgattacataaaagataatcatttaggcatgtatacttggacaggtaatagtattgccatgccttcaaaggaattgccggatttgtctgtaaagaaaacaatatctccttttgctaatcactactattttaatatttgcacttacggttattctatgccttattgggactgggaacgttgggaacaagagatagactggatggctctgcatggtattaatatgcctctggctttggtcggttatgaagccatcatagcaagagtatggaagaaaatggggctgacagacgaagaaatcaaccattactttgtcggtccggctcatttgccatggatgcgtatgggaaatataagtggtatagacggccctttgaatgaggattggcataagaaacagattgctcttcagcatcagattttggatagaatgaggtcattggatatgaaacccatctgtccgggatttccgggatttatcccccgggcatttaaacgtatccatccggagttggaaattgtcgaaacccaatggggtggggctttttctaactggatgatttctcctcaagagcctttattcaaaaaaataggcacagcttttattcgtgaatgggagaaagaatttggtaaatgtgactattatttggtagacagctttaacgaaatggatataccttttcctgaaaaagggaatccgaaacgttatgaaatggcagcatcttatggaaaaagtgtttatgaatctatccgaaaagccaatgccggagctgtttgggtaatgcagggatggatgttcggatatcagcgacatatatgggattataagactttaggcgcgctggtttcgaaagtacctgataataaaatacttctgctcgatttagcggttgattataataagcatttctggcattcggaagttaactgggaatattacaaaggcttctataataagcaatgggtatatagtgtgatacctaatatgggaggtaaggtaggtatgaccggcatacttgatttttatgccaacggtcatcttgaggcattgtcttctcccaataaagggaatctgattgcgcatggattagctccggaaggcattgaaaacaatgaggttttatatgaattggttacggatgcagggtggagtaatcataaaatagaaatacgtgagtggctgaaagactattcggaaaatcgttacggaaagacatctgccgatataatgagtgcctgggattatttgctcaagtcggtatatggcacatttaccgatcatcctcgttttaactggcagcttcggccgggtatggtgaagaacggttccatcaacatttgcgaagactatttcaaaggcttggaatgctttgtgaatgcagcggacgatttaggaaacaacccgatgtatcaaatcgatatggcagagatgaccgctcaatatctaggtggaaaagttgaaattctgacaaagatgattgaccaggagtatctgctgggagatactttacaggctgttttgcttcagagccgtttcgaaacgctgatgttgggaatggatgcccttttaagcaaacaccctacacttcgtttgaatcggtggctggattttgcctcaaaagctgccgaaacagcccaacagaaaaaacagtatgaaatgaatgcgcggcgtattgttactgtttggggacctccggtagatgactatgcagctcgtatatggagtgggctgattggaagttattatctggaacgttggaaacactattatgccagccgtaccaaaggaattgattttaatatgactgcctgggaacgtaattgggtagagaatagtaaaaagacagattacgaatggggaacgattgaccttattgatttttccaaaagaatgatggctttgtcaaaggatatttcggaaaaggatttaaaattgaatcggccggatatgataggtacatggaatataggagataaagaatggaaagaggttaaactgaatatttctgcccgcatgctgaaacagatgaatggattttcattagaaacaataaaaggaaacggaacgataaaaatttccggcttcaaactggaagcagatgggaaacttgtgacctcctctcatgatactcaaacactgcaatgtggtaaaaaagtaacttatcggttctctttacctacaaatttgcaggctaataacggatgcattatgactattcgcctcacttctttgtcggaaaaagctgacggtattgttgtggttgataaataaaaaaaacggtatactgcataagataaggaaatgtgtcaaaacatggataatgctgtcgcttagttcgcaggggcgaggttcgctcgcccgaaaacagtttgctttatgcattcgggcaggcaaaccctgcccctccagctgacgatgggataggccggtttagttttgacacactccctttttacttcaacgtatcataataagcgtccagcaacttctttgccgcaacaaaagaagtcagctttccgttcaacacttcctcttccttcacagccagcatggaagctattttctcattattataaaaactgtcgcgcaggtgctcgttgatggactcgtacatccagtattttgcctgttcgttacgacgctgttcaaaatagccattggctttcacaaaagcaaaatactcatcaaccatgtcccatatctccttgatgcccaagccataaaagcccgaataagtcaggactttgggagaccatcccgaatcgggtgccggaaacaggtgcagcgcattccgaaaatggctcgctgccagttttgctttctctatgttgttgccgtcggccttgttgatgacaatgccatccgccatctccatgataccccgtttgatgccttgcaattcatctcccgtgcccgccagttgaatcagcagaaagaaatccaccatggagtgtaccgcagtttcactctgccccactcccaccgtttcgacgaatatcttatcaaaccctcctgcctcgcacaggataatcgtctcacgggtctttcgtgccactccgcccaacgaacctgccgaggggctggggcggataaaagcattgggatggacggacagtttctccatgcgggtcttatcgcccaagatactgcctttggaacgctcactgctggggtcgatggccaagacagccaactttcctccttgtcggagcacatgcagcccgaaaacatcaatggaggtactcttgccggcacccggcactccgctgattccgatacgaatcgacctgccggaataagggagacatttctctataacctcctgagcgatggcctgatgttcgggtttcacactctccaccagtgtcacggcctgactcaagacggtcacgttacctttcacaataccttccacatactctcccacagaaaactcacggcgacgcggtttcttgcggaatttcaaataaggattcacaatggatggttgttcaatgcccgcattgacgaccaatcccttatattcttcactattttcaggatgttccatagctatttctttgaggttactttcacattgataattattttcgggctgttcgggtcattcgttatcatcaatacacgaggtgagcctttcactcttctgaggttatgcccataagccgtaatcttcatcttggtcgttgcccccggcttcaagacacgtttcttcaactgcactcccaaagcagagttgaacacttgcaaatcacgtatttccagattggatttacccacattcttcactataatcgtctgcgaacgtttctcgtcatctgccaattctcccatgaccagttccttggcagaaagatggatggcaggcggattcaggcgttcctgctgactgatgcgagagaaatcgggcaacagcacagccgaaaccggaatttcattttcctcacccaccttgtctccggggaaccgtgacaagtataccgaagcagtggtcaaccccaacttgggaagtttttcggtatcaagagtcaccttaatctttccggtgcggttacgccccagcttatcgggagtggccaccgcactcaaataaggaggcagatgcatcaacacaggtgtatagacccggtccgaagtattggctatcagcagttcgatggtcggtttatctcccatgttcgcatcgtcaaactctatttcctctttattcaggcggattgcaccgatttgataaggatgggtaaaggtatagttcttggggtcggcggtcacttctccgcgaaaagacaaataaacaggcttgtctgacgcattgcaataaacgccgatgcttttccggaaacgaccgagagccttggcatcaaacgtagaactgacttcacccgttttccccggcaggataggagatttggtccagtcggtaacagtgcacccgcaggaagtggtgacattggatatcactaacagcttatcgcccttatttgttattttaaaggtagccgttaccgggttcttccataaaatggttccaaattcgtgcattgtcttatcaaaagaggcttttggctgcgcaaagactgaaagccccgatcccagcaacatacttattatcaacattatgtatttcataccaaactaaattcttcgtttaaagtaacaaaggtaaggaaaaaaagcattatctttgcattagaaggtgttaaaacaaaaagattaaaactataaactggaatattatgagaacatggaagaattatctatgtatgctggccgcactggttgtcacgctcggtttcacttcctgtgagagcgatgaagacatcggttttgatttatcgggattgtatggagtgacatggttcggcgatatgggtgccggtgattcttggggtgaacctttggacagctatatcacattcacatccggctctcgccccgaccacggtgtaggaacggaagacctctattataccactcctcccttcgagtattacgatacctataaattcgactggtttattgagaacggacggttatatatagactatgataccggggaatccatcattatagattatccgcatgtcaatggaaactacttctacggaacaataggaaactttgatttccggttggaatacgatggaggccgcagcgtcaaaagacaagcggatatctccaaatgaaaataacctgtcattaagttgtaagggagtatgtcaaaactatcgtttagctcgtaggggctatggaatagcccggtttagttttggcacactccctttacaattctatttcaccactactttatatcctcctgtatgcccgccgaactcgggtgcataagccgactgaatcgttgctatcccggaccggtattctcccgaacgggtcacatacacctgatactctatcacatacattcctttacgcatttgattgacaaagaaagaagtggaagcatcttttgttgcctgataatatcccaggtttgtgctcaggcgataacctgacaatgctgccaacggctccatacaagcggcacgctcatctttaatctgtacaaaatccatatcccggtctgcctttaccgtcagacggacagtaatcttatcacctatattcaatacagtgccttcttctatgagcgtctctcctttataaaggctacgactgacagacaaaccgctactttgctcacccatcttatccatattctccagatattgggcatacacagctccccaacccataccgctgccttcacaatccactgtcaccttcttcagattcaggacattgccttcaaccaccttcttgagataacccaccggctcttccgccgacgtctgaatcacctcttttcccaaggtaatcttcacggcatcagagtttgccaataagtccgttcccgaattcagtaaggcatatacagcattcaccgtagcaacaggagtatcccaaacctgcgtttgcttctctttcaaaagccagcgtttcatctggctcaacgcctgctcgtctttggtaacgtattgcaccgcctccattgcagccacttcggtcggaatcttataaccgaaccaagaataatgtgccttgggagtatcaaaataacgccccatcttgtctgtcaccaccgaatactccataacagactgcacaaactctttcgcctttaccgtctctccggcctgttgcaaaacaatggcagatagcgcctttccgtaaacagtcagatcggtcgcctgtgcactcagcttactgataaagtaacggttcatatcggcatttgctccggctttgccattcaaagcacatatatacagatattggagcgtctgttctgaaggactgaccttcgtcacgcctttcttttcggcttccttcattgccttgtattctttccctgcctgcacggtaagatagtttaatgctttctgatacatggcagagagagcctgattcagttttccaccggtcatcacttgcaggcgggtcagcatttctgttatctgcgtagtcatataacgattgcccggcatacccttgtaccagctccatgcaccatccccattttgcagctcattcaaatgtgccacacagacagacaatttattactcatcgtgttcaaatcaaacaaggtggcaatacgttgacgttgttcttcttcattcacggcttcagtcagccacggtgtctctgccagcaatatgttcttcaactcctcattcttttgcaaccggctcatgaaagtttctttagtgcctccctgtgccagccaactgtcaaatatctgtttgatacgcggatttgaactcacaatgaactcggccaacgcattcgcataataagcagaagcccatgacagcgcatcctctccctgcggaaccgcaaccaccggcaatgccatgacagcataccatacgggattgctcgtaaattccactgtcatcttccggccggatgccgtacgactgtggttattaaacagatgctccaatgagaaggtataacttcctttgccgtttacatccaacggcacactctccgtcacccactgcttatccgtcaacaccgggatgtaacgctgttcgccatcactgaacgtatctccttcagccaccatgcggcatgccaatacagtatacttatcagtgacgtcaaaggtaaagctcacattgcccgtttctcccgctttcactccgaacttctgcttctgagtatagaagaccttctctgtttcaggattgaaaagttccattctgacagttccggcaacagccttatccgacaggttaatcagtgaagcagcaatatttgccttatcacccacacggacaaaacgaggcatattgggttgaagcataaactctttggaggcagtagcggttgcctctatccggccgtaatccacctccttggtatgtgccagccccataaacttccattttgtcaggctctcgggcaggataaacgaaatgctgacttcgccctgcccgttggtacgcaactgcggatagaagaaagctgtttcggcaaagttctgacgcacctgcacattccctgtttctttcaaagcacccgcatccattgcttccgctctcaacacaggaattatttcttcctcaaacaccacatttgtaatcaccacatcttggacatcatctgccattttcggtcgggcagcacgcgaattcatttcccaaccggcaggcaaactctccaagacacaatgccgtacacccacggacggaatcagcaattcactataagagtacgaagaagtattcaaactcttaaacgggaaatcgacatagatatattcagtccgtgcataccagctgttccatttggaatatggaatgttacggtcgaaattcacacggaataaaaggttatgcttatagaactgatccaaagaggcatcatacatcaacgccagtagttcggcatcagccgggcggccatcgggataaagcacgctcagtttccattcttcctgctgaccggggcgaagcttatcacggaacgtagtccacttcaactgcaactctttatccggttcgggtttggtaatccgtgcatagtgaccatagagctgtccgtctttcacaaaggcaacacttaccattaccccgtttccatactcctgtttataagtaagcgggaaactgacgatggaatcggagaactgcacgcgtctgctttccacccgcttattgccggaaaagacatcataaagaagatagatattcttttcactgctgccgacatagatagtagccggagaatctccctcaaatttctctccgtcctgatagaaccaatcggtggtggcaatcggcggacgtttatcgccgagcgagaacaacaggaaaccttgagattccgtacattccctgccctgcgcatctttagccgaaatcttcaggatataagagccggaaggaagccggtataatgcttcgggcacaaacttattattggatgcaactgtagcctgcaacactttctcaccgggttcatggttacttttatttggtttaaacacctgataaatcacctctgtatctaccggttcgcccgataaattagtaacagagaaggtcaattcccgggctttctctttcaccatctgtgcggataatccctcaatagcgagcacaacggaagttttacccaagggcaacgacaggctggcttgttgcgtttcacccgcaccgtcagtcacatccgcctgtacccgataagtataataccatgtcggcaaatccttcacatcggaatcggcctccagacgcaccgtgacggtgaatttgccttcggcatcggtcatcgtttccccatcccaagcggcagaacggcccccccggaagcgccagaaccaagagaaagaacgggtgatatgataattcacctttgcattctgcaccggagcaccggcaaatgtcctcgccacaccggtgagaagcacagagtcgcctatttgatattcggtcttgaccggttcaaaagcaacatcgaaggtaggacgtttatactcctctaccctgaagccaccggaagcagagccggcctgcaacctgaagtaaccggtcaggcagggagaaggtagcgtgaactgaccgctgaaagagccgaacgagttggttgtcaccttcacctcgcccaccttattgttattgacatcatacagagtcaccgtatattctttatcggccaacacctgagtatcatcctgttgctgcctgtacgcaatgcccgaaacataaaccgtttgtcccggacgatagatggaacggtctgtaaacagactcaacacctcctgttcgcgattctccgaaggagcgtaatagatttgtttccacaagtctgcaatcggcatagccgtatcgctcatagtgcgggcattatacatgatagttcttttcttatcgggaaacccgagtttcagcgtaccttctttatcggccgtataggtttgcgaaggcatgaaacgtccgtccgtaccggtataaatcaccacctcggcatcgggcacaggatgtccgctttcggcatccaccacaaccagttccaggtcatcgtcaggcaagggacgataaatcaccctcaacgcagtgacatacatcaatgttccacccggttcgccgacttttccttccggtacagctttcaaataatagatacccggctgcggagcctgaatctgaagcgtagtatcgaccggcaaataatcggcagttcctttcagcgagaagttttcctccttttgcaacttaccatactttgcaacaaaattcttcatcttacttgcccacatcacggaagtgacgggtaagtttatcttatacagttgcaacgtaaagccgttcaaattcttatagttcactcttacctcctgcatcttgcccggataagccgcagacacttccaatgacagagaaggattcaatatctccttttctatgtttctcagcctgttgacaccgacataacgagggtatttggaaatcccctcacgtaccactttcaggcgttccacctgattattttgcttctgcaagtaatccgacagggccagataaacctcagctccggcttcctcatcgggatatccggctatccaagagcgtaattccttttggcaatcctcattggaaaagttctgattgaacgtgttgaacagataatccaacgctccgatgccggtcaccatccatgccgaacgatacgcaggagtatcatacagtgtcaaaagcgaacgataattctgaagaattgctgccacgaaatcacattcggacaccggtactgccgtatatgccataaagctttttatatccttcacctgcgccggcagactgttggtctggttcccgacagaagcagcttcccacctgttttgcttcatcagcaagagggcacgacgcgccagcaaatcatacagattatcatgaaaatagcgtttgctcatttccccgactcttaccatcggcttcagtttctccaccggacaggctgccaacaggtctttgtccttcagtgaagactgcaagaaattgaaaccttgctttacatctttcgagatagtcaactcacccaaaatggaatagagcaccgccctgtcttccgctttttccgtttgctttgcccagttttccaatcccttcatatccgtctccagactatcgggagtgacaagagtgcgatattgcatggcagtcagatatgccttcatcatttgcggcacatcacgctcagcctttgccttatcatagattttcatcgatgcggacaccacagactgaggaaggtctttcttttgaagttgttctacctctttccacattttatcgtaagtttgtgcatgcaatggagcaaataaactcattgcccagagcactatcagaaaataataacgagtattcataagcttcgtctttaattgttcctttaacaaagaaacgcattatgtagttcagcactgcatcataattggttaaattaacaaaacaagggatacggaatttctgcttttctcaacgaagcagaagcaaacgcttcaagataagacgcttatactgcttcttcaaatcatccgccaaaaacgaattgtcaatcaaatccatccatttaataacagaccgtcgaaactttttggcgatattctctatcaccttgccaccgacccccgaagcgacaatagatgactcgaaatccttccgacatattttccgcttctttccattgagtgtcaatgccaattcttcagtatcttcgggcataacaaggacggtagagagtaaatcgtatgcaggtgtcagacaataaccaagtcctacattatataatgagaagtttttcaaatgcatatccgagtttcctgttatccacgagaatatcaccaactcccaaaagttcaccaagtcgagttgcggaacggcggaatacttcttgatagccttggctatctgctcatacgaacctttatatttatattcggtcaaccgttcggtcaactgacacatatcctccatcgctatcttactgccatctgccttcctgtctatacgtcgggtgatataacatagctctccatcggcaaaacgcaccaatccatgaggcacaacagctattttggctgcttccgccatgtgcattgtgagatcctccagctcaggcaaagagcggtaaatgtccgtttgtggcttcaggataaaccgtccccacaacccgacaatcgtaaaacgatcaggttcattctttccaccggggcgaacatcaagcgacaatttggcctgtgcaccggtcaatgtagtccgggctctgaccacttgcttggccaaatcccctatttcgcttctcacataaggcagatgaggaacctgccgtgtaccatacagtttttgagcacaagccggatgataatccacctgaccttctttcaactccttatagcaatataaacattttcccatcgcatctcaattaaaccggttcatcaagtatcacacttactgcccctatgcagtctttacaacacaccagcaataacgacatacgatcgcgctggtttatcttccaactgttttctgcaatattcagaagccatccttcgggaatcaagccatcaaagaaaggaaacaacacagtgtcatgatacggcttatccgtcaaggggagtgtcaggctaatggcttccgccttatcggagttcaagaaatcagcgtcataaacaaaagtgaaaccattttcatcttccgtgagcagaccagcataggtatcataaagaaatatcttccctcttttcattcttcatcctcctttcttatgggcactgcccctactttatgcccgaaaagagcaagtacctgattgactttatccatccgcaaagtttccttaccttgctccaattcacgtacaaaacgcaatccgacacccgacttagctgccaaatccacctgcgtaagcccaaattttttacgcatatcctttataaacaatggtaatgaatcgctcataattataccctttaaggtgcaaatataacaaaagattccacaattacacccaaatgggtataattgttcgtgcttctttttaaaatatacccgaaaaggtgtaattcatttatccaaagcaagcgcagtacgtccgttgtcttaagtaacaaaaaacaagacacaaatagatttggaactttaagcgatatctcatacctttgatgaccaataaatacacatacatttcacaggttggtgcgctctatcggacgctcttttattattcaacgaaaacagcctttcggaaacaaccgactacgaaggaataagcatggacttaatatcaaataaggccggactctaagaatccagccttatctgcaactattttaatgaatttatattctttattctttgacaggcgtattgcccaatgttgccactacaaaatcatagaacttggcaaccgaaggaatataacaacgttcgtcgggtgaatgaggagaacgcaaggtaggtccgaaagaaatcatatccaagcccggaacaacggcaccgatgatgccacattccaaaccggcatgaatcactttcacttccggttccttgccgaactgtgccttatacgattccttcattgctttcaagataggagaatcaacattcggttcccaaccggaataaccgccggtgcgtgtcacttccatgcctgccatagagaaacagctttccaaagaagtattcagataatccttcatggagtcgcgtgaactacgagtcagaatctttatttccgctttaccgccaccgatagtgacaatagccagattggaagatgtctccactgtatcgggaatggtcggaatcatgcgtgacacaccgttctgacaagcatagatggcatcaaccagattgtctctgatttcatcgggaaccatcattgcaggcagttcgacacgctctgccttaaagctgatcggagtttcgtgcacatgatattcttcgttccacaaagtctcgcattcttgtacatattccatcacatctgcttcttcttcagccggaatggtaatcaccacttcgcactcacggggaatggcattacgcatatttccaccctgccatgaaaccaagcatgcctcatcgtaagcaatcacctgattcataaagcgtgccatcaacttattggcattggcacggccttcgttgatttcaagaccggagtgaccgccgcgaagtcctttcaaagtcactttcaaagcgatatcatcagggtcggtttccacttctttgtattccaaagtagcagtcagatcttcaccgcctgcacaaccgatatatagttcaccttcttcttccgaatcaagattcaacaaaatatctccatctaccgtacccggtttcaagccgaatgcaccaaacattccggtttcctcatcagcggtaatcaatgcttccaacggtccgtgcttcagtgtgttgtcctctaaaacagccataatagcagctacacccataccgttgtcagctcccaatgtggtgcctttggctttcacccaatcgccgtcgatataagtctggatgggatcgttttcaaaatcatgtactgtatcgttattcttctggggcaccatgtccatatgtgactgaagaattactttcttacggttttccataccgggagtagcaggtttacgatagatgatgttacctgcttcatcttgaaatgtttctacaccgatgctctttccaaagttcagcaagaactcttgaatcttcttcagatgacccgaaggacggggaacctgagtcaatgaatagaaatgcttccacacgttctgcggagcaagagagagaattgtactcataacttcttagttttattagtgaacggcaaagccgctaatccatatattcccaacaaaattaataaaaaggtttgtattccatgcactaatagtgcaaaaattcctgcatcttctttacccactccatagagcatcatcattgttatgacagcaaaatgccacggacctgccccattaggggtggggacaacgactgcaatgctacccacaacaaacatcaccaatgccgccataatgctcagatcggccgagaaaccaaaacaaaagaaggatacgtaaaattgcaggaaataacagccccaaatggcaacggtgtaaaagatgaaaagcggcatctgcttcacatctttcaacgaaaggatacccacccacacattatacagaatgcctctcacctttgcaaaaaccgccacattccttatcagaaaaaaggccagcacacaaacagccgaaacacatattataataatgtaaaaatgggcagaagtcaacacatcggtcagcgcccgcgtatcagttccggtttctttgaaaaaagtggcaaacacaccggcttgcagcaacaaggtcactcctgttatcaaagctacacagagagtatcaatcagacgctccgtcaccactgtccccaaagacttgggaaaagaagtgccgtcatactttgccaaaatgccgcaacgggaaatttcacccacacgagggacaatcagattagcggcatacgacacaaaaacagcatacacgcagtctgatgttttgggatactcacccaacggagccaatgtaagtttccacctccatccccggaagatgtgactaaacacaccaaacaccagcgaaagcagcatccaactataatccatcccgccatccaatacttcccacacatgcccgaaattaaatccgcggtacatccatatcattatcgcagctcccaaaaccaacggaagtagtatttgcaggctcttctttacaatcttttttatatgagttccttccaaaatcagcgtattttaaatttataatgtttacctttgcacgatgcaaagatactatcttagcgaaataaacctatttattaacgatagaaaaataacggaatgggattagtcaaaccaaaaaaatttctgggacaacacttccttaaagacctgagtattgcaaaagacatagccgatacagtggacgaatgtcccggtttacctattctcgaagtaggaccgggcatgggagtattaacccaattcctgatggaaaaaggacgtgaagtgaaagtggtagagcttgattttgaatcggttgcctatctgcgtgagaacttccccgctttggaaggaaacatcatagaagatgactttctgaagctgaaactggagaagctgtttgacggcagaccttttgtcctcaccggtaactatccttataatatatccagccaaatcttttttaaaatgctggactacaaagacctgattccctgttgcaccggaatgattcagaaagaagtggccgaacgtattgccgccggtccgggcagcaagacatacggtatcctgagcattctgattcaagcatggtataaggtggaatatctgtttaccgtacacgaacatgtgttcaacccgccccccaaagtaaaaagtgccgtcatccgcatgacacgcaacgaaacaaaagaactgggatgcaacgagaggttgttcaaacttatcgtgaaaaccactttcaaccaacggcgcaagactttgcggaattccatctcttcaattttagaaaaaggaaatccgctgagcaatgatccggtattcaacaaacgcccggaacagttatcggtacaggaatttatcgagctgaccaaccgggtggaaaccgctctgaaagacaaagcagacatagactgcggcaacgacatcgcccgcaaaggtgcaacaagccaaaaggaataacctatttattttatattaacggaagaagaataggatgaataaagaggaattagaaaaagtagagcagctcatcgagcaaaagaactccgaagaactgaaaggactgctctccggcttacatcctgccgacattgccgaactgtgcaatgaactggatgccgaagaagcccggtttatttatctgttattggataatgaaacagctgccgatgtcctcatcgaaatggacgaggacgcacgtaaggatttcttagagatacttccttccgaaacaattgccaagcgatttgtagactacatggactcggatgacgccgttgacatcatccgtgaaatggacgaagacaaacaggaagaagtcctttcgcacatcgaagatatagaacaggcaggcgacattgtcgacttgctgaaatacgatgaagacaccgccggcggtttgatgggaaccgaaatggtcatcgtaaatgaaaactggagtatgcccgaatgtctgaaagaaatgcgtattcaggcagaagacatggatgaaatctattatgtatatgtagtggatgacgacgaacgcctgcgtggtgtattccccttaaaaaagatgattaccagtccttctgtttccaaagtgaagcatgtgatgaagaaggacccgatctcagtacatgtagacactccgatagacgaagtggttcagttaattgaaaaatacgacttggtggcagtccccgtagtagacagcatcggtcgtttagtggggcgtatcactgtagacgatgtaatggacgaagtccgtgaacaggccgaacgcgattaccagttggcatccggtttgtctcaagacgtagaaacggacgacagcgtattccgccagaccacagcacgtctgccatggctgctgattggaatgattggcggtatcggcaactccatgatactgggaaacttcgacagcacctttgcagcccatcccgaaatggcactctatatcccgcttatcggcggtacgggaggaaatgtgggaacacaatcttccgcactagtagtacaggggcttgccaacagttcgctggatgcccacaatacatggaaacaaatcgttaaagaatccgtagtagccgttatcaatgcgactatcatttccatgttggtttatatttataactttatccgcttcggagcaactgccaccgtatcttactcggtatcagtcagcctgttcgctgttgtcatgtttgcttccatcttcggaaccttggtccccatgacactcgaaaagctaaaaatagatcccgccattgccacgggaccgtttatctccattaccaacgatatcataggcatgatgctttatatgggcattacggtattactatcgtaattctctttcttcataatgtgtttcgggcacggatttcatattctgtatcaccatattaagtgtgacaaaggatgagattcgtgcccgaaatacaacatttatcgacctaaaataaaaaaaacaggcaaaatagtatgaagttctaatttatttcttttaatttgtaaactgttgctataataagaaagctcactttaaaaatctatacgatggactcgaatgaaactaatcgccctttaaccgaagttccgatggacaagacgcccgaaactttggtatcatcccccgcccaagcggaagagaataacactatgtatgtacctaaacaaaccaaagaagaggtcattaaacgtctaaaagaactcaacgaagatgcttgcaatgccgacaaacaagagttggatttgctgaaacaaactttctataagttacacaaagcagaacaggaaacggctcgtaaaacatttatagaggccggtggagcacccgaagcatttgtaatgccttcagacgactctgaaagccgcttcaaggaagccatgagttccatcaaagagaaaagaagcgccatgcttgcggagcaggagaaagaaaaagaagagaacttgcagaagaaactggccatcattgaaaagctgaaagagctgtctgaatctcacgatgacgccaacaaagcctacaatgaattcaaaaaactacagcaagaatggaatgaaatcaagcaagttccggcagccaaaatcaatgaactatggaagaattaccagctttatgctgaaaagttctacgatctgattaagctgaacaatgaattccgcgaatatgatttcaagaaaaacctcgaaattaaactgcatctctgtgaagcagccgaaaaactggcaaacgaagaagacatcatttccgctttccaccaattacagaaactgcatcaggaattccgtgatacaggtcccgtagccaaagaattgcgcgaagaaatctggacacgttttaaaactgcttcaacaaccgtaaaccgccgtcaccagcagcacttcgaagccctaaaagaaaaagagcaacgcaacttggatgaaaagaccgttatttgcgaaattgtggaaacaatggagtatgacacatttaccaccttccaggattgggaaaataaaacacaggaagtcattgctttgcaggccaaatggaaaaccatcggctatgctccgcagaaaatgaatgtgaaaatattcgagcgtttccgttcggcatgtgatgaattctttaaacgcaaagccgaattcttcaagtctgtcaaggaaaacatgtccggcaatttggagaaaaagaaagaattatgtgaaaaggctgaagcgctgaaagacagcacagactggaagactaccgccgaagtattgagcaaattgcaaaaggaatggaaaaccatcggcccggtcccaaagaaatattcggaaatgatatggaagcgtttcatcggggcttgtgactatttctttgaccaaaagaacaaggctacttcttcacaacgttctgttgaacaggaaaatatggtgctgaaaaaagagattatcgaaaagctgaatgcaatcaacgctcaagaaactcctgaagaagatgccgataataccattcgtgagctgatgaaagaatggaatacaatcggccatgtccctttcaaggaaaaagataagttatacaaacaatatcacgcaataattgataagttgttcgataaactgaacctgtctgcttctcagaagaagttgagcaacttcaagtcaaacatcggtaaagaaggtaatatataccgtgaacgtgaaaagctggttcgtgcgtatgaaaatatgaaaaacgaaattcaaacgtacgaaaataacttgggattcctgaccagttcgtcaaagaaaggcagtaacctggtaacagaaatgaatcgtaaagttgaaaagttaaaagcagatttagaattaatactgaagaaaatcgaaatcattgaccaatcaatgagtaaagaataaaaaaaatattcttatatcttgattccgccgtcttaatcagaaggagcatccttttatattgagatggcggttttttaaatacatctgttcaatagactcggaaaagatgtttctttgggagaattggcaatcccgatttgcccccgaatcaatgtcccacttttttcgaaagacaaaatgagagcaataaaaaagctcctaaaacaatatatttaggagctttttaaactttaacaagtaatttctttgttgggataccaggattcgaacctggaaaaacaggaccagaatctgttgtgttaccattacaccatatcccaatgtcctttatcaaaagcctcatttcgtttttgacggtgcaaagataccgctttttctgaaacctacaaacttttacataacttttttctaaaaaaactccattattttactgtaaagtgaattggcatagaagtattatcatcatccaacatacttcttcacaagtaaaaccaaagtcaacaaatccatctaatttattaataatcagaatatatttataaatatccaatctgacatccgaaacaaacacatccaactccggcaaaacattcaaagagccattctgtttgtccagtacgaccaccctatctttcatcctttaatatatttgaggtaaaaacagaggtaaatcaaaacttatctaagggattaacctaatattaaaaggttctctaactaaaaaaaacaaaaagagcgcatatttcaagcacattttttcgttgtaattagaaaaccaagtatctttgtactttgttgtaaatgtagactattgagtaaaattagtattaaatagaatgaacgaagcaaagtatttagtaaaaaaaataacagaaggtattcaagaaaaaaaaggtaaaaacattgttatagcagaccttagttccattgacgatacgatttgcaattattttgttatctgtcagggaaattctcccagccaagtcacagcgattgtcgactcggtaaaagattatgtccgtatagcaacagataataagccgactgcaatagacggactccaaaatgcacaatgggtagcaatggactatagtgatgtcttagtacatgtattcctacccgaggtcagagatttctataatctggagcacctatgggcagatgccaagcttacctacttacccgatttagattaaacatttgatagaaaaaaaatgagtgaaactaataataacaacaagcctaaaataaatatgccacgctttaatttaagctggttatatgttatcatcgcaatgagctttggtatcctctatttttccaatcaggaaggaggaatagataagcaaatcacttataccgagtttaaagacatggtgaataaggggtatgcgaataaaatcattgcctatgacaataatacagttgaaatgtttatcaaacctgagtatatcaaagatgtattcaagaatgattataagagagtaggaagaagtccctcactgagtgtagaaatcggttcgatagaatcattggacaaatttttggaaaaagctcaggaagagggtcattttacgggctcgatcagttacgagaaaaaacgtgactatttcggcgctctgttttggaatatcgctcctttcctacttctaatcggtatttggatgtttgccatgcgccgtatgagcggaggcggaggttcgggtggcgccaatccttttaatgtaggtaaaagtaaagcccaagtatatgaaaagggagacaagaccaaccgaattacatttaaggatgtagccggtcaggcagaagcaaagcaggaggtagaagaaattgtagagtttctgaaacaaccacagaaatatacggaacttggaggtaaaatacctaaaggcgctttgcttgtaggccctccgggaacaggtaaaaccctgcttgcaaaagctgtggcaggtgaagcagatgttccgttcttctcattatccggctctgatttcgttgaaatgtttgtgggtgtaggtgcttcacgtgttcgtgaccttttccgtcaggccaaggaaaaagctccttgtataattttcattgacgaaattgacgcagtaggacgtgcacgcggtaaaaacccgagtatgggtggaaatgacgaacgcgaaaacacactgaaccaattattaaccgaaatggatggcttcggctctaacagtggcgtcattattttggccgctaccaaccgtgtagatatcctcgataaagcattgcttcgtgccggacgttttgaccgtcaaattcatgttgatttacccgacttgaatgaacgcaaagaagtgtttggcgtacatttaaagcctttgaagctggatcattcggtagacatcgatttattagcccgtcagactcccggattcagcggcgcagatattgccaatgtatgtaatgaggccgccctgattgctgcccgtcatggcagacctgccgtgggaaaacaggattttctggatgcagtagaccgtatcatcggtggtttggaaaagaaaaccaaaattatgaccgctgccgagaaaaatacgattgctttacacgaggccggtcatgccactctttcatggttcctggaacatgccaatccattaatcaaggtcaccattgttccgcgtggccgcgctttgggtgctgcgtggtatttgcccgaagaaaggcaaatcaccactaaagagcagatgttggacgaaatgtgtgctactttaggcgggcgtgctgccgaagagttattcaccggacatatctcaaccggagcaatgaacgacttggaaagagtgaccaaacaatcttacggcatgattgcatacgccggaatgagcgacaagctgccgaacttatgttattacagtaatgaagaatattctttcagcaaaccatatagcgatcgcacagccgaacttattgatgaagaagttaaacgcatgattaacgaacaatatgaccgtgccaaagcaatcttgtccgagcacaaagacggacacaacaagctagcccgccttttggttgaaaaagaagttatttttgccgaagatgtcgaacgcatatttggcaaacgcccttggacctcacgctcagaagaaattatggcagccgaagaaggtgcttctaaaaccataaaagaaactgaaaactttgatgaaaaggaaatagaagaaaaaaaagaagaagcataaataaaaaagtattgccattctatattttcaagtcaagacagacaaagaaaatatgggatggcattagtatatttacataataaaattaccatgaaaaacaatttcatgcaacgtgccattaccgggattatttttgtagctgtattaatcggctgcatactaggaggtcccgtttcattcggcatcttgtttgctatcatcagtgcagcagccattaatgaatttggcaatttaatcaacaagcaagaagacgtgcagatgaataagcgtatctgcatattaggaggcatattcttatttctatgctttttctattatggcatcaaccccgctcaaacaggtatattcgttccctatttggcactaatcatctacctaatggtaagcgagctgtatctcaagaagaaaaatccgttgaacaattgggcttacgccatgttcagccaaatttatcttgcattaccgttcgccttattaaatgtattggcattccattctgatgaaacaatcagtgtttcacaatacaatcctattcttcctctctccatctttatctttaactgggtgaatgacaccggtgcttattgtaccggaatgctcttcggaaagcaccgcctatttgaacgcatctcacccaagaagtcatgggaaggttctatcggtggcggtgtattcagcattatcgctgcttttgtcatggcttattttttcccatttatgtcaacaggagtgtgggtaggactaggattgactatcgtcgtattcggtacatggggtgacttgagtgagtcactgttcaagcgttatctgggattgaaagattccggaaacattctgccgggacatggtggaatacttgaccgttttgacagtgccatcctcgctatcccggcagcagtagtttatttatatgtggtatctctattttaattccggtaaatcgaatggagtaaatgagggggaagtctcatccgtcagaggacgttctaccgttgccatttctacaaccataaaagacagatatcccaacaagaaatcctgtcgccaaaaaactttttaagttatatttcatatactccgggattttggttcattattcccgaaacaacaaaaatatcccttaaaaagtttatttcttcaataaagacaccatctgtcgtgccgcctgccgggaagctcctgccggtcccaatatctggataatacgctcgtactcaaccatcatttgttctctatacaccttattatataaaacagactcaagttccgaacggatattcgcaacagtcattgtatcagcaaccaactcacggacaacttctttatcggcaatcagattaactaatgaaatatatttcaccttcagaatatgccggcgcaaaaatgcaataaactttccaagaggagtatgatagcacaccacctgtggaacccggaacaatgccgtttccaatgtggctgttcccgaagtcaccaacgccgcctgtgcctgccgcaacaatctataagtttgtccaaagactatcttaacaggaactttcggattcaagtatcctgaataataagaagattccatgcccggtgcaccggcaagcaccaattgataatcctttgtaaaaggtgcagccgcctccaacattttaggaagattatccttaatctcctgtttacggctgccggcaagcaaggcaattaccggcttgtcattcaaaccgttttcggctgcaaaagcaccgaaagtttccacatttcctttgcaatattcatcgaccgcatccacacacggatttcctacgtaatgaataggataacgatatcctgcaaaaaaatcgatttcaaacggaagaatggaaaacagttcatccacatcccgcttaatgttctttattctatattctttccatgcccaaatcttgggagaaatataatagtagacaggtatttgagtgttcttcttaatatactcggcgatttttaaattaaacccgggataatccaccaaaataaccacatcaggctgccatgcgacaatatcctcctgacattgtcgcatattacgaagaatggttcgcaaatgcaataatacaggtataaatcccatataagccagctctttataatgcttcaccctgcttcccccgacagcactcattttatcacctccaaagaaacggaaatctgcctgagaatcctcttgctgcaaagcacgcatcaaattggatgcatgcaagtcccctgatgcctcgcctactatcaaatagtatttcatacgtctaatttccagtttttcaagtcctttattatgctataagccgtaacatctatctgtgtaggcgtaatggcaacataaccgtgattcaatgcccaatgatcagaatcaacagcttcaggctcatgattcacaaactgccctgtcagccaataatattctccgcctctggggtgtgtgcagactttccattccttttcccaagtaccgttcgtctgacggcaaatacgtactcccttaaactcagcgacatccgggaaattcacgttcagacaaataccggccggcaaaccatgttcaagcacctcttctgttattctgcggatataaggcaataatgctgaaaaatcagcatcagccaaatgattacacaaagaatagcctatagagggaatccctttcaaacaaccttcgatcaccactcccattgtgccggagtaatgtacattcacagccgaattgtcaccatgattgattccacctatcaccacatcaggacgatggggaacaacagcatgcaaagccaacttcacacaatcaaccggagtaccactacatttatatacagtcagatcttcttcttcgcgtactttataatatctgacaagatgctcagaagtgattgagccggatgcaccggaacgcggtccgtccggagccatcacaataatctctcccaatccgcgcaatgcacgaatcaattcattcaaccctttagcattcactccgtcatcattagacaacaatatcaatggtttttctttcttcatactcattaaatctctattttttcttggagtgtaaagatacaactctttagccgaactatcccccctgagaatagaaaattatcttaatcttctacaacccaatgctaaaattgaaatagaattagcaagaaataattatctttgtcccagttgagttattaacaaaaccaatgagttatcaacagttttgctaatgtctgctgattttaataggtgtgctcatctattattagttacttcgcagcgagaaaaaactgattaatatgggaaaaattattgctttagccaatcaaaaaggtggagtaggtaaaactaccaccactatcaacctggctgcttctctagctacactagagaaaaaagtattggttattgatgctgacccacaggccaatgcatcatctggattgggcgtgaacattaaagaggtagagtgttctatctatgaatgtcttatcaacaaagccgatatacgggaagcaatttataccaccgacatcgacggactcgacattgtttcttctcacattgacctggtaggggcggaaatagaaatgctgaacctggaagaccgtgaaaagataatgaaaagagtgcttggtccaatgaaaaacgaatatgactatattctgatagattgttcgccttcattgggactcatcacaataaacgcactgacagcagcagattctgtaatcattcctgtgcagtgtgaatattttgccttggaaggcatcagcaaattgctgaacaccattaaaattataaaatcgaaactgaacccgtcactggaaatagaaggtttcttgctgactatgttcgattcacgtcttcgtctggccaaccagatttacgatgaagtgaaaagacactttcaggaactggtattcaagacgattatacagcgaaacgttaaactaagcgaagctcccagccacggcatacctgtcattctatatgatgccgactcaaccggagccaagaaccatttagcgttagcacaagaaattataacacgtaacaataagtaaacgatggcagtacagaagaaatttgctttaggacgcggacttgacgcactgatttcaaccgaagaagtaaagacctccggttcttcttctattaatgaaatagaactgagcaaaatctccgtcaacccgaatcagccgcgtcgtgaatttgacccggtagcacttcaagagttggcagactctatcgcggaaattggtattattcaacctataacgttacgtcaactaagtgaagactcttatcaaatcatagccggggagcgtcgttaccgtgcctctgtccaagccggactaaaaaccattcctgcctatatccgcacagccgatgacgaaaatgtgatggaaatggcattaattgaaaatatccagcgggaggatttgaattcattggaaatagccttggcttatcagcatttattggaacaatatgagctgacacaggaacgtctgagtgagcgtgtcggcaagaaacgtactacgatagccaactatcttcgcctgttaaaactaccggcacagattcaggtagcgttaaagaaccgcgaaatagacatgggacacgcccgcgcattgctggcattagatgaccctaaaacccaaatacgaatatttaatgaaatacagacacaggggtattcggtacgcaaagtggaagaaatagtaaaagcactgacaagcggtgaaaccatagacagcggtggcaagaaaataaagccgaaaggcagtaaactttcggaggagtatgttatcctgcaaaaccatttatgcggtttcttcggttcaaaagtacagttatcatgtacaactaaaggaaaaggcaaaatcagcattccttttaataatgaagaagatttggagcgtatcatggaaatatttgatttgctaaagaagaaagaataaagcgttattacgacattggaaaaaagaatatctacatataaactactgtctcttttgctcttgtgtctgttatggaccgggagtacggatgtttacggacaaaaagcacgtcaacgccgaatgggagtacgtgtagattcgctggctctcaaacagcaagcaatcacagacagtctggctacagatagtataacgaccgacagtttggctatactgaaccaaaaagaaatagagaagttggaagctccggtcgacaccgcactgctggcaaagaaaaacgactccatacagaacgcacttccaacggaaaagaaaagatttattcccaattcgaaccgtgctacatggttggctttgattatcccgggaggaggacagatttacaataggaaatattggaaactgcctatcgtatacggcgggtttatgggctgtgcctatgcgctgagttggaatggcaaaatgtacaaagattactcacaggcatatcttgatatcatggacgatgatcccaatacaaaaagctatgaagattttcttccgcccaatgcggatatttccggtcaggaagaacgatacaaggaaattttcagaaaaaggaaagacctatatcgccgccaacgcgacttaagtatattcgcgtttatcggtgtatacctattgtctgtgatagacgcttatgtagatgccgaactttcggattttgatatttcaaaagacttgggtctcaagattgaacctgttatttttaacgatggtcgcaataaaatcggtggtaatgcaatcggtttacaatgcagcctcaaattttaaattgcatgaaaaactttttaattggcttattcgcacttataggaacgacaggaatcagtgcacaaacacaaagtatcactgttcactcacaaacaacaggaaaagaagaagtaatcgacattcctgaaagtatgcagtcagaaatggacagcctcttttgggattggcagtcaaagaattacatcagtatgggcgagaactgtaaaatgacttcagtcaaccccattgtcagcgattctatttatatggatcgtttgtctcgtattccgtctatcatagaaatgccttacaatgaagccgttagaaaatttatagatatgtatgccagccgtctgcgcaataaagtctcttttatgctggcagcggcaaacttctatatgcctatttttgaagaagcacttgatttatatgatcttcccatggaattaaaatatcttccaatcattgaatctgcactaaatcccgtagcagtttcccggcagggagctaccggcttgtggcagttcatgttgggaacaggaaaaatatacggactgaaaaacaatagcttgatagatgaaaggcgcgatcctatcaaatcgacttgggctgccgcacgttatctaaaagatctttatgccatctatcaggactggaacctcgtattagctgcctacaattgcggtccgggtaccatcaacaaagcaatacgacgtgccggcggtgcaacagactattggactatctataattacttacctaaagaaaccagaggatatgtacctgcttttattgcagccaactatattatgacctattattgcgaacatgatatttgcccgatggaaactcagctcccatcggcaacagatactatccatatccataaagaccttcatctgcaacaagtagcagaagtctgcagcctcaacattgaccaattacgcagcctgaatccacaatataaaaaggatatcattcccggcaacagcgaattatgcgtactgcgtctgcccaacaatacagtcagtagttttattgaccgtcaggacagcatctttgcatataaggcaaacgaatatctaaaaaagaggaaagccgtagccatcaaagacaacaccggcatccgcacttcatccaaaggagctgtgtatcataaaatcaaatccggtgatacgttgggaggaattgcagccaaataccatgtttccgtcaaccaactgagacgtcttaacaatataaaaggcaataatatcagagccggaaaatcattgagaatacgctaattagtaaaaaagaacgatttaacacgatagatttaccgaaatcgcttgcataaagatgttttttgtatatttttgcattatagattatataggaggcagatatgacggatgaaaaacaacttcaggaacaagctgacgaagagatgataaaccaaggttttcaagaacttttggacagttatctcgcaaccaaacatagaaagaaggtagaaatcatcacaaaggcattcaattttgccaagcaagcccacaaaggagtaaaacgacgttcgggtgaaccttatatcatgcacccgatagcagttgccaaaattgtgtgtactgaaatcggactaggttccacctctatttgttcggccttgttacatgatgtagttgaagataccgactacacagtagaagatattgagaacctgttcggctcgaagattgcccaaatcgtagatggactaactaaaatatccggcggcatattcggtgacagagcttcggctcaagcagagaatttcaaaaaactgctgttgaccatgagtgatgacatccgtgtcatccttatcaagatagccgaccgactccataatatgcgcacattggggtcaatgttacccaacaagcaatataaaatagccggtgagaccttatatatctatgctccgcttgccaaccgtttggggcttaacaaaataaagacagaattggaagatctcagtttccgatatgaacatcccgaagaatacgctcaaattgaagcgaaactgcaagaaacacaggcggaacgtgaagaggtttttcgtgaatttacggctcctatccgtgagcgactggacaaaatgggcatcagttaccgactgatggcgcgagtcaagtctccttactccatttggaacaaaatgcagactaagcatatcacgttcgaagaaatttatgatatactcgctgtccgcattatcttcacccccaaagatcccgaagaagaactcaatgagtgctttaatatatatgtgtcggtttccaaaatttacaagccacaccccgaccgcctgcgtgattgggtaagccacccaaaatccaacggatatcaagctctacacgtcacgctgatgagcaataaagggcagtggattgaagtgcagatacgcagcgaacgtatgaacgacgttgccgaacaaggctttgctgcacattggaaatataaagaaggaggaggcagcgaagacgaaggtgaactagaaaaatggttacgtaccatcaaagaaattctagatgacccacaaccggacgctatggattttctagacaccatcaaattaaatctattcgcatccgaaatctttgtttttactccgaaaggagaaataaaaacgatgccgcaaaactgtacggcactggattttgcattctctatccatacttttctgggaagccactgcatcggtgctaaagtgaatcataaactggtacccctcagccacaagctgcaaagtggagaccaggtggaaattctgacttctaagtcacagcacgtccaaccgtcatggattaactttgctaccacagctaaggctaaagccaaaattatggccatattgaagcgtgagcaacgcggcatgcaacaaagcggagaagaaatactacgtgacttcttcaataaagaaggattggaatttactcccgacaatatacagaagctctgcactttccataacctaagaacacaggaagagttgttctccgccattggtttcaaaaccattattccaggcgataacgataaaaacgagttaaaagacaagcctgccacaagcaattggaaaaaatacatttcttttgctttcggtggcaacaagagtaataaggataagtccgaagaaaaagagccgatacaaaagattgacagtaaaaaaatcctgaagcttactcctgaagctattcaaaagaactatgtaatagccgaatgttgtaagcctattccgggagatgacgtattgggatatattgatgacaataatcgaatcatcattcacaaacgtcaatgtcctttagctaccaaactaaaaagcagctatggtaacagacttttggctgttcaatgggaaacaggcaagtctctatatttccccgtcaatctatatatcaaaggaatagaccacataggactactaaataaagtcacagaaataatttcccagcaactgaatgtaaatattcataagttgactatagaaacaaacgatggtatttttgaaggaagaatccaattgtttgtgcatgatgtagatgatgtaagaaccatctctacaaacttacggaaaatcagtgaagtgaagacagtcacacgcatcgagaaatttgaagatctacctaattaggtattgtgtataatatcatatttcgtcactgtagggaaactaaaccggcttccctacggtgtatggataataacggctgtttgataaatggcaggagtattatgtcagataatctaattcttttcgcatacttgccagttcctcgcgcacaagcaacaaacggtcgataatctccgttgtacggatagacgtatctttgcttaccttcaatttctgcttagctccctgaagtgtaagtcctttctccttcaccaaatgatacactaaacgaatattctcaatatcctctttacgatactgacgcacattcccccctgcttttttgggagtaatgaatggaaattctttctcccaaaaacgcaatagcgattcgttaacattaaacatctttgccacctcacctattgagtagtaaagctttagctctttattcggattatatgccattttatcaagaatttatttagcacacactgcaaatcataaatcagtcgaaaaccttaccatgattagcagctatctgcaccatcttatcataatcttccgcactcaaatccatgaaataataattcaccggattctgcactttacccttcacatgcacctcataatgcaaatgaggtcccgtgctctttcctgtattccccacttcgccaattacttcgccacgcaccactttctgtcccggacgaactttatatttactcagatgtgcataccaagtcacatagccgaatccatgatcgacctgaatcaaatttccataaccggtctcccaccctgcctttatcactttaccgtctccggtggcatatacgggtgtaccgatattggcagaaaagtccattccggcatgaaacttaggcgtattgtaaatagggtcgatacgtgtaccataccccgaagctgttttctttaaatccttattggataccggcataatggccggaatacactttaacatttcatcgtgtcctttacacaaatccaccacctcatcaaaagatttcgactgaatataaagttggcgattcaacatatccatcttttgagtggtattcattaccagctcggcatttgccatatccatcaactgctcataacgattcgttcctccataacctgctttacgaatcgcatccgaaacaggatcggcctgcaacaccacccgatacaagttgtcatcacgctgctggatatcctgcatcactcccagcgcctcgtccaaacgatgagacaatacattatactgcgccagcaaacgtgcattctctatacgaagttccttttcggaaggtgaaccaaaaatgaacaatagaatgataaaactgcctgcccccagacccatccccacaaacaaacggcgcaagatgcttatggcacgttgcctcactgtggggtaaatacggtcgtaagttctggttttaggattataaatatagtagactttacgcatctatttctgctttttgaagtttttaatgcacaacacatcaatattttgcacaattcttgtcgacaaaaataataaaaccaattatctttgcaaatcctttttgagaatattaactagaagactatatagcgacatgatgacagctaaagaaattagagattctttcaaaagctttttcgagtcgaaaggacaccaaatcgtcccatcggctccaatggtcattaaagatgaccccacattaatgttcaccaatgcaggtatgaaccagttcaaagacattattttgggcaaccaccctgccaagaacaaaagagtggcggactcacaaaaatgtttgcgcgtaagcggaaaacacaatgacctggaagaagttggacacgacacctatcatcacaccatgttcgaaatgctgggtaactggtctttcggagattacttcaagaaagaagctatcagttgggcatgggaatatttggtagatgtattgaaaatagatcctaaagatttgtatgctaccgtattcgaaggaagccccgaagaaggattggagcgtgataacgaagcggccggatattgggaacagttcttaccgaaagatcatattctgaatggaaacaagcacgataacttttgggaaatgggtgataccggaccttgcggcccctgttccgaaattcatatcgattcacgttcggaagaagaaaaagctcaaattcccggcaatcaactggtaaacaaggatcatccacaagtgattgaaatttggaaccttgtattcatgcagttcaaccgtaaggctgacggttcattggaaggccttcccgcaaaggtgattgataccggtatgggattcgaacgtctggtccgtacccttcagggcaagacttcaaactatgacactgatgtattccagcctatcatcaaagcaattgctgaaatggcaggcactgcttacggtcaggataaccaaaaggatatcgccatgcgggttatcgccgaccacatccgtaccattgcattctctatcaccgacggtcagttaccgagcaatgccaaggcaggttatgtgatccgccgtatcctccgccgtgccgttcgttatggttatactttcttaggtcagaaacaagcatttatgtacaagctgttgcccgtcctgattgagaacatgggcgaagcttatcccgaattaaatgctcaaaaaacactaatagaaaaagtaatcaaagaagaagaagaatcattcctacgcacattggaaaccggtatccgcctgctcgacaaaaccatggctgacacccaggcttccggaaaaaaagaaattagtggtgtggatgccttcaccttgtatgacactttcggatttccacttgacttgactgaacttattcttcgcgaaaatggcatgactgtaaacgaagaggaattcaatgcagaaatgcagaaacagaaagaacgtgcacgtaatgctgctgccgttgaaacaggtgactggattactgtaaaagaaggtgaaaccaattttgtaggttacgattttaccgaatacgaaaccagcattttgcgctaccgccaggtaaaacagaaaaaccagacactttatcagattgtattaagtgatactccgttctatgcagaaagtggtggtcaggtaggcgacacaggtgttatcgtaagcgaattcgagactatcgaaataatcgatactaagaaggaaaataatcttccgattcatattaccaaaaaattgcctgaacatatcgaggctcctatgatggcgtgtgtagacacagagaaacgtgccgcttcagcagccaaccactcttgtactcacttgctagatgaagcattgcgccaagtattgggtacgcatgtagaacagaaaggttctttggtaactcccgaatctttgcgtttcgacttctctcacttccagaaggtgacagacgaacagctccgtgaagtagaacatttggtcaataccaagattcgtgaaaatattcctttgaccgaataccgcaacctaccaatcgaaaaggctaaagaactgggagcaatcgccttgtttggtgaaaagtatggtgacgaagttcgcgttgttcagtttggcaattctatcgagttctgtggaggtacacacgtatcagccaccggcaagattggtatggtccgtatcatcagcgaaagctcggtcgctgccggagtgcgccgcatcgaagctattaccggtgccaaagtagaagagttgatggatgccgttcaagatacactgaacgacctgaaagcattgttcaacaatgctcccgacctgaaagttgctatccgtaagtatattgacgaaaacgccggtttaaagaagcaggtagacgagttcatgaaagaaaaagctgctgaagtgaaagccagattagtagctaatgccaaagaagtgaacggtgtaaaagtggtaaaagctgttatcccgatgtctgccgatatagtgaaagatattgcattccagttgaaaggtgaaattcccgccaacttgtttgtggttatcggtagtgtcgacaataacaaaccaatgctgacagtaatgattagtgatgatctggtgaaagccggacagaacgcaggcaagttggttcgcgaagctgccaagttaatccaaggcggtggcggtggtcagcctcactttgcaacagccggcggtaaaaatgccgatggcttgaatacagctgttgacaaagtcattgaattggccgcactgtaatccaataaaaatccatccatattaaatatgatgaacagtcctggtatttgactaaaaagtcaataccgggacctttttttatacaaaagaaaatccaatatttctcttgatatatgcccaaaacttactacttttgaaaatattcatttaccagcaacacaaaacattaaacaatatgatgaaaaaacagtactcacacttagtcctattcctctcactttgcaccctcaccgtttgcaacgacagtaaaaatgaagacagtatcgaccccgacccgctacctccttccatcacctatcatgtggaaggctatgccgaattaggagctttcgaccacaacagcactctaacagtatttccgctagataaaagtttggctcacatagaagaacaagcatatggcggtaaagtggaaaccgactacggccttttctctgcaagcggcaatatgaagttccaagaaagtctttacttcgaagtacaagtcaccggcaacttctttaacgggaccaagggaaggcgctcggaacacaaaaccactttgcgcgccatcaaccatgtgattaatcacgatgacgaggaacgctccatcaaccgatacataaaacttccggctaccaatgtcaatatatttacccaactgacagcagcccgcatctgcaccctgctgaaaaaagctgcgggctataacgaaatgagccacacgataaccgatatctaccggaatgcatcggaacaagccctgaaagaagtattgaccgctttcagcatcagcgatatatatgtgtccatgctcagcattgaccccactcgggcttctttcagccaatacaatgccccggcctccatgatggctgccgtttccaacatcctcttaacttccgtagacgaagaattattagatactttcttcacggaatgggacaaagatttcgctccggacggctgcattgataatgaagatatcaaagaaagcatccgcgacggacagcagagcctgaaatacaccaatgtctacaaacaattgaattctttctacaaagcatatgacttcaaatccgatttcccggaattctggaagtttgtagaccggaatggagacggcatactcgacaaacaagacaaaccggatgacttcgaaattacagaagaagaacttaccccatccaaacaacaatgcatccagctgttggagcaggttaataaatatctgcgcgacttcctgcagacggagtgcgtatgggaagccaacttctgtggtgccatcggccccattcccgactatcccactacgctggttcccacagacagcgaagtgtacgaaatatggactgccgcctacgctactatccgtcaatgcaattatataattcatatattgacaaacaaaacctatgattatgacgtgaaaccatacgtgggaactgcctataccattcagtcgctgatatatcaaagtctcacgcaattgtttggagacgtgccatacgtcactcccgacaatttcaatgatatcgattacggcaaccatgtaacacgcaccccggtcaaatttatctatgccaagcaattggaagctttggaaaaatatgcagacgcactgccaccggatgccgcacaaaccaagccggagagccatccggtttcctttgtcgccgcccaactgctcatggcaaccatgtatgcggagataaaggactacaccaacgcatccaagcattttgcaaaaatagacagcaatacatacctcagtgcttatctgtggaaaatcagcaataacgaatctccgatgcttgacaagccgctttacaagaaatactttgaaggaccttatcatctcatctatcgcattgccaaccaaaacgcattgcgggtggaactattactggcaaacaatcaggtggcaaaggcttccgatgccatgaagaagctggacagagaatggaaaggcagtgataaagccgatgaaataagagcgcgtctgctggaaaaaggagtcaatataatggggcagactttcggatgcttctctttcctcaagcgcatgggagcagccaaagaactactgaacataaaagattatcagctcctgttgccgttgccttcattaataatagccgagacacccggcattacgcaaaatacgggatattgataaattcataaatgttgataatgacggggaggcttttcaccagtctggtgttattgtcattctgaatgaaatgaagaatccggaagcataaagtagatgtaaccaggtccttcacttcgttcccttccctattccatctgctccttcggccagttcaccagataaagggtttcggtggcacgggtaaaggctgtgtaaagccaacgaaaataatcgggcgtcaacatatcctccgtcatatacccttggtcgaggaagacacgtttccactgtccgccttgcgctttatggcatgtcaccgcataagcatatttcacttgcagggcattgtaatgagggtcagccttcatcttcttcatccgctcccgcttgacggtgatatcggcataatcctccagcaccgcatagaaaagcttgtcgttctgttctttaggcaacgccggagtatcggtatggagagtatcgagcaatagcttaacctccaattccacatcaccataatcaggaaacgccaacacaacatctgcaaaacgaaaaccgtatgcttcacgcacccgacgtacccgacgcactacggcaatatcgccattcgcaataaagtctatctccttgcactgctccgtccagaaataattattctttgccaccatcaataaatcaccactgttcaattcatcctcacgatagagaatcatgttacgaatccccctgttataaatattagcccgcttattagagcgacataccacaatggtttcgtccatcccagcatggtcataactgtcattgatagcctctatcagttcattccccggaataatacgaatatccgggaagccatcgacacggatggaaggaagcgcaaagaacacttcttccgaaatataacgacgtaactccgtggcattccacaaaatacctgaatcgtgcatctggcgaaccacctcagtgagttgcgcttcatacacctccaaaccataacctttcaacacatccggagaaagcgccggactttgttcttcgcccaccggaggaagctgtgccgtatcgccaatcagcatcaacctgcaccctgtaccggcatatacatattggataaggtcgtccaaaagacgtcccgttccgaaagctgcccccgacaaaccatcattagctatcatcgacgcctcatcgacaatgaacaaagtttgctgatgcagattgtcatccaaagagaagttgtccatgtcattagaatagttgcgctgacggtaaatcttcttatgaatcgtgaaagcagaatgtttagcataatgtgaaaatacttttgcggctctaccggtgggagccagcaaaacacacttctgttgcaactgatccaaagtcttgaccaatgccccgatgagagacgtctttccggttccggcatacccttttaaaagaaaaaccgaatcctgttggcgggaaaaaagaaaatctgctaaagatttaacagctttttcttgttctaaagttggtttatatagaaaatttcccttaatttgctgcactaaataattattaatcataattgcgtaataaaaagttctccgaactgtgcgttattagatttatttattttatttttgcgatgcgaatataaactaaaaaaaacacatatttatcatgaaaacagttattaatattgtattggctgcctgcgttatcggtttaatctatgtatgctatggtagcatcgtgggaccgatcaactttgacaacactaaaaaagctagagaaaaacaagttattgcccgcttgatcgacatccgtaaagcacagttggaataccgtaatttacatgcaggcgcatatactgccagctttgatactttgattgattttgttaaaacagcaaaacttccattcgtaaagaaagaaggagttttatctgatgctcaattggaagccggtatgactgaaaagaaagctatggctattatcaacaaggcaaagaaaacaggtaactggaaagaagtagaaaaagaaggtttgatgaacttcaaacgtgatacgatgtgggtggctgtaaccgacactatttatggtgcaggcttcaacgcagactctatgagatatgtacctttcggaaacggtgcacaatttgaaatggctatccgcaacgatactaccaaatcaggtgctcctttgcacttattccaggcacaaactccatatgaaacatatctaagcggtttgaatgcacaggaattggctaacttgaaagaccttcagagcaaacttggcaaatactgcggtttgagagttggtgatatcgaacagcctaacaacaacgcaggtaactgggaataagaatgactgaacgtatcgattttaccaaatcggaacaatatacattatccatccgcctcagtgcggatggattttctttttctatctacaatccgttgggagagaacagcttctgtttcgactcttatacggtcaatgcttcctgttccatgactgccaatatcaaagagatgctaacaagtacagaagcattaaagtatccttataaacggataaacattttggtagactctccccgattcactcctgttccttttgatttattcgaagacgaacagatagatacattattttatcataattttccaaaggttaataatgagattgtgctatgcaatgtattgggcaaaagcaatgtagtgattctgtttgccatggacaaacatgcccatcaattgttgacagaacacttccccaccgcacgtttcttctcaacggtcagtccgctgacagaatactttgcgcaaaaaagcagattgggcaatagtaaaaagctctacgctcacgtccgcaaacatttggtagaagtatactgctatgacaaaagcaaactattattaataaactcatttccttgcaaacaaacagccgactgtatatattacctattatacatatggcaacagttgggctacaatcaagaaaaagatgaattgcaactgaccggaaaatttaaagacaaagaaggattgttgaccggactgcgcaagtatctgcgccaagtatttatcattaatccgaaagctgagttcaaccgttctgagataagcaaaattgaagatataccttttgatatgcaaactctaattttatgcgagtaattagtggaatatacaaacgacgccgatttgacgtgcccaacagtttcaaagcacgccctacaacagacttcgcaaaagagaatctgtttaacgtactaagtaataactatttcgactttgaagatggagtaactgcacttgatcttttcgccgggacaggaagtatcagcatcgagttagtctctcgcggttgcgacaaagtaatctcggtagaaaaagaccctcaacacctgtctttcatttctcaagtcatgcgtgaagtaaaaaccgataagtgttttcctgtccgtgcagatgcctttaagttcatagagaaatgcagtgaacaatttgacttcatctttgccgatcccccctatgcattaaaagacttgcaaagtattcccagccatattttcgaaaacggtctgctaaaggaaaacggcttgttggtattggaacacggaaaagatcaaaactttgaggatgatcctcatttcattgaacgccgcatatacggcagcgtcaatttctccttttttagagcaacggtgccagaagccgaatagtagattcttgtaccttttgataccacggacgctttatccattgttttctctgcaataggaaggcgtccttttggtctttcaagaaaatctctttcagaattagtgcagagatacgatcatacataaaagcattgacctcaaagttatgttcaaagcttcggaagtccatattggtagagccaactgtagaaagagtatcgtcactcactatcaatttggaatgaaggaaacccttctgatagagatatatcttcacaccggcacgcatcatatcgtccaaataagaaagagaagccaaatgagtcaagcgcgtatcagcacgctccggtatcatgatgcgaatgtccacaccggcaagggcagccgttttcagagccatcaatataggttcggtaggcagcagataaggagtctggatataaaaatatttgcgtgaactgctgatggctatcaacaatccctgcataatgtcccgccactcccctaccggatcggaagtcacaatctgcatcaaagcattgccataactatccatctcgggaaaatagcgggaagaagtaatcagggtacgatccaccacataccagtctgtcaaaaaagccgtttgcaacccatacacagctttcccctctatcttaatatgtgtatcacgccaaatcccccattgaaaccccttcatgtaacgcaaagcaatgttcattcctcccgtaaaggcaactttcccgtcaatcaccactatcttacggtgattacgataattcaccttgctcgtaaaaacagggaagcgaaccttcagaaaaccacgtgcctcaataccggcacctctcatctcatcataaaagagatgaggaactttccagcagcctacatcatcatacaacagacggatttcaactccttcacgagccttatcaatcaataaatcacgcaacaacctgcccacagggtcatcttcgaatatatagaactctaaatgaatatgatgcttcgccttactgattgctttcatcaatgattgcagcatagacaacccgtctgtatagacctccgttttgttaccttcaaagggcaaggcattattcacatttctgaagaagtgcatcaattggtgctgatcttcaggacatttaaaagctttctgagcctgatattctgccatcggacgcttaatcagacgggtaaaccctttacggccaatcagcttttccttacgtgtgctccgaccaaaaaagaaatagaagataagtccgacaatcggaaggaaaaaaagcacaagtacccacgccattgttttaaccggattacgattatcaagcaccactatcataatagtgccaataataatcaagaagtaaagcaggttaaaagcaacagtaaatatttcattaaatatgctccattctatcataactctaatttacacgtcagcaaacatataaaaaaaatcccaacctataacaatatagattgggaaaagattcttccatgcttattttagaatgggcgtcctctatgtccgccgggaccaaatcccggacctccgaagcctcgtctgctgttcatcattttatcgcgtgcccccttacttccaaagatattcaaacgataaataaaatgaagcatacagtagctattgatactattgtattctgtaaccgaacgcatatcggcagacaatgaacggctgatattgctctgttgtttcaaaatgtcatacatttcaaaactaatagttgcagcccctttaagcaagttttgtgctatctgagcgttccatatcaactcattattattataactggcatcattatatcctcttcttgactgattagtgatattggtggacaaagtcatttgccagggaagagtgacattagtacttgctccataagaaaatgtataagggttctgattgttttccgggcgtaatttgctgcgctctgccgtatattcgatagaaccgttcaaagaaaattcaaaccagtcgttacgatacgaaccgttcagattctctgccagagttaaaccggtagtcgtgttcttgtcatccatttttgtatccttattataaagataagccacctgattctggtaattagcacgtgcaaaagagttgatagtgaatttcttgttcttcagcgcggtattgaagccgaacataccgaaagcattccagttaccattaatgttctgcggagtaacaatggtccgaccggtttccatatcatactgcgtactgttactgatactgttctgcgtagcggtaaacatcaagtgtgccaccattccacgttgtctttcagcattatatgtattataaaatgcgcgcatggtatgtgcaaacgaaggtttcaagccggggttaccgacacggatattcagcggatttgagttatcaacaatcggcaacaagttttccatactcggctgactgctgcgtccgcgataagtgatacgcaactgactcactttagagaaacgatagcggaagtccagattcggagcaaaattaaagaccgtacgagtggtatctaccatatacgctccttttttataagaaagtttggtattctgcggctgcaaagacattcccacactcatctgatacttttcgcggatgaaacgcaaacccaaagaaacatcatggttaaagtatttatactcggcatccttgcttaaactatccacatacgcagcttcatacccttcgggcagtccgtcaccgatttcccaaggaaaaccttgcaaatcataagtagacttatcgctcgtagtatttttgtattgaaaccgataactgaactgcagaaaagtagcccgagcaatcggttcgctatacgtcaactgtgccgtatagttgtaattcttggtcggcatcgttatatattgattacgatattggatagagtctcctcccaaataattatgtatttgataataacgagtctccgactgggtatattgatcattgtcgttatcgccataaccaaacgacccccggaaagtgatgttacgtcctttattgttcagcttgcggttcacctgtaaagtcgcattggcagacagactcttagtatccgacaagccatgttcattggtcgcattgacgcgaatgtcgcgtaacggatcactgccatccatatcattaaaattaagataatcgtttggattggcaatataattataagggtcatcattgaaagtacctgattctttcattgtagccccatcggtcttattataagagacgttaggacgaaagatgatattcgtcattgaatcgggtttccattccatacggaaatccgcattaaaatcacttactttgttacgattgtttgaattcgtgtttgaataagaattgccgctctgcaagaaacgttgagaataaccgctgctgatgatatctgcatcacgatagttatagcgcatactaccccccaattccaatttggacgtttccgtagcaaagtttgcgcccaacatttttgtggcattcagcccgttattacgtctccagcgagggccgccgcctccacccgaaaatccttggtcgttcacattattggcagaaccgataatagaaaattgagttttatcataaaaacggtttatcatagcacgtcccatatagcggtcttcggtacctcctgccaaatcgacatttccaaaccaaccctggttcattcccttcttgacagtcaagtccagtaccgtttcctcttcaccatcatcaataccggtaatacgtgccaaatcagatttcttatcatatgtcttcaatttatcaaccatatcgacaggcaagttcttcaatccggtcttcacatcaccgccaaagaactccttaccatccaccatgattttcttcacctccttaccattgattttgatatttccatcttcatcaacctcggctccgggcagtttcttcaccaattcttccagcatagctccttcgggagttcgatatgcggatgcattatacccgattgtatcttccgaaatggtaacttgaggagcctcagccaccacaatcgcctcacccaacataatatcatctgtgggcaaagtcaccgtgcctacattaacagaaggcttgccggcagtcaattgcaacggcttctcctgagtcagataaccgacaaaggaaatcttcaaaacatattttccggggcgagccgccacagagaagacaccattattattggtaacatttcctactgccattgtactatccggcaaagaaagtaactgtacggtagcctgtgctatcggactcttgtcatctccatcaactacagttccgcttaccgtgacccgtttgctgccctgggcccaagagagagttgtaccggtacacaccagtagcaacaaaagtatcaatttcttcatctttctattttcctaatgagatttaatgcctaatgtcctttggacacttccacactcaaaaggtttaacggaaaagaagattattttttaaaaagcttgtctaccttactcttttgaatgccaaactccagacaaagtacattgaaagccatataaacaatagcaatagaattatcggcttcttcaaggtttccatcataaactcccctgacaagcatcactatataataaatgcctaaaagataaatggcataacaaatggccttaacacggattttagctgtttcctcattctcgtttttcacctttgccagaaatatcatgaaaagagaaaaccagataagtaacttcacagaagctttggtaaacaacaagttactgtcgtttatcattccaaacataaacatcatcaatggcaggaacacacacaggattaaaagagtatatcccatggttctgcaataagtgggtagaattcctttcattattttagcatttaacgtacaaaagtaattatttgcaagcaaactacgcctatctttttgcttttttacctaaatttgcaggcaaatataaaagttatgagtaaacaaaaggttattatctgccacagtataaacgagaatttagctgatgccatcagccaatgcacgtatgacaaattattcattctggttgacgagcatacccgcaaactctgcataccgctcattcaagaagccggcttcatgaaagatgcgcaactgatttgcatcggcgcagaagatgtccataagaacctcgacaccttggcctatgtgtggaaacaattaggcgaccgaggagctacacgccattcactgcttgtcaacctgggcggaggaatggtgactgatttgggtggttttgcagcctcaacattcaagcgcggcattaaatatatcaatgtccccaccactttacttgccatggtagatgcctccgtgggaggaaaaaccggcattaatttcaatgggttaaaaaatgaaatcggtgtcttctctccggctgaatctgtactgatagacagtgaattcttaaagtcattggatttacacaatctgctttccggttatgcagaaatgttgaaacacggacttatcagcaccccggaacattgggctgaattattgaatttcgacttcaacaaaacagattataaagcattgcaaaaactggttgccaaatccgttcaaatcaaagagaagattgtcgaatgcgatccatatgaaaccggaatacgcaaggctttgaatttgggacatacagtggggcatgcttttgaaagttttgctttggaaatcaatcatccggtattacacggctatgctgttgcctggggaatggtctgcgaactatatttctcgcacgtcaagacaggttttcccaaagacaagttgcgccagaccctccaattcatcaaagagcattatggcaaactggacttcgactgcaaacattatgaccgactttatgagttcatgacacatgacaagaagaatattgccgacagaatcaactttactttattgtccgacgtgggcgacattcaaatcaaccagtcggccacaaaggaagaaatcatggatatgctcgatttttaccgtgaatccatgtaatcaagtatgatttaaagctaaacaataactaactgatacataggattcaataaaacaaaatgctttttattctaaaaaaaagtgccgaaagatttgctattttaaaagaaagccgtacctttgcactcgcaattcggggtgtagctcagcccggttagagtacgcgtctggggggcgtgtggtcgctggttcgaatccagtcaccccgactggtaaatatcaaggagttaagtcaatgacttagctccttttcatttatagcaattactttttgttacactttgggggcactttcggataacttaggggacattcggctcagtttgaaaacttgggggaattagt

SEQ ID NO: 6669 - DNA, 20713 bp, Unknown
  gut microbiota DNA sequence
agagaagttaagccttgtcacgccgatggtactgcgtaacagtgggagagtaggtagccgccgttttaatggaagcctccgagtcagtcaaatgattcggaggctttttttgtttatactgatttggttatactctgctcaactgtataactattaagatatgctcttttgcttacaagatactttactctattatatccgataaattgttactctatatgtaggttaaataaaaaatcgtagtttgtatagtgaaaaaactttcattttattttgtgatttaaaaataatccctacctttgcatcgatttaaacaataaaagacagtatatgaaccaaatgtttatacatattttgctatgcggcattattattctactggcaaagtcagcgggaagtgagtgtcgtgcataaatgtatgtataaaaatgatatacgaaagcctttctcacttccttgtgtgaaaggcttttttaatgattataattaaaataaaagtataaaattgaaagctatgggcgatagattatttattttcgacaccactcttcgtgatggtgagcaggttccgggatgtcagttaaatacagtagaaaagattcaggtagctaaacaacttgaagctttgggagtagatgttatagaagcaggatttcctatttcaagtccgggggattttaattctgtgattgaaatatctaaagctgtaacttggccgactatctgtgctttgactcgtgcggtagagaaagatattgatgtggctgcagatgcattgagatttgctaagcataaacgtatccataccggtattggtacttctgattcgcatattaaatataaattcaattctactcgtgaagaaattatagaacgtgcggtagcagccgtgaaatatgcccgccgttttgtagatgatgtggagttctatgcagaagatgcaggaagaactgataatgagtatttggcacgcgtagttgaagcggtgatcaaggccggtgctacggtagtgaatattcctgatactacaggatattgtttacccgaagaatatggtgcgaaaattaaatatttggtagatcatgtggatggtattgataaagcaattatttctactcattgccataatgacttgggtatggcgacagctaatactattaatggagtcttgaacggagcgcgtcaagtagaagtgacaatcaatggtattggtgagcgtgccggcaatacttctttggaagaagtggcaatgattattaaatgccataatgacattcatattcaaactaatattaatactcaaaaaatttatccgacgagccgtatggtatctagtcttatgaatatgccggttcagcctaataaagctattgtaggtcgtaatgcttttgcacattcgtcaggtatccatcaggatggtgtgttgaagaatgtacagacttatgaaatcattgatcccaaggatgtgggtattgatgataatgctatcgtgctgacagctcgtagtggacgtgcggcattgaaacatcgtcttcatgttttaggtgtggaattggaacaggataaattggataatgtatatgaagatttcttgaagctagccgataagaagaaagatatcaccgatgatgacattcttgtattggcaggagccgacagaagtgtcaataatcatattaaattagattatctgcaagtgacgagtggcgttggtgttcgttccgttgccagtcttgggctgaatatagcaggcgagcattttgaagctgctgccagtggtaatggtcctgtagatgccgctattactgcattgaaaaagattattgaccgccacatggtattgaaagaatttactattcaggctatcagtaaaggtagtgatgatatgggtaaagtacacatgcaggtagaatatgacggacagatgtattacggctttggagcgaatacagacatcattgctgcatcagtagaagcatatatcgattgtatcaataagtttaaaagataataatacgtaaatacaaaaatggctaacacattatttgataagatttgggatgcccatgtagtacagaaagtggaggatgggcccactcagctttatattgacagactttattgtcatgaggtaactagtccgcaggctttttcaggattgcgtgcacgtggaataaaagtatttcgtcctgaccatatttattgtatgccggatcataataccccgactcatgatcaggataaaccaattgaagatcctgtttctaagactcaggtagatacattggccaagaatgctgctgattttggcttggcacatttcgggatgatggataagagaaatggtattattcatgtcgtaggtcctgagaggggattaactttgccgggtatgactattgtttgtggtgattcgcatacttctactcacggagcaatgggagctgttgcttttgggataggcacaagcgaggttgaaatggttttggcttcgcaatgtattcttcagtctcgtcctaaaacgatgcgtattactgtagatggagaattgggcagaggagtaactgccaaagatgttgctctttatatgatgtcgaagatgacaaccagtggcgctaccggatactttgtggaatatgccggttctgcagttcgtaatctgaccatggaaggacgtttgactttatgtaatttaagtattgagatgggggcccgtgggggtatggttgctcctgatgaagtgacttttgaatatatcaaaggtagagaatatgctccaaaaggtgtagagtgggacagagccatggcttattggaagaccttgaagagtgatgaaaatgccgtatttgataaagaggtaagatttgacgctgctgatatccaacctatgattacttatggtactaatccgggtatgggtatgggaataactgagcatattcctgctgataatcatagcgcttcttataaaaaatcattggactatatgggattccaacccggagaatcattattgggtaagaaaattgattatgtattcttaggagcttgtaccaatggtcgtatagaggatttccgtgcttttgcttccatagtgaaaggaaagaagaaggcagacaacgtgattgcttggctggttccgggttcgtggatggtagatgcgcagattcgagaggaaggattggataaagtgttggaagaagccgggttcgctattcgtcagccgggttgttctgcttgtttggctatgaatgatgataagattcctgccggtaaatattctgtgtcgactagtaatcgtaattttgaggggcgtcagggaccgggggcacgcactctgctcgccagtccgttggtagcagcagcagcagcagtaaccggagttattaccgatccgagagaattaatgtaaatgagtccttttgtcaggacaaaaaaatattgtcataaacagatgaaaactttaggagctattataagaatgtgctatggcattggttggctattatgcattgtcgctctcttttttccggaagggaatgtgtttcgcgaattggcaatctatatacttctgacagtttcggtttttaattggtataaagaatacaagtctaaaaaaaaagagtgaatatgaaacagaaattcaatataataacaagtacttgtgtccctcttcctctggaaaatgtggatacagaccaaatcatccctgcccgttttttaaaggcaaccacacgcgaagagaaattctttggtgataatttattccgtgattggcgttataatcctgacggttctttaaataaagatttcgtattgaataaccccatttatgggggggaaatccttgtgaccggaaaaaattttggttcgggatctagccgtgaacatgctgcatgggcaattgcgggatatggctttcgtgtggtcgtttctagcttctttgctgatatccataagaataacgagctgaataactttgttttgccggtagtggtaagtgaaggttttttgaaagaactgttcgactctatctacgcggacccgaaaacagaagtagaggtaaacttgcccgaacagacaataaccaacaaagcaacaggaaagagtgaatctttcgagattaacggctataaaaagcattgcctgatgaatggtttggatgatatcgactttttgctgactaataaagataaaatagaagcatgggagaacgcgtcaagatagaaatcatggatacaacccttcgtgatggtgagcagaccagcggagtgtcattcgtaccccatgaaaaattgatgattgcccgtttgctgttggaagatttaaaggtagacagggtggaggttgcctcggcccgtgtatcggatggtgagtttgaagctgtgaaaatgatatgcgactgggccgcacggcgcaacctgcttcataaggtagaagtgcttggctttgtggatgggcacacttcagtggattggatacaaagtaccggttgccgggtaataaacttgctttgcaaaggctcgttgaaacattgtactcaccaactgaaaaaaacgccggaagaacataccgaagatataattaatgtagtgcattatgccgatgaattggatattgccgttaatgtttatttggaagattggagtaacggtatgaaggattctcccgaatatgtattccaattgatggacggtctgaaagccactagcatcaaacgctatatgttgcctgatactttgggaattttaaaccctttgcaggttatcgagtatatgcggaaaatgaaaaaacattatcccgatatgcatttcgatttccatgcacacaatgactatgaccttgccgtgagcaatgtgctggctgctgtactcagcggagtgaaaggacttcataccaccatcaatggattgggagaacgagccggtaatgcaccacttgctagtgttcaggctattctaaaagaccattttagtgcgctgacgaacattgacgaaagccgattgaatgatgtaagtcgtgtggtcgagtcttattcgggcattgtaattccggccaataagccgattgtgggcgaaaatgtatttactcaggtagcaggagttcatgccgatggagacaacaagaataatctttattgcaatgacctgttgccggaacgatttggccgcaaacgtgaatatgcattgggtaaaacaagcggtaaggcgaatattcgtaaaaacttagaggatcttggactagaactcgatgaagactctatgcgcaaagtaacggaacgcatcatcgagttgggtgataagaaagaattggtcactcaggaagacttgccttatattgtttccgatgtattgaaacatggtgtggtaagtgaaaaggtgaagctgaagagttacattgtgacacttgctcatggtttgaagccgatggctactgtacggatggaaatcaatggaaaggaattcgaggaaaattccaatggtgacggtcaatacgatgcctttgtacgtgcattgcgaaaaatatataaagtgacattgggacgtaagtttccgatgctgactaattatgcggtaactattcctcccggtggacgtaccgatgcttttgtgcagactgtgataacctggagctttgaagataaagtcttccgtaccagagggttggatgcagaccagacggaagctgcaattaaagctaccctgaagatgttgaatatcatagagagtgagtatgaaaacatcgattaaggcattgtcggaggagaaacagataaaaatgaagtaaataaataaaagaaaagatggattttaaaattgcagtattagccggtgacggtatcggaccggagatttcagtacaaggcgttgatgtgatgaatgccgtttgtgagaagttcggacacaaggtaagttataaatatgcgatctgtggtgcagatgcgatagacaaggtgggcgatccgtttcccgaagcgacttatgaaatttgcaaggatgcggatgccgtattgttctcggctgtaggtgaccctaagtttgataataacccaacggcaaaggtacgcccggagcaagggttgttggctatgcggaagaaattgggattgtttgctaacatccgtccggtacaaacctttaaatgtttggttcataaatcgccattgcgtgcagagctggtagaaaatgcagattttatctgtatccgtgagttgaccggtggaatgtatttcggagagaaatatcaggacaatgataaggcatacgatacaaatatgtatactcgtcccgagatagaacgtatcctgaaagtcggattcgaatatgccatgaagcgccgcaagcatttgacagtagtcgataaggcaaatgtattggcttcttcccgcttatggagacaaatagcacaggaaatggctcctcaatatccggaagtaactacggactatatgtttgtagacaatgcggcaatgaaaatgattcaggacccatgtttctttgatgtgatggtaacagaaaatactttcggtgatattcttactgatgaaggctctgttattagcggttccatgggattgctgccttctgcttcaaccggtgagagtactcctgtttttgagccgattcatggttcatggcctcaggctaaaggcttgaatattgctaacccgctggctcaaattttatcagtagcgatgttgtttgagtatttcaattgcaaagaagaaggtgcattaattcgccgggcggtagatgcttctttggatgcaaatgtgcggacacccgaaattcaggtagaaggaggtgctaaatacggaacaaaagaagttggtgcttggattgtggactatatcaagcaggcgtaatccggttttatgctgatgagataagtttttcatgctgttgaaacaacagtttcatattaatgaaataacaattttgcaggcatgaaaataggtgaaacagaatacaaaagtataaggttgcggtggaaaaaaacgaaccttatacttttttttatttaactaaaggaatcatttcgcagattgccgtacttttgcaacaaaatctattatagatgaaacgaatactgtgttattttcttttcttttgtgtttgcatttatatgcaggcacagacgtatgatcaattggcagctcgtgctgtggaggcggcggagcgagatagtttggaactttcggaaaaactgtttgaagaggcattaaagctggaaccggcaaatatgcgcaattctatgctgttttcaaatttggggacagtgcaacatcggttgggaaaaatcgataaagcgatagaatcctatactttaggacttaatttagctccttattccgttactattttattgaatagggctgctctgtatttagagaaaaacctttatgagaaagcatatctcgattattgcaatgtgatagatattgatagaaaaaatcaggaagctttactatatcgcgcttacatttatatgcagcgtcgggactataaagaagcccgaatagattataatactttgttgcaagaagagcctaaaaacaagatggggcgtttgggaatggctctgctgaatcagaaagagttaaagtttcgggaagcattggaagaatttaatcgtatgataacggattatcctaatgatgcttctttattgaaagcacgtgccaatttagagatagaaatgaacactcccgacttggcattactggatttggaatcggcagccaagttatctcctaaagatgcggaaatatacgtcatgtgtggtgaaatatatctgagccagaagaaaaaaagggaagcttatgttgcttttgaaaaagcaatagaattaggcgttccccgtccagaactgcaagataaattaaaggccagtaaataatatctggtctttaattctttatttcccaatcttctttttgatcagttcgacaaattcttttccatatttatcttttttgtattctccgataccactgatttctccaaaagcctcaatactggtaggttgctgtgttgctatcagatgtaaggttttatcagataatacaatataggcagggatggcttgttggtctgccaatctctttcttaatagacgaagttcttcaaatagatccttattttcttcaccgaaggttgttggcgtagagaagagggcttccggttcttgagcctttttcctgcgacgttctttcggagtgaattcttcccgttttatgacaaccagcatcgccggttcttttccgaataggactttatgcccgctttctgttattttcagatggttgttttcattatatgcaatttcaaaataacccaagttaagcatttgtagcaaataatcctgccagtcacgggcagggatatctcgtccggcagcataagtcttcagcttgtcgtatcctttttctatcaattcttgtccggcagctccctttaggatgtccaccagcatgtgtgtaccgatttgttgattggtgcgtgcgatagcgctcaatgctttttggacgatgatagtaccgtcaaatctttccgggggattacggcatacatcacaattaccacaatcatgatccatcgtttctccgaaatagttaagaagaatacgccgacggcaaatatccgcttctgcatattgttgcatacggtggagtttctctaaatttatttcctgttgattgctttcggtagcaaactttgatagcagaatcaaatcacttaaagaataaaaaagtaatgtatcgctttccattccgtcccgtcctgcacgaccgatttcctgataaaagctttcaatgcttttggggaggttgtagtggatgacccagcgaacatttgatttgtctatgcccataccaaaggcaatggtggcacatactacttgtacgcggtcattaataaagttattttgggcttcatcgcgtgcagtcgcactcagtccggcgtgataaacagctacgcgtattccatgttttcttagcatttctgccacgttttccgttttgcttcggctcatgcaataaataattccacattcatttttatggcgtgctataaattcaagtatggtgcgcgtcttgtctttttgctggtatcctctttttacttccaaactcagattaggacggtcgaaggatgaaataaatattttaggattacgtaaagataattgtttgataatatcttgacgggttattttatcggctgtggcagttaaagctacgattggaacgttagggaattgttctctgattgtcttgagttgagtgtattctggtcggaaatcatgtccccattgtgagatacaatgagcttcatctatggcaaccaatgaaatgtggatatcttttaataagaagttcatttccattagtaatcgttcgggggaaatataaagtaatttgattttcccttgcatacattcccggcgtaggttgaaattctccgtttcgtcatttgtgctgttcattgcacgagccgcaataccattggctctcaaactttctacctggtctttcattaatgaaataagcggagatacgacaatggtcgttccgtccatcatcagagcaggaagttgataacaaattgattttccacctccggtgggcataagaaccaaggtgtcttttttatccagtatgttttggataatgttttgttgcaaaggacgaaacgtatcgtatccgaagtatgttttgaggatatggagcatattctgtttattattttaaaagataatggagagcaaaggtagtaaaatctttaagatgtgatgctctctatattggtaattaatttgagagaggactttttgtagataactgattcaggatgacactgcttcatttgatagttttttgtctgatatctcaagtcttaataaagttttttgaagaaatttgaatgctgtgttgtgattaattaagaatagaatttagcaaaaaaatttgcataagccaaaaagaatccccacatttgtacaaaatttaatcattataatcttattaactaaccaaacaaaaaaactaagtgatgagcgacgcagaaaaacaagtagaagttcaggaagaggctcctaagaaaagaccttataacctgcgagagaaaaaagacaaaaaggctgcttatagatcattgatcagagcagaacttgctgatgaactgtatgataaaattttgaatatcatcgtggttcagaagaaatataaggatcccaattattctgctaaagatttagcgagagagttgaagacaaacactcgttatttgtctgctgttgtaaattctcgtttcggtaaaaattattcttgtcttttgaatgagtatcgtatcaaggatgctaagcatctgttggttgataaacgttatgcagataagaatgtagaagaaattagttcgatggtaggttttgctaatcgtcagtctttctatgcagcattttataaaaatgtaggagaaactcctaatggtttccgtaagagaaatatggaaaaataaaatattagtatcaaatatgatttagtaaaaaaggaaaacaatagttttcctttttttgtttcaacatgaaactgacatggcgctattggaaaaacacttatttatgatattggtaagagagattatgttagcaagttgcaagtagtatggagaaagaaataaaagaagagaaaacgtttgattacacagtagagcagtttgcggatttgcaattgcttcgttatgtagtacatggttttgaggacctgtcgttggagcaaaaagaattggtttattatttatcacaggcagctttggaaggtcgtgatattttgtttgaccaaaatggaaaatataatttggttatccgtaggatgcttgaaacagtatatacggattatcagggaaaccgtgcggatgcagattttgtcaatctggagatttatttgaaacgggtatggttttcaaatggcattcatcatcattatgcctcagacaagtttgttccggcgtttactcccgaatttttcagaacggcattgaaaaatgtcgatgctgctaaattgcctttggcggatggcgagacggtagatacgctttgtgatagaatctttccggttatctttgatcctaaggttatgtctaaacgcgtaaatcaggctgacggggaagacctggtattgacttcggctgcgaattattatgatggggtaacccagcaagaagcggaagagttttataatgctctgaaaaatccggctgatgaccagcctgtcatgtttggaatgaatagtcgtttggtaaaagaaaacggacaagtgcaggagaaagtatggaaatcaggcggattgtatggggcggccatcgataaaataatttgttggttggagaaggctttcgaagtggcagaaaatgaagtgcagagggctgtgattgaaaagcttatccgtttttataaggagggagatttacatacgtttgatgaatattctatcctttgggtaaaggatttggattcccgtgttgattttgtcaatgggtttatagaaagctatggtgacccgttggggatgaaagcaagttgggaatccattgtcaattttaaggatttggaagcaaccaaacgtacggagacaatcagtgccaatgcgcaatggtttgaagaacactcaccggtaaacccatcttttaaaaagaagaaagtgaaaggcgtatctgcaaaagtcataacggcagcaatgctgggaggtgatttatatccggcaacagctatcggcatcaatctgcctaactcgaattggattcgtagtgttcacggatcgaaatccgtaactattggcaatttgacagatgcttataataaggctgctcatggtaacggttttatggatgagtttgtatatggtgcggaagaaaaagaatggatagacaagtacgcggatttgacgggcgaccttcataccgatttgcatgaatgtttggggcatggttcgggacaattgttgcccggcatagatcaagatgctttgaaagcatatggttctaccatcgaagaagcgcgtgccgacttgttcggcctttattatttgcccgatcaaaagatgatagaacttggtctgactccgaatgaagatgcatttaaggctgagtattatatatatatgatgaatggattgatgactcagcttgtccgcattgagtatggtcattcggtggaagaggcacacatgcgcaatcgtcagttgatagctaagtgggcttatgaaaaaggagcctccgaaaaagttgttgaactggtgaagaaagaggagaaaacttatgtgaaaatcaatgattataaaaaactgcgtgatctgttcggtactctgttagccgaaatacaacgtatcaagagcgaaggagattatgaggcagcccgtcaactggtagagaaatatgccgtgaaggttgacccgcaactgcatgcagaagtcctgtcgcgctatgaaaagttgcatttggctccatacaaaggatttatcaatcctgtatacgaggccgtgaccgatgaaaaaggtcgtataatcgatgtgaaggtttcttatcaagagggttatgccgagcaaatgttgcgatatagccgagagtattcaaatctaccttatctaaatgaataaaaaaggaaaactatggatgtacatgaaataataaaagatatcaagggacaatttcgtttgtttatgaatggagttgtttctcaaagtatgcgtgaaaaaggactggattataaattgaattttggtattgaactcccgcgcctgaaagaaatagctgcccgttatgagaagaaccatgatgtggctcaggcattgtggaaagagaacatacgcgaatgtaaaatactggccggcatgttgcagcctgtggaaaccttttatcccgaaattgcagatatttgggtagaagatatgcgttatcccgaaattgcagaactcacttgtatgacactgtttcaagaactgccatatgcttcggaaaaagcatttgaatggatggctgacgaccgcgaatattttcagttatgcggttttatgctgatggcaagactattgatgaaaggcaatcaactgaatgaacgtgcggaagccgaatttcttgatcaggcattgacaagcttgcagagtgaagagctactgccgcaaaaagcagcggcaacagctttgcgtaagtttgctgtccaaagccgggagaatagcaagaagataaacagattgcttgcccctatcgtcaaatcagacaagcccggagtggcagttttggcctctgaaataaaattagaggcagaatattggcattaaactttcatgttatcacaaaaaggtttaactttgacggctgaactgaaatctgcgatggaagaaaatgtgaaagatactgtaaaacaggttttaactgagtacctgcagaagaacgggcatcgaaagacgcccgaaaggtatgctatactcgatactatctattccatcaaagggcactttgacattgatacgctctataattatatggcaactgatggcaagtttcgcgtcagccgtgccactctttataatactattgttttgtttattgatgcaaagctggtcataaaacatcagtttggtaactcttcccagtacgagcgtgcgtacaataatgaaacccatcatcacatgatatgtacggaatgtggcaaagttacagagtttcagaatgaaagtctgaagcaggctattgccagtacgaagctgaaaaagtttacggcttccaattactccttatatatatatggtgtatgtagcaaatgtacttgggcaaaacgcaaaaagaaaaaaaataagtaacaataaaacgaagaaacatgaaagtagatgtcttgttaggtttgcaatggggtgatgaaggcaaaggtaaggttgtcgatgtattgactccccgttatgatgtagtagctcgttttcagggaggacctaatgccggtcacactttggaattcgaaggtcaaaaatatgtactccgttctattccttcgggaatttttcaaggtgataaggtaaatataatcggtaatggtgtggtacttgacccatcgttgttcaaagcagaagcggaagctctcgaagccagtggtcatccattgaaggaacgtttgcacatttcgaagaaagcacatctgattttaccgacccatcgtattctggatgctgcatacgaagctgctaaaggtgatgcaaaagtgggtactaccggtaaaggtattggtccgacttatactgataaagttagccgtaacggtatacgtgtgggagatatcctccataattttgaagaaaaatatgcaaaggcaaaggctcgtcacgaacaaatcttgaagagtctgaactatgaatatgatataacggaattggaaaaacaatggttggaaggaatcgaatacctgaaacaattccatttggtagatagtgaacacgaaatcaataacttgttgaaagacggtaagacggtcttgtgtgaaggtgcgcaaggcactatgttggatgttgatttcggttcttatccttttgttacttcttcaaataccatttgtgcaggtgcttgtaccggtttgggtatcggtccgaataaaatcggtaatgtttatggtatcatgaaagcttattgcacgcgtgtcggtgcaggtccttttccgactgaattgtttgacgagacaggcaagaagattcgtgacttgggtcatgagtatggtgctgtgacggggcgtgaacgtcgttgcggatggattgatctggtagccttgaagtattctatcatggtgaacggtgtaactcaactgattatgatgaagagtgatgtgcttgatgattttgataccatcaaggcgtgtgtagcttataaggtaaacggcgaggagatagattatttcccgtatgatattacagatggagtagagcctgtttatgccgaactgccgggatggaagacagacatgaccaaaatgaccagtgaggatgaatttcccgaagaatttaatgcttatatcagcttcctggaagatcagttggagactcctatcaagattatttctgtaggtcccgaccgtgaacaaaccatcgaacgctataccgaagagtaattagtcggatatccataataagaaaaagcgcaattttatcggttgcgcttttttttatatgaatatccaaagaagagggttggatataggtcgtatgtggacataaaaaaaaggctatcttcccagacagccaatctttttgttaaccttaaatctaatactatgaaaaacacgttgcaaatatacggacatttattgaaaatacaagttttagagtcaaatcagtgcgtattataacacggtttattacgttgtcggatttattaacaagccgggctctaaataatcagaaaatgttataattcctttcattgtaatagggaagtcttgttctttctaagtaatgaagattatatggggaaggggtataaaataaaaaaggagcaacgccttgctccaacctttgttaaccttaaatctaatactatgaaaaacacattgcaaaggtacggactttagcgaaatatgcaaataaaacaagtaaaaaagtatgttttctaacacgttttaagagatttgctctatttgttaaatccgagaagctatttatctgtttcttttttatcttttttgcatataaaaccgtatctttgttaccacttttgcaaaaggataaaaacgaatggtttcagtagataatttaaaggtagaatttggagttacacccctgtttgaggatgtatcatacgtaatcaataaaagagaccgcattgcgctggttggaaaaaacggtgcaggcaaatctaccatgttgaagattttggccggtctgcaagcccccacttcaggtatggtttctgttccaaaagaggtaagtataggctatctgcctcaggtaatgatactgagtgataagcatacagtgatggaagaagctgagatggcatttgaacatattttcgagatgcaggaaagccttgaaaaaatgaatcaagaattagccgaccgcacggattatgattcggagggatatcataatttgattgagaagtttactcacgacaatgaacgcttcctgatgatgggaggtactaactataaggctgagatagagcgcacgttgataggattgggtttttgccgtgaagactttacccgccctacttccgagtttagcggtggttggcgtatgcgcatcgagttggctaagttgctcttgcgccgcccggatgtattgcttcttgacgagcctactaaccatttggacattgaaagtatccaatggttggaaaacttcttgaaggtgagtgccggagctgtggtattggtcagccatgaccgcgcctttattaataatgtgactaatcgtaccattgagatatcctgtggacacatttatgattataaggtggcatatgatgagtttgtggtgttgcgcaaagaacgtcgggaacaacaacttcgtgcatacgagaatcagcagaaacagattcaggatacggaagattttatagaacggttccgctataaagctactaaagctgtacaggtgcaaagccgcatcaagcaattagaaaaaattgttcctattgagattgacgatgaagataattctgcattgcgtctgaagttcccgcccgccatgcgttcgggtaattatcctgtgatttgtgaaggagtgaagaaagcctatggcaatcatgttgtgtttcatgatgtgactctgaccattaatcgtggtgagaaggttgcatttgtgggaaagaacggtgaaggtaagtctacgttggtaaaatgtattatggacgagattccatacgaaggcaagctgaccatcggacacaatgtacaaatcggatattttgctcaaaatcaggcccagctgctggatgagaatctgacagtgtttgacacaattgattatgtggctaaaggagatatccgtttaaaaatcagagatatattgggagcctttatgtttggaggcgaagcatcggacaagaaagtaaaagtactttcgggaggagagcgtagccgattggctatgattaaattgctgcttgaaccggttaactttcttattttggatgagcctaccaaccatcttgatatgcgttcgaaagatgtactgaaggaagcgattaaagagtttgacggtacggtagtggtagtatcccatgaccgtgagtttctggatgggttggtgactaaagtttttgagtttggtggcggtgtggtgaaagaacatatcggaggtatttatgatttcttgcagaaaaagaagatagagaacctgaatgaactgcaactttcttcttctcctactgcttctgcgatgaaaaaagaagaagaaccggtaagtgagaataaactctcatacgaggctcagaaagaattgaataaaaaattgcgtaaattggagaaacaagtggcagactgcgagcagaaaatagaaaagctggaagcgcagatagccgaagtcgaagctaagatggcaactcctgaaggggcatcggacatgagtctttacgagcagcaccaacagttgaagaaagatttggatgctgtggtagaggaatgggagagtgtttccatagagctggaagaagcacagggctgacaatcaaatataattttatatatagattcagatgaaagcaaaacattatttacctatggctgcactggcgctgacgatagctgccggctgtgaaagcaagaaagaggctgtgatggcttcaggaatagatttaggcaacttggatacaactgtggtccgaggtgcggatttctttcaatatgcttgtggcggttggatgaaaaaacatccgttgacagacgagtattcacgcttcggttcattcgatatgctggcagagaacaatcgcgagcagttaaaaggattgattgcggaaattgccggacaggaaaatgagaaaggcacggtagctcaaaagattgccgatatttataatttggcgatggacagtgccaaactgaatacagaaggaatagagcctatcaaagcagatttggagagaatcgcttcggtaaaagacaaggcggagatcgttccgttgatggctgaattgtctcatatcggcatacgtccttatttcactttctttgttgatgccgatattatggacagtaagagtaatttgttccaattatatcagggaggtatcagtttgggtgagaaggaatattatttggataccgatgaggctacaacagatattcgtaataaatataaggaacatattgtaaagatgttccggctggcgggctttgatgaatctgctgcccggaagaatatggaggcagtgcttgaaattgaaacacgcatagccaaagcttctttcagtgctgtggaacagcgtaatcctgctgccaattatcataagatgacgttggatgaactgaagaaatctgttccgggcatcgattgggatgcatttctcagtggggtgggagtaaaaggtgttacggaactgagcgtgtctcaggtggaacccatcaaggaagtggaaaagataatcaataccatacctgtagaaaagcaagttgcttatatgcaatggaagttaatcaaccgggcagcgagttacttgagtgatgagtttgtagcacagaactttgatttttatggcaaaaccttatcgggaagaaaagaaaaccaacctcgctggaaacgtgcggtgggcacagtgaacggcatgttgggtgaagcggtaggacagatgtatgtggaaaaatacttccccgctgccgccaaagaacgtatggtgcagctggtcaagaacctgcagacggcgttgggcgaacgcatccaaaacttggaatggatgggcgacagtactaaagccaaagccatcgagaagttgaattctttctatgtgaaagtgggctaccccgataagtggagagattatacggctttggatgttgaaaaagactcttattgggcaaatgtgaaacgtgccactaagtttgaactcgattatgaattggcaaaggccggtaagccggtagatcgtgacgagtggggaatgactccgcaaactgtgaatgcttattacaatccgactaccaatgaaatttgtttccccgccggtatccttcagtatccgttttttgatatgaatgccgatgatgctttcaattacggagctatcggtgtggttatcggacatgaaatgactcatggatttgatgatcagggacgtcaattcgataaagatggtaatttgaaagactggtggacaccggaagatgcggaacgtttcaataaacgagctcaggtaatggtgaacttcttcgacagcattcaggtattgccgggattatatgcgaacggttctcttactttaggtgagaatattgccgaccacggaggtttgcaggtctctttccaggcatttaaaaatgcaaccaaagacgctcctttgggagtggtggacggatttacacccgaacaacgcttcttcctgtcatacgccggagtatgggcgggtaatgtacgtgatgaacagatccgtttacagacaaaatccgatcctcattctttgggcagatggcgtgttaatggagcgcttcctcaaatcggtgcatggtatgaggcattcaacataaccgaaaacgatccgatgtatttggcaccggagaagcgggtttctatttggtaagatattctttggtatccgccggtagagggtaggtttggaatttcacaaatttaatcggaaaacagtgaagttgggaatctatcctctacggtggatattttttcttttgatataactctctttctatttggattttaatcaataaaccgttatttttgcaggcgatgaaacaaagaaggtatatagcatggtttttgatacttgttagcatcattatgttaacggcatctgtcttgccgcaccatcatcaccgtgaaatactttgtttgcaacatgatattacagtctgtggctgtcagtgttcgggggaacagcataatcacgatgtatcgcatgacaagcatacgtgtaatgccggttgtgtgactaaattcaagactattactcccgagaaggtgcagaatagcgtttcgccggactattccttctgttcgttactttacacagtgccggatattttgttgctttcattgcgacttaccgaacgcaatacgattcctgatacttattatttagaaaaactacattctacatgcctgccccatgtcaagggtttgcgtgctcctccctatgttcttgcttaacagatagaaacgacctttttatccgcaactttgttgcatctttattatcctaattttgtaatcagattaaaaaagtaagaacaaataatatcatcatgaagaaacttatctttatgggagtcttgggcttgttcctcttaggctcttgcaacagtaaatcgggtcatgatcacgaaggacacgatcatggaacggaggaagcacataatcacgaccacgaagggcatgaccatgatcacgaagggcatgaccatgaaaaagaaaaccacgaccacgagaatgaaggtcacgaagggcataatcatgaagcggaagcttctgcagccggacattccgatgagataattctgactc

SEQ ID NO: 6670 - DNA, 49493 bp, Unknown
  gut microbiota DNA sequence
gtctacacccttcttcaattcgtcacgggcatcaatgttgaatttaatatctttagccataattctatttacaatttaatgatttacaatgtactattaattatcccaaaacagcgaggacatcgctttggcgcatgataaggtattttttaccgtcatgttccaattcagtacccgagtatttaccatacaatacctggtcgcctacatgcaacaccatttcttcgtcttttgttccgttacctactgcgacaacttcaccttgcaatggcttttcttttgctgtatcaggaatgatgataccaccgattgttttttcttctgccggagcaggaagaatcagtactctgtctgctaatggtttaatgttcatagttctttaatattttatttgttatacattatatcaagttatcaatgtctttttaaagacgacacataatcttcagctaaaagcatgccaaagccaaaactcgatgaattggcagatataaactgtcaatttgacactatgacaaacattcatttctgccaaatgccttttttattcattttctttaacgattatagggatgaaacgcaaacatatcactatctttgcaaaccctaataactaaccttttgaactatatggcttttacgaacaacattatgattgtccgccacaagttgctgaccgaacttgtgaaactgtggaaaaatggagaactgacaacagacaaaatagaccgtctgcctttggaattgagtcctcgacgttcaaaacatgccggacgttgctgcgtacataaagaacgcgctgtgtggaaatataaatcactccctttgctgggattggatatggacgatgaaacagatgaacttacttcattatccgaatatgccgccagagccctcgaccgtgcagaaaatggaatgcccaaggacaatataatgtgtgtaatagacgaagcctgctccgcttgcgtacagattaactacgaaattaccgacttgtgtcgcggatgtaccgcccgcagctgccagtacaactgccccaaaggagctgttcatgtacatgcagacaccggcaaagcatggattgaccacgacacctgtatcagttgtggcatctgccacaaaagttgtccttatcatgccatcgtctacatcccggttccctgcgaggaatcctgtcctgtcaaggctatcagcaaagacgagcatggcatagaacacattgacgaggacaagtgcatctactgcggaaagtgtatgaacgcctgtccctttggagctatcttcgaaatatcacagactttcgatgtgttacagagaatccgtaaaggagaaaaagtagtggctattgtggccccttctattttaggacagttcagtactactatcgaacaagtatacggagcattcaagcaaatcggtttcaccgatgtgattgaagtcgcacaaggtgcaatggaaacagtggaaaatgaagcacatgagctgattgaaaaactggaggaaggccagaagtttatgactacttcctgctgtccttcttatattgagttggtgaacaagtatattcccgacatgaaaaaatatgtttctactaccggttctccaatgtactatgccgcacgtattgccaagaaaaaacatcccgatgcaaaaatagtatttgtgggaccgtgtgtggccaagcgtaaagaagcacaacgtgatgaagctgtggattttgtaatgacatttgaggagatttcttctattttcgatgcgatggaagtcaatttggaaatagtacaaccttatgccatggaattctcttctgtgcgcgaagcacatggatttgctcaggcaggcggcgttatgggtgccgtgaaagcattcctcaagatggaagcagacaaaataaatgccgttcaggtttcagacttgaacaaaaagaatattgcagcattacgtgcatacgccaaaacggggaaagctccgggacaatttatcgaagtaatggcttgcgaaggaggctgcatcaccggccccagcacacatagcggaagcaagtcaggcaagtggcagttatcccaagaattgaccaaacaaaccaaaacgtatgaaaatatggaatgaaatactcttgatagacaaactgaggaaggaacataaactgactgcggaagaatataaaattctgctcgaatgtcaggatagtaactgcttatcttatctacaaaagcaagctcaagaggaagccctttcccggttcggtaatagagttttcatccgcggcctcatagaagtcactaaccgatgccgcaataattgctattattgcggcattcggaaaggcaatccgtcggtcagtcgctacggactgacacgggaaacaatcttagcatgttgccgtgaaggatatgaagccggtttccgtacatttgtcatgcagggaggagaagatcccgccatgacagacgagtggacagaacaaacggtagcatccatacatcggctttttcctgattgtgccatcaccttgtcattgggcgagaagacacgggagacttatgagcgctttttccatgccggcgcaaatcgatacttacttcgccacgagacatataataaggagcattaccggctgcttcatcccgacagaatgtcacccgaatatcggttgcaatgcctgcaatggttgaaagaaatcggctatcagacaggcacaggaatcatggtaggcactcccggacaaactatcggacatttggtggaggacttattgtttattgagcgtttccaaccggaaatgattggcatcggtcccttcattccccaccacgatactccctttgccggcaaagcggccggaagcatggaaatgacactcaaattgctttctatcttcaggctgatgcatccttacgcccttatcccttccacaactgcgctggcaactcttgccagcgatggccgcgaacgaggaatattggcaggtgccaatgtcgtgatgcccaacctgtcacccccggaacaacgtaccaaatacaccttatatgataataaagcagcctttggtgccgaagcagcagaaggattaaaaaaactgtctgaacggttaaatgctatcggataccggatttcgacagaaagaggagattataatggaaacagaacataaaaacaattagaatataatgtataaagcagattcaaaaatagcggaagagttcatcaatcatcaggaaattctggatacaatgagttatgcagaaacccataagagcaaccgtgcgctgattgagtcattgatagacaaagccgctcgatgcaaaggactgacccatcgggaagcagccctcttgttggaatgtgaccaaccggacttgatagaacggattttccgtctggcggaagaaatcaaacataaattttatggcaaccgcattgtcatgttcgctccgctatatctttccaattattgtgtcaatggttgcgtatattgtccttatcacctgaagaacaagacaatagcccgcaagaagttgacacaagaggagattaggaaagaagttatcgccctgcaggacatgggacacaagcgtctggcactcgaagccggcgaagacccgttgcacaatcccatcgaatatatcctggaatccatcgataccatttatagcatcaaacataagaatggagccattcgccgagtgaatgtcaacattgccgcaaccacagtagagaactaccgccggttaaaggatgccggcatcggtacctatatcctgtttcaggaaacttatcacaaagaaaactacgaagccttgcaccccaccggacctaaaagcaaatatgcttaccacaccgaagctatggaccgcgccatggaagccggcatagacgatgtgggcctgggagtgctgttcggtctcaacacttataaatacgactttatcggactgctgatgcatgcggaacatctggaagccaccttcggagtaggtccgcacaccatcagcgtgccacgcatctgtccggctgacgatatttccacaaacgacttccccaatgctgtttccgatgatatattctgccgcattgtagccatcatccgcattgccgtaccttatacgggaatgattatttccacacgcgaatcggttgccacgcgcagcaaagtgctgcatttgggcatttcacaaatcagtggcggatcacgcaccagtgtaggcggttacgccacgcctgaaccgaaggaagaaaattccgcccaattcgacatcagtgatacacggacattggatgaagtggtcaactggctgctcgacatggggcacattcccagcttctgcaccgcctgctaccgggcaggcagaacgggcgaccgcttcatgtcattagtcaaatcgggacaaatagcgaattgctgtgcccccaacgctctcatgactttaaaagaatatttggaagattatgcatccgccgacacgcgcgccaaaggagaagtgctcattcaaaaagaattgaaacatatccccaatcccaaaataaaggagatagccgcgcgtaatctgaaagagataatagaaggaaaacgtgactttagattttaagcataactcatggatatgaatagtactcctaatgccaatcgcctgcatatcgccattttcggccgttgcaacagtggtaaatcatcacttatcaacgccctgacggggcaggacacagcccttgtttccgctgttccgggcaccactaccgaccttgtgaataaagccatggaaatacacggcatcggcccttgcgtttttatagatacgccgggatttgacgacgaaggcgaattgggagaaatgcgcattgcccgcacccttcaagccatcgaacgcacagacatcgcgttattgctttgcgaagacggagatttggaagaagagcagcaatggatacagcaactgaactcccgacatattccggtcatccttattcttaacaagtcagaccggcgcgaatgtgctgccgatgtcgctgcccgaatcgaaaaggtctgcgggaaaacgcctatcacagtcagtgccaaagagcatacaggcatagaagcagtgtatcaagccatcctccgaaaactgccgaccgatttcggccaacaaaccattaccggcaacttagtacaagaaggagacttggtattgctggttatgccacaggacatacaggcacccaaaggacgtcttattctgcctcaggtgcaaaccatgcgcgaactgctcgataagaaatgtcttgtcatgagctgcacgaccgatcaactggcaaatacattggaagcgctttcacgcgctccccaactgataatcacagactcacaagtgttccacgaagtatatcgcctgaaacccgaatccagtctgctcacctccttttctgtattgatggcaggatacaaaggagatatacattattatatagaaagcgcagcagccatcggcagccttaccccgcaatcgaggatactgatagccgaagcctgcacacatgcccctctttcggaagacatcggcagagtaaagctcccgcgcctgctcagaaagaaagtcggtgaaagcttgcacatagatatagtatcaggcacagatttccccaccgacctcagttcttatgaactgattattcattgcgggggttgtatgttcaaccgtaaatatgtattaagccgcatcgaccgggcacgctgccaacacataccgatgaccaactacggagtggctatcgcctgcctcaacggaatcttggacaaaatagtatattaaccatttaatcaaaaataaaagcatgaaaaaacgaacaacaatgcttgccttgttattggcaaccggagccggtacctgcctgcaagcccaagagaaattaacccaattcaaggtgcgcgatgccattacagtacgcaccccgattatgaatgacagcatcaacccgaaaggtgagaaatacgccgacaaggatttgcttaagacaccggtcgtactcgaccttgccgatgctcctttccaggtgctgagcaccgatactgccggagttctctcattccctaaagcagagaaagaccatagtatctacttattggagacctccttgcgtgccgaacgcttcatgaccgggaaattgaaagtcacttcacccgcccgttgggagatttttatcaacggagaatcaaaaatgtcaaaagaaaatgctgaagacagcatatccggtgcctcaacccgcgaagtcaaccttcgtctggaacccgaagccgattatgaaatcaccatcaagttgctttccggttcaaaggataaagcagtgcctaccttgaaatgcgaactcatcaaggatgataagtttaaagatatcacttgttttgtatctcccgaacaaaagaaacgctttgccctccccaacaccgtttacggcaaccgtgtcattggcgtatccatttcacccgacggcaaatatctgcttacacgctattggaataaccactctttgaaacgttcttatacttacaccacgctgtctgagctgaaaacaggcaaagtactgttgtccaatgccaaagaaggcatgcgctggatgcctaaaagcaataaactgtattataccgtacaggctgccaagggcaacgatgtaatcacccttgatccgctgaccctaaaagaagaaaccatcctgaaaggtattcccgaagaaagtttcacctggtcgcctaacgaagattatctgatttatcatccttcggaagaaggagtgaaagaggaaggtccgctgaaacgcatcgtgagcccggctgaccgtattcccggttcacgccgccgcagcttcctggctaaatataatccggcaacgggcatatctgaacgtctcactttcggtaaccacagcacttacctgaatgatatttcccccgatggcaagtatatcctttatagcacctcaaaagagaacatcacagaacgtcctttctcattaagttctctctatcaggtcaatctggaaacattggctgtcgatacgctctttatcgacgaccgttttatgggaagcgccagttattcaccggatggtaaacaattgctgttgaccggaagccccgaagcattcggaggcataggcaagaattgcggcaaccaccccatcgccaatgacttcgattcacaggcctatatcatggacttgaccacacgtcatattgaaccaattacaaaggactttgccccgactgtctatcctcttcaatggaacaaaggtgacggctgcatctacttcaataccaacgatgaagattgcagaaacatctaccgttactctccccaaacaaagaagtttgagaagttaaatctggaaacagatgtcaccagcgcctttgcactttcagaaaacaacccttcaatcgctgcctatatcggacagagcaatcacaatgcaggagtcgcttatctttacgatatgaaaaagaagacttcacgtctgcttgccgaccccatgaaaccgatattggacgagattgaattaggcaaaacagaaccttggaacttcactgcctcggacggaactaccattcagggtatgatgtgtctgcctcctaatttcgaccccaataagaaatatccgcttatcgtatattattatggtggaacgactcccaccgaacgtggcatcagcaatccctattgtgcacaactgtttgcttcacgagactatgtagtatatgtcatcaatccaagcggaactatcggttacggacaagagttctcggcacgccacgtcaacgcatggggtaaacgcacagccgacgatatcatcgaaggcaccaagcaattctgcaaagaacatccatttgtcaatgataaaaaaataggctgtctgggtgcatcctacggaggattcatgacccaatacctgcaaacacaaaccgacatcttcgcagccgcggtttcgcatgccggcatcagcaatgtgacaagctattggggagaaggctattgggggtattcatataatgcaatagcagctgccgacagttatccttggaaaaacccggaactgtttaccaagcaaggttcactattcaatgccgacaaaatcaatactcccttgttattgttgcacggaacggcagataccaatgtacctatcggagaaagcatccaactgttcaatgcactgaagattttgggcaaaactgtcgaatttgtaaccgtagatggtgagaaccacttcattgccgattatccgaaacgaatattatggcataactccatcatggcatggtttgcacgttggctgcaagacagccctgaatggtggaacgatttatatcccgaacgccatctataaaaaacatcaccgtagcagcccatgataaagctgctacggtgacaaacaaaatatagaattcctcttattatcctcttactgttttcaataattcatcggaagtcagcaatgactgttctcctgtagtcatattcttcagggttagtttaccttcagccatctcattttcaccaacaatagcaacaaaagggatctgtttgtcatttgcataccccatctgcttcttcatcttggctgaatcaggataaatctcggcacgtacacctgcatcacgcattttggccaaaacaggcaaacagtaggcagtttccttctctccgaagttcacaaacaacagttccgtaccattcacagcctctttcggatacaaatccaattgattcagtacatcaaaaatacggtctgctccgaatgaaataccgactcctgacattccatccattccaaacacgcctgtcaagttgtcataacgtcctccaccgctgatgctgccaatctgtacatccagtgccttcacctcgaagatagcaccggtatagtaatttaatccgcgagccaacgtcaagtccagttctacttcactcttcactccaagagaagcaacagtcttcaggataaactcactttcttccacccctttcataccggtctcgctggtagccagaaccgttttcagtgtttccagtttttcctcatttgaaccgctcaataagataataggctgaagtttatcaatcgcttcctgtgggatacctttcgaagccaactctgcattcacattatccaaacctatcttatccagcttatcgatagcaacggtaatatctactatcttatcagcctcaccgattatttcggcaatacccgttaatatcttacgattattaatcttaacggaaatacgcacgccaaacttgttgaacacacgatcaatcatttgtacaagttctacttcattcagcaacgaattgctacccaccacatcggcatcacactgatagaactcacgataacgtcccttttgaggacggtctgcacgccataccggttgaatttgataacgtttgaaaggaaaacttatctcatcacgatgcatcaccacatagcgggcaaacggtacagtgagatcatagcgcagtcctttctcacaaaatttaccggccaatttcacagcattgcggctcaacaactcctcatcggtaattcccgaaaagtaatcgcctgagttctgtatcttaaacaatagtttatccccttcatctccatattttcccatcaaagtagacagattctccatagaaggagtttcaatctgctgatagccgaaaagatggaacacttcacggatcgtattaaatatataattacgtttcgccatttctacgggcgaaaaatctctggttccttttggaatacccggttttgctgccataatgattctctgatttgattttgaagcacaaaattacgaaaaaatctctgtaataaacgaataaaaagggagaaaactctgattatggttagcctctattgatcttaataccattcttccgaaaacgagcctgtttaatcctctaatatctaataaagaaacaaagtgtactccaaagaattgtagcttttactaaaaactcaaggatatgggaggacagatataagaatctaaagaaaatggggctgtcaaaacgtggataatgctatcatttagttcgtaggggcgaggttcgctcgcccgaaaacagtttgttttgtgtcttcgggcaggcgaaccctgcccctacagctgacgatgggataggccgatttagttttgacatactcccattattcaatacaatcggataaatatttactcccgacgtcccatataaatcataatataataaaccaatgtagccaatgagctgagtgcagcgactacatatgtataagcagccgaacgtaatgcgtcttccgctgcctgatgattataggaattagtaatacccgctttactcaaccataccagtgcacgatggctcgcatttatttctaccggtaatgtaataaaactgaagagggtagtcatggcaaacaaacagataccggccaacaataactgcggaaaagtatttaccatcagaattcctcccaacaacacccaagtcatgatagaagatgagaactgaaccaccggaacaagtgcagaacgcattttcaacggagcgtatgcacgcgcatgctgcacagcatgtccacactcgtgggcagctacggcagcagcagccacactattgcttccatatacaccttcacttaaattcactgttttgttagccggattataatggtcggtcaacattcccggggtacttgtcactctgacatcataaataccgttgtcatgcaacatcttctctgctacttcttttccggtcatgccatttgatagtggcattttagagtatttcttaaacttactctgtaaactagcttgtacgatataactaataatcgcaattccaataaataatatccaatacattgacatagttttgttctttataatttcgttgttaaatatacaggttattatacacaaatagtttgccacccttcccgttttagaaagaattaagaatattagcgggttattgacagtcaattggcagacgttccgccaaattcaattaaaaaatatataaaggagacaaaaagaattgccatgtgattattgatttatatttttgaaacaaaaataagagatatggaacaagaaattggaaatatatccattgccctcatccgcaaattgaaccctgcaatgaagggcataggaaatgattttataatggatagtacagaatattatattccggatgtcaattctatattcaaatatcctcttcgtctcgacggtattatcatcgcagtgcgaaaacaaggaagtgcaactataaacatcaacctgcgtgaatacaacacgactaaaaacgatttaattctttgcgctcccggcgacatccttcaatcaattcccaaaccgggcatgcatcaaacccaaatgttcctcatctcatccgattttctaaaagagatgtatatcaacctgaatagtttcatgcctttctttatttcattaaaagaacaacctattttcagcctgacggatgaggaggtaaaagagttggaggctttctatacattaatagaagagactattgaccggaatgataatttccgtacagagattgtacggcggctgatgggtgcctatctttataaattaggttccatcctgcatcgcagacaaccggaattcttgtctgtcaaccctaaatccatgaaacgagaagaaatactattcaaccaattcattaatttgctaaccgaacatcatcgcaaagaaagacgggtggacttctatgccgaacagttgtttttaagtccgaagcacttctctaccgtggtgaaaaaagtaagtgggaaaacagccggtgagtggattgacgaatatgtaattctggaggcaaaagcattacttaaatattcggtcatgtctattcaggaagtagcctattacatgaatttcccaaatccttcctttttcggaaaatattttaagcaccacaccggaatgtcaccaagtgaatataaagtgcaatagcagaaggaggaaaagataaaattatcaagaagaaaagataaaaggcagatacattcaactaatatgccgataaaattgtttaagtttgcagaaacgtttgtacaaaacacacgatgaaaaagaaatatatccgctggacaatatggacggtagcttctcctttcatattgttcattctcttatgtatactgatttatttgccccccatacaaaactttttggtggacaaagcggcttcgtatgcctctgaaacaaccggaatgaatataaaagtgggaagaatatccttatcctttccgctcaatttagtagtaaatgacgtggaagcatcttcccaacacaacgatacattgctcagcgtaaaacgccttcaggtaaatgtacagttgttgccattgttaaaaaaacaagtggaagtagacggtatctctttaaaaggagccactgtcaattccaatgaccttatcaacggaatgcagctacaaggaaccctcggtgaattgttcatatccagccacggtgtggcactcgaccccgaaacagccatagtgaacaaagtactgcttaaagacaccgacttgtctctttgcctgaatgataccacagctgccgatactgctaagaccgacactacctattggaaaataatcctgcagaacattgatttgcaaaatgtatctttcgctttacagatgccgcttgacagtctcgcgctcagcacatcgctggcaaaagcatctttacgcaacggattgatagacctgcataaatccgcctattcccttcaaagttttaaaatagagaacggacaagtaaactatgactcgggagcaccgtctcctcttccatcagacagcattgctctgagaggattggatccttcccatatcgcactgaccgacatcggcgtgcaactcgattctcttcattatgaaggtcgtgacatgaaagccatcattaaccgctttgtcttaaaggaacgctcgggattggagattcaatccacccaaggacgactgctctccaataagcaatcgctccgcatcccttctttgcgtctcgccacttccgattcggacttcgaattaaatgcatccatcgactgggatgcactcgaaatgaaaagtgaaggacggttgtctgcccgattaatggctgatataggcaaacaagacattgtacgcttgataggcaacatgaatgaacatttcgtacagaaatatccggccgagcccttacgcatccgtacaggagtggatggtgatctcaaccaactcaaattgactgccctgagtgccgaactgcccggtgcattggagctttttgccaaaggtgaattaacccatctgaccgatactctgaaacgcggaggagacataacacttgaaacggaagtggagaatatggatttcctgagcgttcttgccgaaggagttgccatccctggcggtacgcgtctggaaggtaaattcaccatgtcgggttccaaaatgggtacagatcttttattaaaagaaccggacgctcgtatattggcagtgattgacaccatccccattaccgtctataatgacagtatctctattgcagatgatttcaaaatggaacatgccgcccggatctatgccaagtacgacctttcacgcgaagcttatgaagccgatgttgccatcaacaatctgaacctgcaccgattcttgccgcaagactcactctttgcagtatctgcacgtttgggggtcaaaggagaaggactggacttcatgtccccccgaaccaccttcaatgcctcgggcagtattgaccgtttccattacggcaattatatcctgtcgggcatccaactctcggccggactcgaaaaacatatcatcaatacagctttattaatcaataataaagtaatggatatacgggcgcatctcgatggaagcctgaaaccgcataatgcagcagccacactgaaactggatatcgaccgcatggactggcaggcgttgcacttgataaatgaacgtatgcagacctcgcaaaacatcacagtccacctcacaacagacatggcaaacaaatattctgtggatgcatccatggccaatatcaccatcaccacacctaagcgtacttcgcatcccaaggaccttttattgggatttaccacagccggtgattctacccggatgtatttgcgtgccggtgatttcgacctttctttagaaggagacggacacatcacacacttatcccgtcaggcagaaacactgatgaaaaaactttccgaacaatgggagcataaacatattgaccaggaagaaatgaaacaatatttacccggtctgtgtttccgcgtcacttcgggacaagacaatccggtttgcaattacctgtccatgatgggcatctcttaccggaaactttttatggatattgattcctctccgacagaaggtctgaacggagaagcattcctttatagcctgagtacagacagtattgtattggatacactctatcttgatatccaacaagacatggaaggcatcaaattcctaagcggagttgtcaacggaccgaagcctgaccaggaagcttacgatgtcagtctggaaggaaatataggtaccaatcaggcacaattaatcatccaatatctgaatgcccgtaaggaacaaggcatttatatgggagttcaggccgatttacgtcgacggggtatccgcatgcgtctcttccccgaacatccaacattagtttatcgtccttttacagtaaacaaagacaattacattttcctgacagaccgcggacgcatccatgccaatctccatctgcacgatgatgaaggtacgggtctcagcttctataccaatcgggaagacagcattgccagtcaggacatgacagttgagctctcccgaatcaacctgaaagaattccgtcgtattctgccgtatatgcctgatatggaaggatggattggagcagaagcgcactatatcgaatccggtccttacatgatggtaagcagtgacttgaaagtcgatgaattcaaatatgaaggcacccctctcggcaattgggagtttagcggtgtatacctgcccggtgatgaaaaagaccaccacgtagacggatatattcgtcacaacaacaaagagatagctcacctcggcggtatctatctgcccacaaccgacggcaaaggcaacctgagtgcagatgttgcattcgaacacttcccattgaatgtcatcaatccattcatacccgataacatgatagaattgggcggtgacattgatggaacacttgccatgaaaggcgatccttccaagcctctgctcaatggcgaattgtcactcgattccgtatcaatattcatgcccgaactatctgcgctcttccgcttcgataacgaaccggtgcagatggtcaacagtaaaatgacgtttaaggactttgatatcttcaccaaaggaaaaactcctttcaccatcaacggtaacgtagatttttccaatctggagcgtatgactaccgatttaaaaatgaaagcccgaaactacgaattactgaatgccccccgcaccaaacgggctatggtatatggcaaaatgtatgtagacttcgacgctactctccgtggtcccatagacgccctcatgatgcgaggcaacatgaatatattgggaaagacagatttcacgtatgtgatgaaagattctcctctgaccgtgaacgaccgcttgggagacatggtaactttcgtcaactttaatgacactacggaagtagcgaacgaaaccatccagccggtgtccatcaatggcatggatatcgccatgacgatgcatattgaccaagccgtccaagcacacgtcgatatcacaccggacggctccaattatatgttgctcgaaggaggcggagacctttctttccaatacactccgcaaggtgaaatgctgttgaacggacgctactcgctcatcagcggtgaaatgaaatatgaaattccggtcattccactcaagacattcaacatccaaaacggcagctatgtagaatggacaggcaatgtgatgaatccccaactcaatattactgccacagagcgagttcgcgctactgtcggcgaggacggacaaagtcctcgtatggtcagcttcgatgtaggcatcgccctgagccaacgattggaaaatctgggactggccttcaccctttcagctcccgaagatgcatcagtacaagaccaactgactgccatgacccctgaagaacggggcaaactggctgttaccatgctcgtcaccggcatgtatatggcagaaggcaactctaccggaggattcaatatgaacaatgccctcaactccttcctgcaaagtgaaatctcgaatattgcaggcaaggcccttgatatcagtttgggaatggaaaccgttgacaatgccgaagacggcggaaagcggacggattacaacttccagtttgccaaacgtttctggaacaaccgtttccgtatcgtcatcggtggaaaagtgtctaccggtaatacagcccagcaagatgaaacatttattgataatgtttccatcgaatatcgtctggacaatagcggcacccgatatgtcaaagtattccatgacaaaaactacgaaagcgtgctcgaaggtgaaatcatcgaaacaggagtcggtatcgttctgcgaaagaaaatgagtcacctgggtgagttatttatattcaggaaaaagaaagattaacaaaaatgacaaggataaaaaagagaagaattcacactgacctgctgttactgacagcttttctatgcctactggccggttgttccaccacgaagaatctgcccgaaggcgaaaccctttacgtaggtgtaaagaacataaatgtcatcaatgaagacaaaactcccgccggagtacaaactctggaagaagtagaggcagctctgtcctaccctcccaataatgccattttgggaagtaactccctgcgttttcccattccattcggtttatggatatataatgactttgtgaaataccaggaaaagaaaggagtgggacactggatatttaacaaattgggctctactccggtttatgtttccactgttaaccccgaaacccgagtaaaagtagcaaccaacctgctgcgcgattatggtttcttcaatggttcagtatcctattcggtcgacaccctgaagaatccccgaaaagcaaagcttaattacgaaatcaatatggccaatccttattatctggactctattgcctacctcaaatatccggcacgagccgacagcttgatccgtgccacctacaaccaacgcatattacgcaaaggagataatttcagcgtgttgaaattagaagaagaacgccagcggctaagtactcttttcaggaataacggatactactatttccgccccgaatttaccaccttccgtgcagacacactgcgcaatcccggttttgtaagtttgcaggtagtaccgcaaaaaggagtgccggcagaagcacgccgtccttattatataggaaaaacctctgtttaccttacaggatataagggagaacagccgacagactcattgacctttgcagatatgaccattcattatcacggaaagaaacccggtatccgcgaattggtcttgcgtaaacgttttctgtataaagaaggacaactgtattcccaaatacgtcagacctatactcaagaagcattggcgcgcctgggaatcttcaaatatacagagttccgttacacccccaaaaacacccgtcccgactgtgacaccctgaacgtcaaggtaaatgccatgttcgaccttccctacgacggagagctggaattcaatgtcacaaccaagagcaccgaccagacaggaccgggagccattttcagtttgtcacgacgcaactttatgcgtacagccgccaagctttctttccaattgaaaggatcttatgaatggcaaaccgcatccaacagtgtggcaggagacaaatcgaaaatgaattcatacgaactgggagcatccttctccttggattatcctcgtctgttactgccgtggatgaagaacaaatcaaaccgcttcctgtttccttcacatacatctttcaagctctatgtagaccaactgaaccgtgcccgtttcttcaagatgctgtcattcggtggaaccgtcagctatgatttccagccatcgcgcacctggaaacacaccgtgacccctttcaggcttgcattcaacactctgcaacataccaccagcgaatttgactccattatcaatgtaaacaagtcattggctctcagtttgggaaatcaatttatccctgccatgagctacacctttacatacgataacgctcctctgaaaaaacgacataacctatggtgggaaacctctttcacctctgccggtaatgtaacttcactcgtttatgctgccttcggtaaagggatgaaagaaaaaggaaaagaattattgggaagccccttcgcacagttcctgaaaatgacctcggaaatacgctgcctgttcaaagtaggagaaaaacaacatatagctacccgcctgatgggaggagtcctctatgcatatggcaatcagactgttgccccctatagcgagcagttctatatcggaggtgccaacagtatacgcgcatttacggttcgctccattggtccgggtaccttccatcccaatgcagacaaccgttatggatatatcgatgaaacaggcgacgtaaaactggaagccaacatagaataccgttttccgatattgggcgacctatatggcgccactttccttgacgcaggcaatgtatggctgatgaaaaaagacgaagcgcgtcccggcggagaactcaccatgcgaaactttgcaaaaagcgtggcactcggcaccggcgtgggattacgttatgacctgacgtttctggttatccgactcgatttggggattgccctgcacgcaccatacgacacaggaaaaagcggctactacaatataccgaagttcaaagacggccttggccttcacttcgctatcggctaccccttctaaatagaggaagggacaaaaaaacgaggacaccccgatatcgcatcgtaatgtcctccacaatcattgagggatatatattttaatacttttgtagtcaaaccaatggcacaaagatagaaatattattcggaaaaagatattttatcaatattaaaattcaaaaaaagaatgtttttttctttttccgctcacaaatacattttccttcatatatttttgtagctttgtagtcaaaatatcaatttttaaataaatagactatgaaacctacattattcttattagcagccggaatgggtagccgttatggtggcctcaaacaattggacggactgggtcctaacggcgaaactattatggattattctatctatgatgccattaacgccggatttggtaaacttgtttttgttatccgcaaagatttcgaacaggatttccgcgataaaatcatttctaaatacgaaggacacattccttgcgaaatggtcttccaagctttggacgcactgcccgaaggtttcacttgtcctgccgaccgtaccaaaccatggggtaccaaccacgcagtcatgatgggcgccgatgttatcaaagaaccatttgcagtaatcaattgtgacgatttctatggccgtgactcattccaggtaatgggtaaattccttgcaaatcttcccgaaggatctaaaaacacctattcgatggtaggcttccgtgtaggtaacacactgagcgaaagcggtactgtttctcgtggtatctgcgaaacaaacgaaaagaatctgctgacttccgtagtagaacgtaccaaaattcagcgcatcgacggagaagtgaaatatatcgacgataatggagaatggatagcaacagccgacactactccggttagtatgaatttctggggctttactcccgattactttgcatacagccaggaattcttcaagaccttcttaagcgatcctaagaacatggaaaacttgaagagcgaattctttattccgttgatggtagataaattgattaatgacggaacagctaccgttgaagttctggatactgccagcaaatggttcggtgtaacttatcccgaagaccgccagagtgtagtagacaaaatccaagcattggtagatgccggtgaatatcctgccaaactgttttaatcatatatcataaagtgaaaaagaggacacattcaaataatgtgtcctctttttcactttctatacccatactaaaaccttttcagcatcagtgtatatacaaattacagtattcactaaaagatgcaattgcaaacaacttatttgatattttcaagaataaaaacaaaggaattagaatttgctgtagcaaactgaatttaataccttcatagtgtttatagcaacgatgctttaatctgcgaggttatacctcttgtgcggagtaacacatatcccggctttttattcttttcattcaagcttgttatcagtggaaagacatagtccgtggtggaagattctgcatagcgaaatggcacggatgcaaggtttcaaatgaatacacaccgtataattggtcttatgacgattgtaagtgcgtatattgttttttaaaggaacggatggctgtaccataattccgcgccatgctgtagcatcctatcttatgggcatgagcaatttcctgtttggcaaatttcaaaaaagacatttgcggtacatctgtcaccttagaaaaagacgaaattttgttattaccttctttacatgtacgaatactgaaacgaacatatatttttatcataacactactttctgctttttaataacacgacaatctatggcaacatcaaaactattttgtacatttgtccactttatcatctgcaaacttatacatatatatattataaacatgaaaataaataaagtattaatgatagccgcttctttcgcattcataacagcatgcggtgccggctctaaaaaagaaaatcataatatgggaaaagaaaagcgtactcaggtaaaactggaaacaacaatgggaaacatcaccgtagaactgtacaatgaaacaccgaagcatcgcgataactttatcaaacttgccaaagaaggtgtatatgacagcacgctcttccatcgtgttatcaagcaattcatggtgcaagccggtgacccaaccagcaaaacggcttctgataccgccatgttgggtaacggagatgtgggctataccattccggccgaatttgttcccaagttcttccatcataaaggtgtacttgcagcagcccgcgaaggagataacgtgaatccgcagaaggcttcatccggttgtcagttctatatcgtcacgggacgcaaattcaccgaaccccaactgcttggcatggaaaataagatcaatgagcaacgcgaggaagctatcttcgacagcttggcacaaaagcacatgaaagaaatctataaaatgcgtaaagccggtgacacggaaggattatatgccttgcaagataccctcgaagcccaagcacaggccatggcggataaagaagaaaaattccatttcactcccgaacagattcaagcttataccactgtgggaggtgcacctcatttggacggctcgtatactgtattcggtgaagtagtggaaggtatggaaacggtggaaaagatagagattgccaagaccaaccgtgccgaccgtccgttggacaatatacgtatccttaaagcgactgttgtagaataactgaagtcaccctcaaaagatgatagaaatcaacagacataccctgtcaaacggactacgcattgtccattctgaggataacaccactcaaatggtggcactgaatatcctctatgatgtgggtgcacgcgatgaagaccccgaacatacaggatttgctcacttgtttgagcatcttatgttcggaggttccattaatgtgcccgactatgacacgcctgtacagaatgccggtggagaaaacaacgcatggacaaacaacgatatcaccaattactacatcacccttccgcgccaaaatgtggaaacaggtttctggctagaaagtgaccgtatgctatcgctggatttcaacccacgcagcctggaagtgcagcgccaagtggtgatagaggagtttaagcaacgaaatctgaaccagccctatggcgatgcttctcatttattgcgtgcactggcctacaaggttcacccttaccgctggcctaccatcggaaaagaaatcagccacattgccaatgctacttccgaagaggtgcaggcattctttttccgctattatgctcccgataatgctattctggcggtgacgggacatattacttttgaagaaacggtggcattggcagagaaatggttcagtccgattccccgtcgacacgttccccgccgttcgctccccatggagccgatgcagacagaggaacgccgcctgacggtagaacggaatgtaccggtggatgccctgtatatggctttccacatgtgttcacgcaatcatcccgactattatgcatttgatatgctgagcgatttgctgagcagcggacgttcttcacgtttcgtacaacatttggtacaggataagcaaatatttaattccattgacgcatatatatccggaagcatcgacaacggtcttttccatatcgtgggaaaacctgcgccggaaaagacgctggaagaagcagaaaaagctatatgggaagaacttgccttactgactgaaggcagtatagacgagaacgaactggaaaaagtgaagaaccgctatgaaagcgaacagatattcaacaacctcaattacctgaatgtggccactaatctggcttatttcgagttaatcggaaaagctgaagacataaatacagaagtggaaaaataccgttctgtcacgcaagaacagattaagagagcagcgaaacaaacatttttgcctgaaaattgttccgtattatattataaagctgccgccaaaggtgcaagccacactccgtaagagaacggaaaaatatatatataacctatgaaccgtacatacattcaacattacaaatctctatttacactcggaattcccattgtcatcggccaagtgggtgttattatccttgggtttgccgatacgctaatgatcggacatcatagtaccaacgaattggctgccgccagcttcgtaaacaatatgttcacgctggccatcatttttgcaaccggcttttcgtatggcctgacccctattgtcggcagtctgttcggacgcggggagacatcggtagtggggagaatgctcaaaaatagtatttttgccaatgtcctgctggcggtactgcttacctttatcatgtgggtgctctatctgaatatccatcgtctcgggcaacccgaagaattgcttccactgatgagaccttattttatcgtactgctcatatcactattgtttgtcctcctgtttaatgctttcaagcaatttgccgatggtatcaccgatacccgcgtatcgatgtggctgttgctgggcggtaatgtcatgaatatcataggcaactatattctgatctacggaaaattcggcatacctgaaatgggactgctcggtgccggtatctctactctcgcctcccgaattatgatggtaatagtatttgctctcatctttttctgtactaaacgatatcatatatataaagaaggctttgtacacagcaaaataaaccgtgccgattttatttatctgaataaacttggttggcctatcgcattgcagatgggcatggaaactgcatcattcagcttaagtgccattatggtgggctggatagggactacagcacttgccgctcatcaaattatgcttgccatttcacaggtatgctttatgatgtattatggcatgggggcagctgtggctgtacgtgtcagcaatttcaacggacagaatgatagggttaatgtacgccgcactgcatattcgggcttccacatcatgttgggtattgcccttataggagcgcttcccatcttcttattaagacatcaattgggaggctggttcagtgacagccaggcagtgagtgtgacggtggcacaattaatcatcccgttcattgtctaccaattcggtgacggactccaaatcaactttgccaatgcactgcgaggcattgcagatgtcaaaccgatgatgtatatcgcttttatcgcttatttccttatctccttacctgccggatatttcttcggattcgtaatggactggggaatcgtaggtatctggatggccttcccattcggtctcactactgccggtatcatgtattatctacgtttccggtcgcgaacgcttgaaaaacattaaccatcattttgaagttttcgtttatgccacgtttatcaacacaactgaaagtagcttccggctacatcttgctcacgcttctgttatttgcttccattcagtatatcaaccatgaaatgaaagcattgaccgaaacggatgacaacgaaaccatattgaatttacgccgacgggtaaccaatgaaattgtcggtcagctgtatcaggctgaaatcatcggacaatccttaagtgccggtcaattgggacaatacttccgttacaaggcatccatgcaaaaggcgaacgctgcagttgattcattgcgaagcttgttgacagatagtatccagaccctccgcttagacactgtcgagatgtttctgacagaaaaggaacgcaatatgcgcaatcttctccgcgccattcaggaaggaggtaccgacaaaatttatcagcaacatatcgaaaaactgatagctgaacaagattcattactcaaccttccccatgtacgccgaaaagtagtgacacataccaattcttacattatccataagaagccgaaaggatttttcagaagactgggagaagtcttttctcccggaaagggcgactccacccaagtcaataatgtgattcaggaagaatttacagatacattgacggaatcatacagtccgaccgatactgttgtcacactgctgaaaaacgtacagagtcgtgtaaccgacactcaacagcagcagttgaagatgctcaaccaacggacacagtccctgcgtctcagcggcttaaaactaagtcagaaagtgaaccaactgttaagcaccatcgaagatgaagggctaagaatggcacaacaaaaacagatacaggaagaagaaatccgacaaagttcggcacgcaccgtagaggccatagccatcgtagctgtgctactggcaagtatctttctgatttttatctggcgggacatcacacgcagtaaccactatcgccgagaattggagaaagccaaacgccgcgccgaagacttactggtagcacgcgaaaagttaatgttgaccattacacacgacataaaagcaccggtaggttctattattggttataccgacctgttagagcgaatcaccacagaagagcgacaacgcttttatctcaacaatatgcaaagctctgccaagcatttgctgagtctggtgaattctttattggattatcatcgtctggatgcccataaaatggatgtaaacaaggtaacattcaaccctcatcaattatttgacaccatttatataagcttcaaaccaatggcaaatgctaaacatttgctattggagtacgactgtggagaacccttaaaccgcttatatataggcgatccgttccgcaccagacagatagtagagaacctgctttccaatgcattaaaatttacacaagaaggaagtatcacgctccgtgcagcattggaaaacggacaactgcacttcagcatcagtgataccggttgcggaatcagtgaagaagaacaaaaacgaatattccaagagtttacccgcctgcgtaatgcacaaggacaagaaggtttcggactgggactggccattacaaaaaaacttattttattgctcgaaggagatatcagaatagaaagtgaaacgggaaaaggcagtacgtttcatgtataccttcctcttccccaagctcccaataccgataaaaagaataaaagagaggaaggtataaagaactttatcctcattgacgatgaccgcattcaactgcaattgactgctgccatgcttaaacgtcccaccatccatgtcacctgttgtgaacagcctgaagaacttttccgtcagttggaagagaataaatttgatgcacttctgaccgacatacaaatgcccgccatgaacggcttcgacctattggatgccatccgtgcacttccggctgtccgggcaaaaacaattcccgttattgccattaccgcacgtagcgacatggacgctgaatatttccgttccaagggttttgccggatgtctccacaaaccctttaacacacatgaaattttcgaggttctttcgcaagccatccggcaagacttgacagatttggaagagaccggtactgaaatcctacagtcgccaaccaatgacagttcacatacagactcgtcttcattggacttctcggctcttaccgctttctcggaagatgaccccaacgcagcgaaagaaatcatccgcacatttgtgtcggaaacaaaaaagaaccggagctgcatggccaccgcccttgaaaatgaggaaatagaaggaataaccgccatggcacataaacttttgcctttatttaccatgctgggagccaacacttctatcgcacctctcacctggctggaacaaagacggggaacaaccgaaatgacctccgaaatacgcgaaaaagctttatttatccttgatgaaatagacagagtaatccgccaagctgaagaacagatttagacctttataagttaaaaggtattagaaaatcctccggcatttcgaagcatagtaaaaaaaggtatatttttgtatcattaaaaacataaaaatgccatactctattttaatagtagaagacgatttaactttcgccaccatgttaaagacatggctagggaagaaagggtttctggtagacactgccggcaatagtgcacgtgcccgaaaacaactggatgcccaatcatacaaccttgtgctttcagatctgcgtctgccggatcaagacggtatttctttacttgcatggatgaaagagcatggacaccaaattccccttattatcatgaccggctatgcagatatccaaagtgctgtacaagccatgaaaaatggtgccaatgactatatctccaaaccagtacaacctgatgtactgctaaagaaaataaatgaagcgctacaaaacgaaactgttattgcagctccttccggctctgctccgtccatatcaattgctccatcatccaattttctggaaggtgaaagtgaagcagcacgccaattatataattatgtaggcttagttgcccctacccccatgtcagttcttatcaatggagccagcggaacaggcaaagaatacgttgcccaccgcatccatcaattaagcaaacgtgccgacaagccattcattgcaatagattgcggctctatccccaaagaacttgcagcttccgaattcttcggccatgtaaaaggctcctttaccggagcacttaacgacaaaaccggtgctttcgtcgaagccaatggcggcacactgtttctcgatgaaatagggaatctaagctacgaagtacaaatccaacttctgcgcgccctgcaagaacggcgtatccgtcctgtaggttccaataaagaaatagaagtaaatgtccgacttatcagtgcaactaacgagaatcttcaaaaggctattgaaaaaggtaatttccgtgaagatctcttccaccgaatcaatgaatttactttgcgtatgccttctctgaaagaacgtcaggaagacatcttgctttttgccaacttctttttagatcaggccaatcacgaactcgaccgacatctgataggttttgacgcggctgccagcaatgcactgcaaacctactcgtggcccggcaaccttcgccaactgaaaaatattgtaaagcgtgccacactgctcgcacaaggcagctatattactttaacagaattgggatatgaactggttgagtcatccagtgcttctccaacaagcacaagcctcagtctgcacgacgaggcaacagaaaagaagcgcatcctggaagcccttcaacaaaccggaaacaacaaaagcaaagcagccctcttattgggcattgaccgcaaaacactgtataacaaactgaagctatacaatatccaataaaaaagaggattggggaataattccccaatcctctccacacattccccattttttcacattccgccacactgagccaaaaccgcatttgtactacaaatcaacaagttataaaacaaattatactttggcatgccaattgctctttaaatatcagagagaacaaacgagataaactattaacctgtaaaaacttacaattatgaaaaaattatttgtagcagtagcattagtaatgggaattggaacaagtgtatttgcttacaacatgaatccggcaagtatcgaaaccgttacaacagtgaatgatttcactccaatcgaagtaaaagatcttccggcagctgtccaagaagccattaccaaaaactatgcagacttaactatcaaagaagcttcagttgaagcaaaagaagatggtacaaagacttataaagttgttttaaccgacaaagagggtactgagagcactgtacttttcagcgaaagcggagaagtgttgaagtaaatgaaagatgcctaaaatgaaaaaagggaatgctgtgaagcattcccttttctatttctttagtccatatcaaaaccgttccacaaattacctgcgggcaccggtgccgttaattcaatcagttctttcgaaacaggatgaataaacttcaccatccgtgcatgaagacaaatgctaccatccggattggaacgctgagcaccatatttcaaatcgcctttgataggacatcccatttttgccagctgacaacgtatctggtgatgacgtcctgtctttaaatccacctccagcagataataattctgtgaatgaccgataagcttataatgaagtatcgctttcttcgagttctttacttctttatcatatgcataagacttattctgtttctcattgcggaccaaataatgaaccaattcgccttccgtttctttcggacactctttcactatcgcccaataggttttctttacgtctccattacgaaacatttcgttcagtcgtgccaatgctttaccggttttggcaaaaaccactaaaccactgacgggacgatccaaacgatgagtaacacctataaagacatttcccggcttattatacttctccttcagatacgactttaccgtttccgacaaaggagtatcaccggttttatcaccctgaacaatctcagaagaagtcttattaactacgattatatgattatcttcgtaaacgactgtcatgcaaagattacatattcataccaccatctacctgaatcacttgtcctgatacgtaagatgacatatcagaagcaaggaatgtagctacatcagccacatcttcaggagtaccgccacgacgcaaaggaatcttcttagcccattccgtttttacctcatcactcagtttggctgtcatatcagtaatgataaagcccggagcaatagcattggcacgaataccgcgagagcccagttcctgagcaatagacttagccaaaccaatcataccggctttagaagctgagtagttacattgaccggcatttccgtgaacacctaccactgatgccatattgataatgcttccgctcttctgacgcatcatgataggagtacaagcatgaataaagttgaaagcagatttcagattgactgcaattactgcatcccattgtgcttcgctcatgcgcatcatcaatccatcttttgtgataccggcattgttgaccagaatatcaatagaaccgaaatcttccttgatttgattcactactttttctgtatcttcaaaatttgcagcattcgaagcataaccttttaccttcacacctaaagcagcaatttctttttcagtattctgaccattctcgtcgataaccaagtctgtgaatgcaatgtttgctccttcagaagcaaacttcaacgcaattgctttaccaataccacgagcagcacctgttacaatcgcagtttttccagttaataatcccattttgttttctattttacgttattaattaaattattcttttccggtatctttgcgtcccagagcaccgaatacgattttcgccacataagcccaaccggcttcatcatccagctcctccgctatctgtccgcgaatatacggcacttcaattcccttaatacaataatgtacaatatcagctatgatatctacattatcaatatcaaaaatacccttgtcttttccttccgccaatacttgtttgaaaagtttgatttcttttgcatcaaagtttttacgcacagcttccacacgccatatattacggaagaaaccggcccgcaatgttccgtttctatacacaaccattttgatagaatccaaatgcgtctctatcaattttaaaattttttcgtccggagtgatatcttttttagcgacttgttccattgcatccgaaagcatttccaactcagattccaccaccgccatgtagatatcctccttgcttttgaagtacgtataaagggtgcgtcttccttttttagaagccaccgctatatcgttcatcgtagtgtcatccacccccttcttagcaaaaagctgacgggcaacgtctaccaatttagctcttgtctttgatactgccatatagattcagttgcacattatttatatatgtgagcaaatttacattattaatttggaccatacaagcaattaaagtataatattcatatatacgttaattaacactcacaatacacactaataatcaagcacttatatttcttacatattttaaattgaaaaaatattcgagaaatatttggagttaaagaaaaaagtcgtacctttgcactcgtaatcaaaacacaacatcgcggagtggagcagttggtagctcgttgggctcataacccaaaggtcgtctgttcgagtcaggcctccgcaaccaataagaggctaaatatctaaaattaaagatattggcctctttttcattaaacaggtgagacaaaagcgagacaattaaaacaaaatgctttctaaggggcagtagaaatttagtggggattatagtttcctattctcgcccgaaattctgacctctgcctcatggctcgtatcgtgcttccttctgaaaccctcaattacttttcaccggtccgtgttgaacagacttcaacagaaacacacattcatcttgatgaacggatgccctctgcattatcctatgatgtgcactttgaatccaaaggcttcatagaagcagtaagcatcacaggttttcccatccgtgatcccataaggtttgttttgatcccgttttgaactccctaagtcgtttcactagccggtctaaacgtttccgtcctttcgattatgcctgtctataagtcgaattactacagtcttccacagtggaccgtatagtccgttacggtagaccgtacagtccactgcaacggactgtacagtccattgcagtagactgtaataatcttccgttcaaaaggacttggccggccctaagaaacgccttactctttcctcgaccagtgatatgatatgttaaaccctcaagagtgacaagtggtccgctacttcacgatcaaccggactgttcccgttaaatcgctgttgacacattgtcggcaggggatatttcaccgcttcccacgcaaatttctgcatctttatcatacagaattgctttctaacgcagaacaaacaagaagtcaacacccaaacttctaaaaatgcgtaactttgcaccggtaagaccctcaagttattacgttgtttaatacaccatgataaaattaacctctgacagccttgccaattaatggagctatcagaggtttgactaaaatcagttatcttgaaaacgtaacgattcacatattacaatatcttccattatactattaccatccaatcggttgcttcaaattgggatttaagaccaattcatcttttgacagtggataataataatatttaggtgcaataaatttattggcatcctcatctgcatcagaatagaagcgaatatttcccttatcaccttcacttaaataaatctgttttggagcaccgttttcatcttctgtgtaatatacagaaagttctttcaattcttcatcagtatatcccattttatcattgggagatttgaacaatgccacatcaggcacaccgtcaccggtacaatcatatacaccgaaccccgggagataaacaccttcgaatggtctttcatagatgctgccggcagcccagcgcattgtatcatcgtaacggaaaccttcacatgccaattccacccgacgttcgcgacgtatttcaagtatgacgtttttcaatgccccacttacgcttggatataatgcttccaaagccggatctatcggaacatttatagtcatttcgggcatttccacacgactgcggagtaaattaactgttgcgttcagatcgttttgggtcaatatgccgagttctgcttttgcttccgcatttattaatagaatttcggcataacggatgataggaaggtcggttatattttcaccccacccaccataagttgcatctgtacgtggcaaaaatttgatttgccccaagccaccgtaatccaatacaattttagtgggcagcgtactattgtctccttcgttaataaatccaggatacataattgtctcagccatacgggggtcacggtcagtaaacatgtctacaaaagtcttggtacgatctgcctctgtgataggagttccatccgattttaaataactatcggccaggctacgactcaaattccattgccagtttaatactgttgaagtgttgttcttacgatttaaatctttatcataatcagagaataaaatcatttctttatttttgctcagatcaggattagtgaataaatcacgataggcagctgccccttttcctgtgatttcaaattgtccggaactcattatttcatcagtagcccaaacagctttttccaagaatgaattggcagtaccggccagttcacttatctcttcatgatatttacgaaaagtaccttcatgtaaggctatgcgtgccatatatcctaaagcagcgtaacgagtaacccgtgtacggctgcttccctcctgcatataatcgcaagcatattgcaaatcagccatcaccgagtcaacgaccaacgaacgtgaatcctgagttttgtataatgcttcttcatcatctgtcgcaattggagcagaataccaaggagcagacccataattcttaattaagccataatattgcaacgcacgacataaacgggccaaacctatataatgtttcttttcattttcgtcaccctccactttatgagcattgactaacataaaattgatatcatgaatattttcccatacgccatcctttttccatccaaatgatcctattttagtctcatcaatacgtccttttaatttttgactaaatgtataatcacctgttccatgaccgatattatcagaaaataaatcgtcatacgaggctccaaacatgccataaaagccattggtataagtttccaaatcggttacagttttaaagaatgcctcttcattcaagctatcttccggatatttttgcagataatcatcattgcatccggtaaaaagtgcacatcccataaaggtagctactgcatatataatttttaattgtttcatatcagtaaattaattagaaagttaaattaacaccaaaagaataagaacgttgtaaaggatatactttactgctggaatccaaggcttccgggtcgagattggccttcaggtgagtaatttcaaacaagttctcaccgctgaaatagaaacgcacacgttcaatattcaatttccgggtcaggtcctgtggtaatgtataacctatagtcaggtttttcatacgtaaataagaagcatcttgcatatatcttgtctgtacacaagccagctcgctacctgttgattcggcaatgtaagcctttacacgaggataataagcattgggattttccggtgtccagtggtccagattatgagtttgtacatttgtccaaggctgtgcgtaaattccccaaaaataatgatttccaccgcctgcataccagtctctcttacctatgccctgaaagaatccgcgaatatcaaatcctttccagtctgccgaaagatcaaaactataaggatatcggctcgaactattaccaattttgcggaaatcacccgggttagccaatgtccagtcacctttattgatttttccatcattgtttaaatcggcaaacttcaggtcacctacatagaatttatagctctggtcatcttcacctactgcactttggtcggcatggtttttaatttcctcttcagtctggaagaaaccctcagtagtcaatccccacatttcacctatttcctgtccctcataatagtctcccaaccgtttattcgggttatcatatttagtaatgaatgcacgactgtcggctaaagctactttaatactatagttaaacggtgagtctgccaacataaactgatctctccatcttaaagacaattcccaaccttttgttttcaggtcagcagcattagttttgggttcactggcaccaaatacacttggtaacgttttacttttagtcagcataccttccgtgtagcgcacatagtaatcaaagctggcagacaagcggttgttcaagagtgccaggtcaatacctccattaatagttctaaccttttcccaagtcaacgtattcgataccactcccggagcatacacggctaccggctgtgaaccatccaatatttgacctatttgtccggaactcatagtaggcagataggcataagtacctacattctgatttcctaaagcaccataagaagcacggaacttcaacatatccaaaccaatgctttgatttatgttttccataaacttttctttcgacaaaacccaagcaacagatccggaggggaagaaaccaaaacgatcttttttggggaaacgtgaagtaccatcataacgaccgttcatttctaaaatatatttgtcatcatagatgtaattaacgcggaaaaacatacctctcacagcccattcgctgatatcttcacctattcctttttctccaacggccaattcgggagtggggaaggaagagctgatcaaatcatcacgatacatagagaaagaattggtctttctggtttcctggttaaaaccgagtaaagcttgaacataatgtttatctgcaaacgtatagtgaaaatcagtatacacattatagacattataattatagaacgaggtagaacgagatgcacgagtcgggcgtccgctagcctgctccggtttattaggacctgttttatagtgataattgtgataagaattacgatttaattcactatcacgcctccaagtggcatctgctttaatttgccacatatcttttataatgtccaatgtcagaccaaatgttgttgagaattcacggctgtcatttattttgcgtccgccttcctgcaaagctccaagaatagcaccaccgctttgtgtccatgaaccatcgggattacgaggtacatctaatgagttagtacggtttacttcgtgaaagaaatcagatagtccccaatctgtacgtccgaagcttggctgatcgtaagttcgttgtacaaatgaggtattgttacttaagttcaaccaatttgttatctgaaaatcaactttaccgcgaatattgtaacgatcataaatatcatttccataacgtagcataccatcctggcgtgcatattcgcctgataagtaataagaagtctttttggctttttgagagatattgaagtttactgtataagagggagctgaagactcatatacttcatccatccaatcagtagagccataatacaaccaagattcaggatcatccggattgataactacccgatcttcattaggatgttctgaaaagtatttgccaatttccaattgtttttccggatatagattatataagggcgtagcagcatcgtgtttgattttcattaccgtataaggatcagtgacgtgttccggtacgcgtgtgactttacgagtcgaataaaatgcgtttacgttaatggcaattttctcggatttggcccgctttgttgttaccaaaataacaccaaaagcagcacgagcaccataaattgcagcggaagcagcatcctttaaaacagaaacactttcaatatcattggtattcaaccgggaaagctcacctgaagtggtcggtatgttatcaaccaaaattaaagggtcaccaccgtttaatgaagtttcaccacggatattgaatgaaggagtagaattggctgcaccattagaaatagtgatattcaggtttggaattacaccttgcaaaccttgtccggcattgatgataggcctatcttccaaagcttcggaagagattgcatcgacagcacccgacaagttcacttttttttgcgttccatatcctacaactactacttcatccaatagagaactgtcttcttgtagtctgattttctgcaatcctgctactgctttgactgtgacggtcttataaccgatgaaggaaatttccagcacggaacctaccggcgctttcaaagaataatctccatcaactcctgtgatagtaccattagtggtaccttttaccacaatgttagctccgatgataggttctcctgtcctagaatcgataacagttcccttgacatgggtatcctgctgatttactaccggattatgtgaatcctcacttaccattgaaattgcaaaagcatgtggagtgctacatgctaacaatgcaattactaagagacgttcactccttagagtgaaatttttcaaattcataagcattaataataaggtttactatatttaataaagacacgtttctttaattctctatccgtttaagttctagaagaactatgccgaaaaataatcaccttattatcaatacattaaataaatagcttttttattcccattcctcgatatatcctttttacaaagaacataagaaatggttttctactttatttctaccattacacaagaggtatggaaggcataatgaaaataaatacattgtgttaatggcgttaacaatgatacgaagataaatattaatacttgaatgcttaaactactattattatttctctttctttataaagataaagtaggctacttatattctaccatacacgttgaatagttaataaacatttatctgtgtgcgatttcaactataaatatggctgcatattatatgtttattatatatttgtagcatatattatttttcaaatggaaaacatagttcttctagtattaatctctttctaatatagaaacaggttaatatcacactgttaatcaacaatatacaaaagcacgaacgtcctttcctaattgctttttaaacccgacaacacgactttttcaagtgaagtaaacaataacaatgtatattccgacaccaatggtgctatataaaattatattcggattgaaatactatgcaatatagtaacgtcaaacattaaaggcttctatataagagtcacctctcaacaacaaagaaacagaccttgtttgctaaatacaacttaaaggaaagaaaccgaagaattaatggaaaagaaagcctttacgaaaaataataaaattacccggtcatgattacaataaactcatactatattgtatctttgggaaattaatccctatttagtataacatatctattattatgaagcaacgtattctactttattatttaatcgccttattgctttttcctttatgcaaagtacaggcgacccatcaaccggaattctctacagccggtttctatcagctggcaaattccggtcgcgatgttttctccatgaatcctgcctggcgtctgcacaaaggtgcggcaccgggagccgaagctatccactttgatgactggaactgggaagtggtctctcttcccaacggtatcgaatatctgccgaccgaagccagtggttgcattaactatcagggagaagcgtggtatcgcaaacacttcactcctgccgatgctttaaaaggtaaaaagcttttcctccattttgaagccattatggggaaaagcaaagtgtttgtcaacggcaaactgttggccgaacactttggaggatatctgcctgtcgtggttgatatcacaaatgcactgaagtgggaaacagataacattatagccgtatggactgacaatagcaatgaccccggttatcctcccggcaaagcacaggatgtactggattacacttacttcggaggcatttatcgagactgctggctgattgcccataactccgtcttcatcaccgaccccaactttgagaacgaaacagcaggaggcggacttttcgttgcctacgataaagtgtccgacaactcggcggaagttctgctgaaaacccatgtgcgcaatgaaagcaaaaagacctttacgggcgtagtggaatatgaactgcaacagccggacggacggcaagtcgctttcttaaacgataaagtgcaggttcgtccgggcaaagccattacctctaaagacaaaatcatcgttaagaaaccgatgctttggagccccgaaaaccctaccttatataatttaatagtccgtatccgcgacaatgaaggaaacacgatagacggctatcgtcgccgaatcggtatccgtagcattgaattcaagggcaaagacggtttctggctgaacggaaagccctacgaaagtcctttgattggcgccaaccgacatcaggattttgctgtggtaggcaatgcagtagccaacagtattcactggcgtgatgcaaaaaaattacgcgatgccggactgaaaataatccgtaatgcccactgtcctcaagaccctgcctttatggatgcctgtgacgaattgggattgtttgtcattgtcaatactccgggctggcaattctggaacgacgctcctgaatttgcccaacgcgtttacagtgatatccgcaatatggttcgtcgcgatcgtaatcatccttgcgtatggctgtgggaacctattttgaacgaaacttggtatccggccgattttgcaaaaaacacactcgacttagtagcacaagaatatccttatccttattgttactccggttgcgacagcgaggcacgcggccatgaagtctaccctgtccttttcacccatccggccaatgcggacaaagactgggctataaagaagctcgaccccaaaatcacttacttcacccgtgaatggggagataacgtagatgattggaattctcataactctcccagccgggtagctcgcaactggggagagcaggcaatgcttatccaggcttggcattatgccgctcccaactatccgtacacctgctatgacgtgctttatcgtacaccacgccaacacgtaggaggatgcctgtggcattcattcgaccaccagcgcggctatcaccccgaccccttctatggcggattgatggatgtgttccgccagcccaagtattcttattatatgttccaagcgcaacgctcgcccaagaaacaagaccgcttgttcgaaaccggtcccatggtatatatcgctcacgaaatgacaccgttctctcctaaagatgtaaccgtatattccaattgtgatgaagtgcgccttacatataataaaggaggaaagagcctgacatataccaaaccggttagccgggaaggaatgccgtctccaatcatcacatttaaggatgtatatgacttcatgatagacaaaaacatgtctatgaaagaaagaaggcaaaaggaagtctttctactggcagaaggactgataaacggaaaggtagtagccactcacaaagtatgcccggcacgccgtccttccaaattacttctttggatagataatgaaaacacagaactgaaagccgacggctcggacttcgtaacggttatagccgccattgccgataaaaacggcaacatcaaacgcctgaacaattactatgtgaaattccacatcgaaggtgaaggacgcatcctcggcggtgcaaacgtgttggcaaatccggctcccgtaaaatggggaacagcaccgatattggtacaatctactctgaaacccggcaagataaagataacagccagtgtattattcgaaggttcgcaaatgccggtcagcgcagaattggaactggaaagcaaaccctcggcatatcctttgatttatgcaagtgaagaggcagcacttatcccaatgaagtctgactcacaatcctttccaatcacagccaaatcccaaaaggaattggaaaaggaaaaagctgtaaaagagcaaaatgaacgaaaactgaaagaagtagagcaacaacaagccgatttcggcgagaaaaaataaatatcatgaaaatcctgtctacccatgacttgcaagccatcatgcagagggcagaaaatgcgctccgcttgcgtgagcaaagcaacaaaaagattgccgagaagagttgtggccttaccataggcaccgaccacctgcaaatccttgtttgtggaggaaccggctgcactgcttcttccggccatctcattgccgaacatctccaaaaggcattggaacagtacaatattgtccatcaagtggaagttatcaccaccggatgtttcggcttttgtgaaaaaggacctatagtcaaaatcattcccgacaataccttttacatacgggttacccccgaagatgttgacgaaattatcacgaaacacattatcaatggtcaccgagtggaacgacttctctatatcaacccgaaaaccgaacgtgttgtgagcgactccaagcacatggatttttataggaaacaacaacgcatcgcactgcgcaactgtggtttcatcaacccggaaaatatagaggaatatattgcccgccacggttatcttgctttggcagacagtttgctccataagcaaccgatagatgtcatcggggttatcaaacgttccggactgcgcggacgcggaggtggaggcttccctaccgggctaaaatgggagtctgctcacaaacaagccgctgataccaaatatgttgtttgcaatgccgatgaaggcgaccccggagcttttatggatcgttctatcatggaaggagaccctcattccattgtagaagccatgactatttgcggatacgccatcggttcccgacaagggttggtttatatccgtgccgagtatcctctcgccattcagcggcttaagattgctattgcccaagcacgtgaatatggtttgctgggtgaaagaattttaggaacagatttctgctttgatatagaaatccgctacggagccggtgcatttgtctgtggtgaggaaactgctctcatccattcaatggaaggaaatcggggagaaccgactttgaaacctcctttccccgcagaagccggctatttaggtaagccaaccaatgtgaacaacgtggagactctggcaaatatccccatcatcctgacaaaaggagccgaatggttctcctctatcggcacagaacggtcaaaaggaacgaaagtatttgccctggcaggaaaaataaataatgtaggcctgatagaagtaccaatgggaacaaccttgcgcgaagtaatctacgacatcggcggaggtattaaaggtggaaagaaatttaaagcggtacaaaccggaggaccttcgggcggctgcctcacagaaaaacatcttgatacaccgattgattttgacaatttacttgctgcaggttccatgatgggctcgggaggaatgatcgtgatggacgaagacgactgcatggtgtccgttgcccgcttctatctcgatttcaccgtagaagaatcttgtgggaaatgtacaccctgccgcatcggaaataagcgattgctggaaatattaaacagaataacacaagggtgtggaacagagaaagaccttgaaacgctgtctaccctcgggcatgtcatcaaggatacggctctctgcggactggggcagacttcccccaatcctgtactctcgacattaaataacttttatgatgaatatctggaacatgtcaaagacaagacctgccgttccaaacagtgtaaggctttgctcacctacagcatcaatcctgagaaatgtatcggttgtcatctatgtttcaagcattgccccgccgatgccattataggagacgtgcggaaaccccacgttatagacccgaacaagtgcatcaaatgtggcatgtgcatggcacgctgcaagtttaaagccatcaatgtttgttaacccaggacacacaacaacctaaatttcaatcctgtatttcaactcttaaagaatgaatattatggaagaacagcaaataaccctgcagatagaccatcattttattaccgttcctgccggcaccaccctattggaagctgcacgtaagatagggattgatatacctaccctgtgccacatcaacctgaaaggaacctgcattaaaaataatcccgcttcctgccggatctgtgtagtagaagtagaaggacgaaaaaatctcgcacccgcttgcgccacccgctgcactgacggtatggtcgtccgcactagtaccctgcgcgtgatgaatgcccgtaaaatagtggccgaactcattctttccgaccatcccaatgaatgcctcacctgtcccaaatccggtaattgcgaattgcagaatcttgccctccgcttcaatatccgcgaaatgccgtttaacggcggcgaactttcgccccggaagcgagaagttacttcatccattgtacgcaatatggataaatgcatcttttgccgccgttgcgagagtgtatgcaacgacgtacaaaccgtgggagcattaggagctatccgccgaggcttcaatacaaccatcgcacctgcttttgacaaaatgatgacagacagcgaatgtacttattgtggacagtgcgtagctgtatgtccggttggcgcactcaccgaacgtgaccataccaaccaactgatagaagatctgtcaaatcctgataaaatagttatcgtacagacagctcccgccgtccgtgccgccttgggagaggaattcggtttaccagccggaacattggttaccggaaagatggtttatgccttgcgcgaactcggctttaattatgtattcgatactgactttgccgccgatctcaccattatggaagaaggctctgaaatactcaaccgactcacgcgctacttaaatggcgaccgttctgtccgcctacctattcttacctcctgctgtccggcctgggtaaacttcttcgagcatcaattccccgatatgcttgacattccttctactgcccgttcaccacaacagatgttcggttcgatagcaaaaacctattgggcagaaaagatgggtatcccacgagagaagttggtggttgtctctatcatgccttgcctcgccaaaaaatacgaatgtgaccgagatgaatttaaaacaaacggtaaccctgatgtagactactctatctctacccgtgaattagcccgacttatcaaacgcgccaacatcggtttcactctgttacctgattccgaattcgacaatccgatgggagtctcgacaggggccggtgtcattttcggaaccaccggcggagtaatggaagccgcccttcgttccgtctatgaaatctatacaggtcatcctctgcaaagtgtcaactttgaacaagtgcgcggactaaacggagttcgtcgtgctacaattgatttgaacggtttcgagttaaaagtgggtattgcccacggattaggcaacgcacgtcatttattggaggatatccgcaacggacacaataaatatcatgtaatcgaaatcatggcatgtcccggaggctgtatcggcggaggcggacagccgcttcatcatggcaattcagaagtgctctacgcccgtgccaatgcactctatcgtgaagatgccggcaaaccgattcgcaaatcgcacgataatccgtatatcaaaacactatacgaagaatatctcggcaaacccttgagcgaaaaatcggagaagttactacatacacattactttaacaaatccattgactaacctcttaaatatagaaaacaatgtctgaaataaaacttgcctgtgaagtggcagaacaagtcaaagctatttgcgacaaacatggaaatcttcccggtgaactgatcaacattttacatgaagcccaacatctgcaaggttatctgccggaggagatgcaacgtctcatcgctcataaattgaatatccctgtatccaaagtatatggcgtagtcactttctataccttctttaccatgacacccaaaggaaaatatcctatctccgtttgtatgggaactgcttgctatgtacgcggctcagaaaaattattggaagaatttaagcgtgtcttaggtatcgaagtaggtgagacaactcccgatggaaaattctcattggactgcctgcgatgtgtaggggcttgcggattagcaccggtagtaatcatcggtgaaaaagtatacggtcgtttgcaatcggtagatgtaaagaagataattgaagatttggaataaaccggaagcctttttcaacgacattattgagccttttaccaccaaaaactcttaattcgtcgaaaaaagcctttctttcattgaatagatttgaaaagactacaaattacatttacctttgctgattgaaataaaaaacttgcaaaagcaaaactatgatgaaaaaggcaaaaacatttctccttttaggcattacattgtgcatgttcggatgcagcgatgatgatgatgacaagtcgaatacgacatctactgttcctttctctttaacagcttctctggaagtgcgcaacgatgctgcaacaactccgggtatgctgcaaggcaattggaatgaaggtacaaaactggcagccatgcactccagcttgacaggagtaaagaaaagtatcttcaccctgtcatccacttctaccgacctgtttaccggagacatctcgaataaagtaaaaagtgataaagaaatcgcagtattttatccggctgatgccattacagcaaacagcagtgatacattgacccaacaactgagtcttgccaatcaggacggaacattggcaggagtggcaaattatgattattcatgggctttgtgcaaagtgaatatgactgcacagtcgggctcgggcagttgcgaaatgaagaatctgatgaccatcggtaaatttgagtttaccaccgatggaagcacactactgaatgacatctcacgcatcactgtgacagccacttcgggaaagctttattccaatgcaaccttaaagttgaaagatggagaattcagtaacaccacagaaggaagctttactatcaagaatgatgccggattaccgggtagtgcttatatttctttcttcccttcggaagcacaactacatttcaccttggtaaccaatgcaggtaacatatatgaagcctcaacaacagaaagcattacattggaaaaaggaaagtattatgcttctgctgcccttacttgcactccggtagctcctgccaaagtaggcgattactattatagcgacggtacttattctacggaaatgaatgaagaaaagacatgtatcggaattgtttatgccctgaacgataaaaatggtaatctagacaaaaccctcaccacatctccttacggacgtatcgtggcactaaccaatgcgcgaaacaaagtgagatgggcaagtaaatcggaggatatcgaaggattgaaaaacgatactattatcaatggcacacagcaaatcggttgtctgccctattttaacggtactgcagattcctatttctccgataatgctgaagaacaaatcaaaggaactaccattaatacagaaacaggattgattaccgcctggccgtcggaaggcatcctgagcgacttcaatggagcaacaaatacatcttatatcaacaaaagcacctctacttatccggcaggaagttattgctaccaatacagcaaacccggaaaaggagcaggcgaatggtatctgccggcagtgggcgaactggcactgctttgggagttacatcatgccggtgtgatatgtaacgccaagcaggaatgtttcaaagatttcgaccagcagagttattggacttcttcggaaggcaataaaaacaaagcatggtatttgaacttcttcagtggaatattaatggcaaacagcaaaggaagtacttacaatacacgcccggtagctatgttctaaacacaagctatcagatactaaaaaagggagtgtatcaaaactaaaccggcctatccaattgtcagctgtaggggcagggtttgcctgcccgaagacacaaagcaaactgttttcgggcgagcaaacctcgcccctacgaactaaacgacagcattatccacgttttgacacaccccgttttaaaaaaaatataatcaatacactatcttcccgaagctgccgccggtttcttattctgcatctgtttctttctgcgccaatagtcaccgttactcttgcttccgcgatatactttatttgtctttgccttctcttttatctcttcagccttttcttttcgaagcagcacaccggaagtggaaataaaaggatgctctttcaccacaggaatttccaatccgattaacttttgtatatctttcaaataagccaactcttccgattcacaaaaagagatagccaccccatcgtgtccggcacgtccggttctgccaatgcgatgtacatacgtttccgatatattaggcaactcataattaataacatgagaaagcagattaacatcaatacctctggcagcaatatcggttgcaatcagtacacgggttgaccggtccttaaaattattcaatgcacgctgacgcgcattctgcgacttgtttccatggatagcttccgccaccacactattcttattcagtatctttgccaacttatccgctccatatttagtacgcgtgaaaatcagtactgactctattgatttatctttcagcaaatagagtaacaaatcctttttttcgtttttctctacgaagtaaacgctttgctgaatggtatccactgtagatgaaacaggagtcacttccaccttttccggagacgtaagaatagagtttgccaatttttctatctcaggtggcatggttgcagagaaaaaaagtgtctgccgcttgtcgggaatcagtttcaatacgcgctttatatcatgtataaagcccatatccaacatacggtctgcttcatcaagcacaaaataatcgagccctttaagggaaatatatccttgcgcctgcaagtcgagcaaacgtcccggagtagcaatcaatacctgtactccccttttcaatgcatctatttgtggtttcggaggaactcctccaaaaattaccgtatgctttacgcgcgtataccgggcatacgcatcaaagctctcgcctatctgaatggccagttctcgcgtgggagtaagtatcaatgccttgatacctttcttactatctgattgataaagtctctggataatggggatggcaaaagctgccgtttttcctgttcctgtctgcgcacatcccagtaaatctttaccttttaataataccggaattgcttgttcctgaatgggggtcggcgttgtatagccagtttgttctaaagccttcaatatcggctctataagatctaattctttaaatgtcatttgaaattattaagcaggcctcacggcctttctatttgttattctacaaagataagagaatgattcgttataaaggtattcaggctacggagtttatgcttatttaacaagattgacaataaaaagggcgtatagtgagaacaacatcaccatacgccacataacctattatatataagctatttacaaataaaacaataacataaagacttctgaacaagctaattggcaagaaagattatcgggtacagaatgtatagacatttcctccaaaatccgctgcaatcagtgcattacccgaaacagcgacggagccgaaaataggcgctccggtagcatatttccaaataatctttccatcgtctttattgataccatacaccgctccgtcggaagcagtcacataaacggtcttccccgccagcaccgggctggtctcaattgtagctgcacccttgcgaatatacggactggtataaaccaatcctgctcctaccggacaaacccatttttcttccagcgtttcattatccagcgcaatcagccccttctctgccgaaccgaaaataatctctttgtcggtaagtaacggagtggaagtcacatctacattataaggcaaaggtttgcgtacaatcacctttccggtagctgcttcgagaataaagaaagattggttggagataagatacaacaacgaaccatgcatggcaaccgatgaaccgcgattacgcaagccgttgtcactggcttcccacaatttctttcctgtcttggcatcatttccataaagtgcacgccactgtgcagaaccgattaaaagtccgttaccttgtgtcagcgtggtagtagttccttcaccctgtccccaatcttcattcttccaaagctgtttgccggtacgggcttcataagcaccgagtccttttccggttccggcatatacaataccgtcattggctaccaagccgtcaatcaatgccggcaagccgttgacaggaagttgtttttcccaacagagttttcccgtttctgcatcaatggcatacagccaaccttgcgcatcttgagcgaaaaccacacc

SEQ ID NO: 6671 - DNA, 2117 bp, Unknown
  gut microbiota DNA sequence
ttcagattctcgtcaacagaagctatatataccttaccattgtgcaccaaaggagaagtcatataaatattggcttctacattcttcgtccaggctaattgcagaggtgcttccagaggcggacaaaccggagcgacatgtgtagaagttcccaacaagttattccagtcggcacccaatgacacttttacctgttccggtcggacaataaaggcactttcggcataagcggtctcaccattattaaaacgagccgtcacctgcaaggtcagttccttgccttgatacttggcagacagaggcatatccccattccaggtccagtcggtagcctgaacgagtttcttgtttttgagtatggcttttccgtcttgcaggcaactataaaccacctctttcaccggagttgcagacgaataaacatttactgtaacaggaacacgattggcaaaggcagtaccggcaggagaagctatacaaatattcttatccaaataagaataacggagttcggaagtgaaatcaccgttcttatccacatgcattacacggaaagcactggtagaatggtcaatcccgcccttatccaatgtagcggtagatacactatacacatctccttgcttcttcatataattaatatgccaatgaccatatacccacgctttcaggttatgctcgttcaggttaatgctgcctccgttgtctcctttaaaaacaaaagcgtcatcataagtcagcaagtcatgattaaacaccataataggtgtcccgggttttacatgggcaaggtcgtttttcagccaaagataaacatcctcacgggtataaccgggagcatggtcaccgcctgccatcggagtgacaatataatgcacacgtccggcgtcaaacgaataataaacagggccgtagatattttcaaaaagctcttcgccgtatttacctttgacaaggtcatggtttccgatacaatagaagacagggcagtccatattctccgtattcatcagtttgatatgctctttcagccctttctcataacagatatcgccggtatgaatgataaaagcggcatgctcattcgctgcatagtcacgtacattatttacccattcatcatgattcttggtattgaaaatctctgtatcggcaatatggatatatttatgggagccatccttacccaaacctccgtcataaggcatcagcccaaagtcgtaagaagcctgcttatcttctattttatgataatggcggttataagtcttatagccggaaggagtagtaataaaaataaaacgttccccggcatgaccgggaagcgtaaaactaccgtcagcagctgtttccacaacattcaatccgtcagaaaccttgacgccggacatcggtttctctcccttatcaaacacaccgttcttattcttgtctacataaacatgtccggtgtatgctgccattacaggaaaagaagcaaccaacaggcaggaaattaaaaaggtctttttcatcagtatatatttaattgaataatcatacaatctatttcaaaacaaattcggacaaaacaaatccatggtcagaaggatagaagaaatcctctccctcaaaagtgaatgtctttcccagactgttatcataacactctgaagtagtggcctgtatggtctttccccggtaatagataaagtcgatacggtctgcccggcattccgtttccaaagagtccgcatcagtcagccaggtcactcccaacttggccgccgcatcaggattcatttcgcggaaactatccttaaagccggctttttccatcgcaacagaaaccggccaacgtacgaccgccccgccgtgattatacaaattacgcgtctcttccgtccagtccaaatgcgaatgtacattgaagtctccccccatgatgacaggtatgctatcggcctccgccagcatcggtttcagtacggaaagaatcttccgtatctcgtcatccctcgttccggcagtttcccaagccagaatttcttcttccgtcttgtccgtgggaaccaagcgcatatcgggcaaataatgcaaccaagtgtcgaagatgcgcaccggagtgccatccatat

SEQ ID NO: 6672 - DNA, 688 bp, Unknown
  gut microbiota DNA sequence
cacttttttttagatttgacgaactacaaatatacaacatgaaaaagcgtttgtcaagagagaagacaaattaatcaaacccgggtacaggatatgacggagcctgacacaatgacatatatacgtgcaggctcatgcgtacgtaggtgtagctcgatacgtatatacgtgtgacctgatgcgtatatacgtgtggcctgatgccaccgtatgtgcagcccgatgcgtacgtacacactttacaaacagggggatgtgtcaaaacgtggataatgctgtcgtttcgttcgtaggggcagggttcgcctgcccgaagacacaaagcaaactgttttcgggcgagtgaacctcgcccctacagctgacgatgggatagcacggtttagttttgacacactcccatgctgcaaaaaagaccttgatgttttcaaaaaagaccttgatgtttcttaaaaacatcaccatcttttttaaaaagcccggtatgtttttatgtaagggaagatggaaccaccctcaccaagtcggtcatttctccttttccgttcatccttacatattagccaaaacgcattatcaatcaatcgtttaacactgacagagcatcccttcattcccctttcagccgtgcttcccaagttgctttcagatctgccttcagcatttgtttgccggaagaatttgtccc

SEQ ID NO: 6673 - DNA, 385 bp, Unknown
  gut microbiota DNA sequence
ttcttttcaccaaaatattataaaagcggctctcttattccgcaatcataatcactacacggttccagtcatttgttgtgaaaggctgcacctcggaacccttgctgtccacactcagtcggtctgcactgatgccgtacctgttaatcagttcgtcggccaccatgcgtgcacgttttttggcaagctcggcattgacctttgcacttcccgttcccttgtcggcataaccggtgatggtcgcctttgagcggggatactgcttcatatagtccgcaatggccaggatgttgacctgctggtcctcggcgatgtccgtctttgccagcccgaaggaaacgtggcttttgatgcccggcacgctcttttccacctcgggacacgg

SEQ ID NO: 6674 - DNA, 11378 bp, Unknown
  gut microbiota DNA sequence
gaaattggatattcgtatccatcaattgagtgatactaactaatcaattatatatattatgaaacatttaatgagcctggcagggctgtctgtggcaggtttaatgcttgtatcctgcaacacacaagtaaaagaagcaaattatcaggttatcccgttaccgcaggaaatctcggtaatggaacaggctgctccgttcattttgtcggacggtacaaagattatgtatcccgaaggtaatgagaggatgcaaaagaatgcagagtttttggcaagttatatcaaagatttgaccggaaagagcctgagcgtacaagccggtacggaaggcaagggaattcttctgcaactggggggaagttcggaaaatcctgaaggttatcaattaaaagtaacggatgctaatgtggtgatatccggtccgacagaagccggagtattttatggtatccaaactttgcgtaagtctattccggtggtgcaaggtatggatatagcccttcctgcagtagaaatcagtgactatccccgtttttcttatcgtggagcacatttggatgtgtctcgtcatttcttcccggttgactcggtgaaacgttttattgatatgttggctttgcataacatcaatcgttttcactggcatatctctgatgatcagggatggagaattgaaattaagagtcgtcccgaattgacagaaatcggttcaaagagaacagagactgtaatcggacataatacaggtaaatatgacggtcagccttatggtggtttctatactcaggaagaagcaaaagaaatcgtagcttatgctgccgaccggcacattacggttattcccgaaatcgatatgccgggacacatgcaggctgctttgactgcttatccggaattgggatgtacaggcggtccgtatgaagtatggaaaatatggggtatatcggatgatgtactgtgtgccggaaatgatgagacactgaagtttattgacgatgtgttgggtgaaatcattgagattttcccatctgaatatattcatgtaggtggtgacgaatgtccgaaagtgcgttggaagacttgtccgaaatgtcaggcacgtatcaaggcattgggtataaaaggtgataagaagcattctgcagaggcttatttacagagtttcattattactcatgcagagaagttcttgaatgataaaggtcgtcagattataggctgggacgagattttggaaggtggattggctcctaactcaactgttatgtcatggcgtggcgaatcaggtggcatagaggctgccaaacagcaccatgatgtaattatgtcaccgaatacttatctgtattttgactactatcagtctaaagatgttgagaatgagccggaggccattggtggttatctgcccatcgaaagagtgtattcttatgaaccgatgcctaagtccctcactcctgaagaacaaaagtatataaaaggtgtacaggctaacttgtggactgaatatattcctactttcagtcaggtagaatatatggaattgccccgtatggctgctctggcagaagtgcaatggacaatgcctgcgaagaagaattatgaagacttcttgaaacgtttgcctggattggtagatgtatatgatgtatataagtacaattatgctactcatgtatttgatgtaaatgctgttttcactcctaatccgcaggatggaacattggatgtgactttgtccactattgataattgtccgatttattacacgttggatggtagtgaaccgaccgcagcatcggcacagtatacagaacctttgaaactcaaagaaaactgtactttccaagctgtggcagttcgtcctacaggaaacagtcgcattgtgaaagaggatatagctttcaacaaggcaagcatgaagcctgttactatgttgcaaccggtaaataaacaatatgaatttaacggtgctcccactttggtagatggattgaaaggtaatggaaattacaagacaggacgttggattgctttctataaaaatgatatggaggcagtgattgatctgaaagaaccgaccgaaattcaaagtgcttctatttctacctgtgtagaaaagggtgactgggtatttgatgcccgtgctctttctgtagcggtatccgaagacggtcagaactttaaagaagttgcttcggaaaaatatccggccatgaagcaggatgacaaaaacggagtatttaaccatactttgacattctcaccggttacagcccgttatgtcaaagtgactgctttgacggaacatagtattcctgcctggcacggtggtaaaggaaatcctgctttcctgtttgtagatgagatttcgttgaactgattaattcatagcttgtgtgacgaagaaacaactatatggaaaattactggctgtattagtgggtggcttattggtatgcagtgcatgtcaccacactgatacgtcaggtgctgaaatatctcttgagaaaatgaacggcttcccttcggggaatgccgcttttctcaagggagtttctgctttatatgcaggaataacagaagaccgtttaataatggcaggtggatgtaatttcccggatattcctgttgccgatggcggaaaaaaggttttttataatgaagtttatgctacacctttatcatcagatacagccttccggtggaagcaagttggctttttgcctgtagcatcggcgtatggagtaactatttctacacaaaaagggttaatttgtgttggaggaactactgttgatggtagtatatctgatgtatttcttttatctttgcaagaagacgtcttggtaactgacactttaccttctttacccatgactatcgataatatggcaggtgctttaataggtgatttgctttatatcgtaggaggaaacgttaatggtgttccctctgcggatatgtattcgcttgatttgtcaaatatggataaaggatggcagaaagagcccggtgtgcccggcgagccgagagttcaaccggtgtgcgtggcacaagggggaaaactttatgtttggggaggctttgccccggcagcagatgggcgcgaagcaaccttgtctgtggacggttatgtatattcgcccgagacgagagtatggacttcggtagcgactccggtcgataaagaaggaaaaagcatttcattgggaggtggagcagccgttccttggggagaagaagccattttatgtattggcggtgtcaacaaggatatattcctgaaagctttgcagggcatttattcgggaaaagaatatctgtcacatccggcggagtggtatcagttcaataagaatctgttgctttattatcctgcaaaagatgaatggagctctttgggcgaatatgaacagggagcacgtgcaggagctgctttggttgctgacggagtttatgcttatataattaatggtgaattgaaaccgggtattcgtaccaatgaaataaatagaattaaagagaatagaaaatgaggaaacttacactattggcaagtgtggcggtgagcctgttgctggcgggttgcgccaaggaacagaaagagacactttctgtgattcccgttccattgagtgcagacttgcagaagggtgcttttcaattgaatgatcaaacaaaattatggatagatgcacctcaggaggataaaacgagactggcagattatatcgccggctctccttttcaattggatgctgctttggaagaagtagtcgacaatgttgtcattcttcaacaagtagaccgtttgccggatattacttcgtccgaaggatatgtgctggaagtaactccgaagcaggtgaaaatccgggctgcttcgggtgcgggacttttttatggtgtgcagacattcctgcaaatggtgaatgaaaaaaaggaattaccggtaggaaccgttaccgatgagccgcgctttgcttatcgtggtatgatgctcgatgtttcccgtcatttctttgatgtgaattttgtgaagaagcagattgatgcttttgcctattacaaactgaaccgtctccatttacatctgactgatgcggcaggatggcgtattgaaatagataaatatccccgtcttactgagtttgctgcgtggcgtgaatttcccacctggaaagagtggtggaacaatggtcgccaatacagtgaagaaggtagtgagaatgcttatggaggttattacaccaaagaggatatccgtgaattggtagcttatgccgaatctcgttatataactatcattcccgaaatagaaatgccggcacattcggaagaagtattgactgcttatcccgaactgtcctgtacacatgaaccctataagcaggctgatttctgtgtgggcaatgaaaagacttttgagtttctggaaaatgtactgacggaagtgatggaattattcccgtccgaatatatccatattggtggagacgaggcaggtaaagcatcttggccgacttgtaagttatgccaggcacggatgaaaaaagaaggtctgaaagatgtgaatgaattgcagagttatttgattcatcgcattgaagtatttctgaatggccataaccgtaaactgttgggctgggatgaaattcttgaaggaggactggcgcctaatgctacagtcatgtcatggcgtggaacggaaggaggtatgaaagcagtggaatccggtcataaggctattatgactccgggtgaattctgttattttgattcttatcaagatgcaccggattcgcagcccgaggctatcggaggctatctgcctttatccaaagtctattcgttcaatcccgttcctgatacattaagtgccgaaaaggtgggactggtgtatggcgtgcaggcaaatctgtttacagaatatattccgacacccgagcatgctgaaatgatgatttatccccgtgttcttgcgttggcggaagtggcctggagtgcaccgtcaaagaagaattatgaagacttccatgtacgggctttaaaagcagtggaagaattgaaaaaatccggttataatccttttgaacttaagaacgaaatcggtaatcgtcccggagctgataagccggtggaacatttggcagtagggaaaaaagtgacttatggtcttgatgcggtttattatcccggatatgctgcggggggagatacggccttggtcgatggtgtccgtggcggatggacctatggtgataagcgttggcaaggtttcattgacaagaaaagaatggatattacgattgatttggaaaaagaaacggaacttcattttatcggtgcagactttatgcaggtctgcggaccggaggtatttatgcctgccgaagtgataatttctatatccgatgatggtaaagattttacagaattgaagcacatcgagcataaagtagtgaaagatgataaggtaacttttactaattttggttgggaaggtaatgcgaagggacgttatgtacgttatcaggcaacttccggcgagtttggtggcttcttgtttacagatgaagttgtaattaaataaatgactatgatacgaaaactgagtattttgaccggtgccgcattgttttctttgctgactgcaatggcgcaaaaagaaccggccgattatgtaaatccttttgtggggactactaattatgggacaactaatcccggtgcgctttgtccgcagggaatgatgtcggtcacacctctcaatgtgttgggggctgttcccgaaaataagattaacaaggatagtacctggtggtctactccttacgagtttaataataagtatatgacgggatttgctcatgtcaacctgagtggtgtgggttgccccgaattaggctctttgttgctgatgccgaccaccggaaagctgaatgttgattttaatacttacggaagtgtgtacagcaatgaatcggctactcccggctattataccaatgtattggataagtataatgtgaagtgcgaagtgactgctactccccgcaccagtatggcacgtttcacttttccggcaggacaaagcaatatcttattaaatttgggtgaaggattgacaaacgagagtggtgctacagtgcgttttgtcaatgaccgtgagattgaaggaaccaaattactgggtactttttgttataatccgcaagctgtattcccgatatattttgtgatgcgcattaataaagttccggcaaagcgcggctactggaaaatgatgcgtccgatgggtgtggaagcacagtgggatgacacggcaggcaagtataaactttacacttcctatacaaaggaaatgagtggtgacgatgtcggtgcatggtttacttttgactcgacagtgagcgaaacgatagaagtcagcatgggggtatcctttgtgagcattgagaatgcacgtttgaatctggaaaaggagcaaccgttcggaaccaccttcgacaagctgcgtgccgaagcgcgtaagatgtggaatgatgacctttcacgtgtcacagtcaaaggcggaactgaagaacaaaaaggagtattctatacagccatgtatcataccctcattcatccgaatatccttcaggacgttagcggtcaatatccgcagatggaaggcgataagattctgactaccaaccgtaaccgttatactgtattttcattgtgggatacataccgcaacgtacaccaactgatgacattagtgtatcctgagcgccagatggatatgattcataccatgctcggcatgtataaggaacatggatggtttcccaaatgggaactttacggacgtgagacactgacaatggaaggcgatccttctattccggttatcgtggacagttggatgaaaggtcttcaggacttcgacatcaacttggcatataaaggaatgtataagtctgccactactccgggtaaggataacctgatgcgtccggataatgatgactatatggcaaagggatatgtgccgatggaaagccaatatgataattctgtttcacatgccctggaatattatgtggcagattatgcgttgtctactttggctgaagaattgggaaagaaagaagatgccaagttgttccgcaaacgttccatgggttataagaattatttctgcaaagagtttggtactcttcgtcccattacgaaggaaggcagattttatgaaccgttcgatcccaaagaaggagcaaactttgcacccagtcccggtttccatgaaggaaatgcatggaattacacattctttgttcctcatgatattaaagggctgacaaaattgatgggcggtgacaagaagtttgtagataagctgcaaagtgtgttcgatgaaggaaattatgatcccgccaacgaacccgacattgcttatccgtacttattcagccgtttcaaaggcgaagaatggcgtacccagaaattggtaaaagagttgttggccaaacactttactaccaaccccgacggtattcccggaaatgatgatacaggtactatgtctacatgggctatcttcagcatgatgggattgtatcctgattgtcctggtgtacccgaatatacattaactactccgacttttgatgaggtaactattaaacttgaccctgaatattggggtaaagataaactggttatcaaaaaagaaggccatggagattacatcaaggaaatcagattaggaaataagaaagtgaacaaataccttatttctcatgatgacttgataaaggcgggagagattacttttgttgttacagaccatatcaataaataagaaaaactatgaatactaaacgatttttatgtgccgcattgggagctatctgttcccttgctttcatgcaagcgcaggtaagaaccgagcagacctttgaaaaagggtggaagttcactcgtgaagacaatgcagactttgcgaagcccggatttaatgatgccaagtggcagaatgtcaccgtccctcacgactgggctatctacgggccattcagtataaataatgataagcaggagatggcaattacccaggacggacaaacagaagcaatggaacatgccggacgtaccggcgggcttccttttgtgggaacagggtggtatcgcctcaattttgatgctccttcttttgagaaaggcaagaaagctacattgatatttgacggtgccatgagtcatgcccgtgtatatatcaacggacaagaggcaggatactggccttatggctataattcattttatgtggatgccactccttatctgaaaccgggagagaaaaacgaactggcagtccgcctggaaaacgaacgtgaatcttcacgctggtatcccggggcaggattgtatcgcaatgtacatttggtggtgacagaagatgtacatattcccacatggggaacggttatcacaactcccgttgtagaggacggtttcgcaagagttaatgtgaagaccgatttagtgatgcctgaaggaaaaaacgtcggtaattaccgcattgtaactgaaattctgaaccccgaaggaaagagaatttcttcggatgacagaccgggagataaactggacgggaatttctttaatcagaattttgttgtgtaccgtccttctttatggtcgcctgaaaatccggcattgtataccgcagtttccaaagtatacgatggagagacattgaaggatgaatatacgactcgttttggtatccgtacattggagattatccctgacaagggcttcttcctgaatggtaaactgacaaaattcaaaggcgtttgtaatcaccatgatttaggtcctttgggaggagcggtaaatgatgcggccatccgccgccaaatccgtatcttgaaggatatgggctgtaacgccatccgtacttctcacaatatgcctgctcctgaactggtagaggcgtgtgatgaaatgggtatgatgttgatgccggaatcatttgatgaatggaaatcggcaaaaatggcgaatggctatcacaagatattcgatgagtgggttgagaaagacctggtaaatcttattcgtcactatcgcaataatccgagtgttgtgatgtggtgtatcggtaatgaagtgcccgaccaatggaatggaaataacggacctaaactttcacgtatgttgcaggatatctgtcatcgcgaagacccgacccgtccggtcactcagggtatggatgctccagatgctgtagtcaacaataatatggcggctactatggacatagccggattcaattatcgtccccacaagtatcccgaaaactataagaagctgccgcaacagattgttttgggcagtgagactgcttctactgtcagctctcgcggtgtgtataaattccctgtgacgcgtcaggccatgaagaagtatgacgaccatcagtcttcatcatacgatgtggaacactgcggatggtctaacttgcccgaagacgactggatttggcatgatgacaaaccatgggctatcggagaatttgtatggacaggttttgattatctgggcgagccgacaccttattatactgattggcccagtcactcttctttatttggcatcattgaccttgccggtctgccgaaagaccgttactatctctaccgcagccattggaataaggatgaagagactcttcatatccttcctcattggacatggccgggacgggaaggagaagttactccgatttttgtctataccaactatccttcggcagaagtgtttatcaacggtaagagtcagggtaagcgtaccaaagacttgagcgttactcctgaaaatagtgctgattcagcatctacagccaactttaaacgccagcaacgttatcgcctgatgtggatggatacgaagtatgaaccgggaacagtaaaagtagtggcttataatgacaaaggagaagcagttgccgaaaaggaaattcacactgccggcaagcccgaccatatcgaactggtagccgaccgtaacgaaatcaaggcagatggtaaggacttgtcatttgtaactgtaagagtagtagacaaggacggtaatttgtgccctgatgctcaacatcttatcaaatattcggtgaaaggggcaggaacttatcgtgccggagctaatggcgaccctacatcaatagagcttttccatcttccacagatgaaagttttcaatggaatgatgaccgccattgtccaaagtaccgataagccgggcgaaataacattgaccgcaaccggtaaaggacttaaatcaggtaagttggttttaatgagtaagtaaagagatttgtttaaattccctctatctgtgccccgcttgattttattaagcggggctttttatattaaaatagttagaaaataattcgggatatctgcagttagctctgaaaaagttgctaaatttgttcccatatttaatatgctgtttagaaatcttaatattttattactatattatgttgacccaaatcataaacgcgaagatacttacccctcagggatggttaaaggacggttcggtcctgatgcgtgacaacaaaattttagaagtaacaaattgtgacctggctgttatcggagctgaactgattgacgccaaaggtatgtatgtagttcccggcggtgtggaaatccacgttcatggcggtggtggcggagactttatggaaggtaccgaagaggctttccgtacagctgttaacgcccacatgaaacacggtactaccagtattttcccaactctttcttcatctaccgtgccgatgattgaagcggctgccgaaacctgtaccaagctgatggcagagcctgacagtccgatacttggtcttcatcttgaaggacattaccttaacatgaagatggcaggcggccagatgcctgaaaacataaaagacccggatccaaaggaatatatccctattgtagagaagtggggctgtatcaagcgttgggatgctgcacccgaattgccgggtgccatgcagtttggtaagtatattacaggaaaaggcatcttggcttctgtggcacatacacaagccgaatatgaagatatccgtgcagcctgggagtccggttattctcatgctacacatttctataatgcgatgccgggcttccataagcgtcgtgagtataaatatgaaggtacagtagaaagtatctatctgatagacgatatgacagtggaagtggtagccgatggtattcatgttcctcctactatcttgcgcctgatatataagattaagggtgtggaacgtgcttgtgttattaccgatgctt

SEQ ID NO: 6675 - DNA, 411 bp, Unknown
  gut microbiota DNA sequence
atggtcctctccagaaaggaggtgttccagccgcaccttccggtacggctaccttgttacgacttagccccagtcaccagttttaccctagggcgctccttgcggttacgcacttcaggtacccccggctcccatggcttgacgggcggtgtgtacaaggcccgggaacgtattcaccgcgccgtggctgatgcgcgattactagcgaatccagcttcatgaagtcgggttgcagacttcaatccgaactgagagaggtttttgggattggcatccacttgcgtggtagcagccctctgtaccccccattgtaacacgtgtgtagccccggacgtaagggccgtgctgatttgacgtcatccccaccttcctcacatcttacgatggcagtcccgacagagtcctcagcat

SEQ ID NO: 6676 - DNA, 13756 bp, Unknown
  gut microbiota DNA sequence
ctaccttgctggtgagaaacaaggctttaacaagcgagcaacaaatgcggtacaaaaatgagctgaataagccctataaacgataactatcgcttataaggctaaaaagaaaggcgctcaaaatgaacgccttgataatcgttgatgatatatgctaatcgttggtaatcaccacttacttgccgatgcagaagtttttaaatatattttcaagcacttcatcattagttacatctcccacaatatctgaaagatggaagatacattgtcttaaatcctcgcttaccaaatctcctggtagatccgattgtaatccttcctgtactctatgaatggagttcagggcttggactaatgcttcgtaatgtcttgcatttgtgataataatatcattaagactgatttccggcaaagtagctgcttgcactaatttctcttccaaagtggttatgttttctcgtttcttagcggaaataaataacttctccgtttcaatattggcaaacatagttgctagttcttctttttgtatgggcagtaacaattctgatttattgaacagaataatcagtttcttactttggcaatgcggaagaatttcggtttgtaactcttcgagccgccctttgacatctgtagagtctatcatccataaaatgatatgggattgttccatttttttaaaagtgcgctttatccctagactttcaatggtatcggatgtctgacggatgcctgcggtgtcaatgaaccggaaggtaatgccttgtaaatttattgtatcctctatcacatcgcgggtggttccatggatatcgcttacaatggctttttcttcatttagcaatgcattcaataaagtggattttccaacgttcgtttctccgataatcgctaccggaataccgtttttgatggcgtttcctacgctgaaagagtgtgctaatcgtgcaatgacttgttcgatatgggcagcgagttcgttcagttcactgcggttggcgaactccaattcttcatggtcgctaaagtccagttctaactccattaacgaagtgaagtgtagcaactgattacgtagttcggcaagttctttactgaatccaccgcgcatttggctcattgccaaacgatgacttgcagcagaagaagaagcgattaaatcagctacggcttcggcttggctcaagtccatctttccgttcagaaaagcacgttgggtgtactcaccaggcaatgcggatcggcatccgctctggatgaggagttgtattacttgttgtaaaatataggatgaaccatgacacatgatttctgtgctgtcttcaccggtataagaatggggggcacggaataaagaaaccaatacttcgtcgataacttctccttgtggagaaaggatttttccgaaagtaagagtataaggctttcgctcggttaatggttttccttgtacagggataaataggtgtgaagttatttcaatagctctaggaccggatacacggataattccgatggctcctccttgagcggtggcaattgcacagatagtatcttggtttatcattttcatcttaatagtacaatgttttagctatgacggcagctactttttccaagtagtagcggtctatttcattaaaagagtttaatacgtcgctatcaatgtccaacactccttttacttgttcatcagcaaggatagggactactatttcggaacgggagagggagctgcatgcaatgtgtccggggaattgttccacatcaggtactatcagtgtacgagattcagcccatgaagttccgcatactccttttcctttgcggatatggtaacaagcgacacttccttgaaaaggaccgagaatgagtttatcatttttgactagatagaaacctacccaaaaaaaaccaaaggcttcatgaagggcggcacaggcattggcaagaacactaacttcttccttttcgttcgaaattagaagctcgaattggggtaggaagaggctgtagcgttcttctttatcagtagttgtttgtttgaaattggcttccatctgtagtgattatattcgttctaaaactttttttatcagttcgtcaatagaatttttatatcctgtgttggcttcctttattaatcggttagcaataaccatacatacagtcatcgctttgtgacccattaagcgtgcaagccctgcaagtgcagaactttccatttcgaagttagtgatatggtacccctcatattcaaattgttcaattttctcattttgtttgggatcggccaaagggatacggagctcccgtccttgtggtccaaagaagcctccggctgcgatagttaccccgcgaatcatatcattttgtgcgatgcggtcaatgagttctttgtctgcattaataacgtaaggatgtgcgatgcatacattgccttcccagcccatataattaatgaatgcttgttccattttgagatcacatacttcattacggccggcataaaagttaagcaatccatcaaaaccgatagacttttctgaacagatatatgtacctacaggagtataaggttgcaaacctccacaagtacctatgcgtactagttgcagttggcgtaacttatctttctcataacggcttttaaaatcgatattagccaaagcatccaattcgttcattacgatatctatattgtcgcagccaatacctgtagaaactaccgtaatacgtttatctttataggttccggtaatggtcttaaactcacgactttctacttcacactctatggtgtcgaaatgggaagctactaaagctacacgacccgggtcacccacaagaattattttatctgctagttgttccggctttacatgaaggtgaaaaatagaaccatcagaattgataatcaattcagattctgcataatattttttcatggccattgcttttaattgtttttataataaatattttttcaaaataatagaagaagatctatggatgcatacatttgatatcttttcggaatatcgggtaacttcatgagagcttgcttctatggtagatataatcagtacgtcctaagttattatttgcttaacggttcattgccgaaacttgtttcgggttttgcaatattttcgcgcatggaggtatctgcctgtatatttttcatacgataataatccatgatacctagattgccactacgaaatgcttcagccatggctttgggtacttcagcttctgcttggattacgttggcgcgtgcttcttcggctttcgctttcatttcctgttccagtgcgactgccatggcacgacgttcctcagccttggcttgtgcgatatttttgtctgcattagcttgatcaatttgcaaggctgcaccgatgtttctacctatgtctatatccgcaatatcgattgatagaatttcaaaagctgttccggcatccaagcctttgcggagtaccagtttggagattgaatccggattctccaataccgatttgtggttctcggacgatccgatagaggatacgataccttcgcctacacgtgctaaaatggtgtcttctcctgcgccacctactaattgacgtatattagcgcgtacggtaacgcgtgccttggctatcaattggataccatcttttgctacggcagtaacaggaggagtgtcaattactttcggattgacagacatttgcacggcttcaaatacatcacgacctgccaagtcaattcctgttgccatttgaaaagaaagttcgatgttagctttagaagcagaaaccaatgcgtgtaccactttttctacgtgtccgcctgccatatagtgtgcttccagctcgtcgcgagtgatagtactcaaaccggctttatgcgcttcaatcattgccgggacgatgacgtatggcgggacatttcggatgcgcattaagaataactgtattaatgagatgcgtacacctgatactttggctgaaagccaaaggaagaatggtacataatgaaaaaataatattacaaaaataattccgcctccaatgagaatgaagggaagatagttgggttcaatcatggtaattcgtattttagtgtgaatatttatgttatttgagtttacgtacaatgaccgtattttctacgatacgctctacatagataggtgttttttcatctatcagtccgtcggcagaacggacttctataatatgtccgcttatctcagcattaccgatcaaggctagacgagtaactgtgatacctttgttaccgactttaatattcaatcctttcaatgggttgattttatagtcgaggcttttctttaaagatagtttatccattgtcttggaatgcataaaccacgcggtgataccgatacatcccacagctgaaactgccagtgtaagaaagcctgcttccggccctaaagcggaaaaggcataataattagcatacaagatacaaataactgacgctattccggcaatactaatacctggaataaggaatacttctacaataaagagaagtagaccggccaatattagagcgatgataataagtgcttccattttagcttgtattagtgttttaatttctttatctcttcgtttcgtacgttcagagtaagcttttcaatttctttcaaaagctgttcggtccgtttttctaagtcaagtatgccgggagcgagggctttcttttgtgaacgattgctttgagcatattgctctcgtttctcttcaagatttttggagagcatatcataatctttttgcttctgcatcacttgttggtatgcggctcgtgcaggggtggagcggaaatcattgagagtgtgatagacagtggaatcatctattataaataaaaagtctccttccttcttttccgtatctttggcatatatcagggcagctaacttttgtttggcaatacgtactttatctgtatctttccaagtggttcggatagaacgcaagctagctgcctctttaagtgttgtcgggtcagtattttcataatcgtatactaccttcgtttcatttggaacaaaaacataaatacagaccttgtcttcaggttgatagcggtcggatgcaaaccatcctaaattatttaattcatcaatgacatacatataatcattggccggtgaattaaagggcattccaatattatccggtcgtaagtagctactactttctgagtcatagcgagtaacaaatatgtcatatccacccaacgagccttctccatcagaagcataatatagtgttactccgtctgccatcagataggggtagttgacatttccctgttcattcagggtatttaaaggttccggatcgctccagttatttatcagctttatgcgtgagtaaagttgcatttttccatcagggtcttgatcaccataaattattttattacccatttctgactggtaaatagtgcctgcgatggagttgtcttgatgtaaagtacctgattcacgactcactttatatgctttcagaaattcgttcttgtctaccacaaagctatctattacggctacgtcttccacacccttaatcatgcgtgcgccttgtttgataatttctaattcggattcagctgcttcggttggtcgttttttcttttccagccattcgatgtgttgctcgtagttgtccactgcatcttcgaagcggtacatatcataatatagctttcccagatatttgaatgcatcaatcactttgcgtgccgcacttttctccagatagggttgtgcttcaactttttctccggtttcatagcagcaagcaccataccaataattataattggcattggatggggcctttttcaccaaactctgaaacacaggtttggccttttcaaattctccttcaaggaaaagttttttagcttgttcgaggttttgcgccatcatgctgctcgtcagccctaaggcaaacaggcaggctatgtatcttttgcgtatcattttatctgcaatatttgtactattctaaattcaaaaatacaatatttattggaattatgccactttacttcattctattttatgaaatcttccataaatcattcttttcatgtatttttgtgcccgatttctaaaaacagatatggcacaatttacggaagaagataaaataatgcgccgtgtggagcaacgctttaacaaggggatggtgaaatatcgtcttattgaagatggagataagatattggttggtttgtccggaggtaaagattcgttggcgttattggaattgttggcaaagcgttctcgtatcttaaaaccacgttttacggttatggcagtacacattggcatgacgaatattccttatcagtccgatttggaatacttgaagaattatgctgagggtttgggagtgccatttgtgtattttgaaacatcgttcgatttgtcaactgatactcgtaaatctccgtgcttcctttgttcgtggaatcggaggaaggctcttttcacagttgctaaagagcatggatgtactaagatagcattggggcatcacatggatgatattttggaaacattgttgatgaatatcacttttcaaggggcatttggaactatgccgcctcggttggtgatgcgtaagtttgacatgactatcattcgtcccatgtgcttggtgcatgagtctgatttgtcagatatggctcgtgttcgggggtatcgtcggcagataaagaattgtccttacgaaagccagtcaaatcgttcggacatgaaagaggtgttgaaatctttagagaaattgaatcccgaggcacgttatagcttatggggaagtatgacaaacatacaggaggatttacttcctgataaaatagattaagaacaaaatggtatctcaaggtatttattcaatcattttattgattttttcgaatgtgttcatgacttttgcatggtatgggcatttaaagatgaaacaggaattcagttggtttgcggcacttccattgattggcgtgattgcttttagttgggcggttgctttttttgagtattgtcttcaggtgcctgccaatcgtttaggctttcgcgataacggagggccgtttgatatcatgcagttaaaagtaatacaagaagtgattacgttagccgtgtttactctattttcagtttgggcttttaaaacggaactgaagtggaatcatttagcggctttcctttgtctggttttggccgtttactttgtttttaagaagtagtgagtcagaagattccactactcccgggtagagcctttcggcttgtttacgcagaagttccatcattagggtagtgtctttctttacggtatcctgcagggttggtatatagtccatatagcttttccaggcattggcatgtttgcggttgcgtttgatggcacgtcctcgtgtggtaaggttttcataaagtaatttttcggcatcgaaagtatatgttgctcctacgctgacttgaatggcattgttatttttgccggtaagtataacacgttgttcccttacatcatatttgattgcgctgtttacatttaacaccatggatattttcagttctttctcattggtgataatcggatcatttaccgggtcttcatcccatcttgtatagggggtgtaaggggtaaagcgaacatattggggttttatccattgggtggtatctccaaagtttttgggtaaggcatctagaaatttcatccatggtttgtcttgagatatcatcggacttccttggatggcatccttagtcggtttaaagtcaaaatgaattgattttacagcttctttgttgatgattaattcttcctctccatttaacaattgctgtaaacggagagaatcctgtttgctccattgtgcttgtgctgtcagtgccgctaaggtacagagtaatatgctgagacttaccctttgggtcatttgttttctctttatacgtgattatatgttggcaaaagtaactaggagtagctataataccggttaaatcagcgttattatttgtttattacccggaatgtttaagaattatttagttaatgatggtatatgttatgattagacacagatttcacggaatggagaataagttcatgcaaatccgtgtcttctgtgtctaatgtatctgttatttctgctgagttaattgtgcatgcatggcggcagcggctctgcgtccgtcgcccattgccagaatcaccgttgctcctccgcgaacgatatctccaccggcatagatagtcgggatggatgattgcatattatcgtttacagcgatagttcctttacgtcccaattccaatcctttgatagagctgggaacgatcgggttgggagatacgcccacactgacaatagccatgtctatatcgatggtttctgttgctcccggaatggctacaggactgcggcgacccgaagcatctggttcacccaattccatcttttgcaatactacttgtttgacgcgccctttttcgtcagcgatgtactcaatggggttgtggagagtcatgaattccactccttcttccttggcgtgttttacttcttccaaacgtgccggcatttcttcctctgaacggcggtaaataatcatggcgcgctctgctcccaaacggcgggcggtgcggacagagtccatggcagtgttgcctccaccgataacggctacattctttccaaataccaccggagtatcagaatcatcgctggctgcatccatcagatttacacgggtcaggtattcattggaagacatgatgttgatggagttttcccccggaatgttcatgaagttgggcaggccggcgcctgatgcgacaaatatacctttgaaaccttcggcttccaaatcttccacactgatggttttgcctacaatgcaatctttcataaaggtgacccccatctttgccaagttattgatttccacatctacaatcttgttgggcaggcggaattcagggatgccgtatttcaatacgccgccgatttcatgtaatgcttcgaatacggttacttcatagcccagcttggccatatctccggcaaaggaaagtcctgcaggacctgaaccgatgacggctatcttgataccgtttttttctgctatgtgtgggacggatatttgcccgctttcacgttcgtaatcagctgcaaaacgttccaagtaaccaatggcaacagcttcgtgtccggctttcaaatgtgtacattgcgattcgcattgtttttcttgtggacaaacgcgaccacatacagccggcagagcactggtctctttcagagtctttacagcttcgaggaattctccgcgttcgatgtttttaatgaatttaggaatattgattcctaccgggcagccattcatgcaagtcgggttggggcaatccagacaacgcttggcttccgttatggcttgttcttcgttcagtcccaagtttacttcttctttacggctatgcgaacggtattctgcatccagctcattcatcttgacacggggaatggccatgcgttctttgggtttcatcgctttgcgcaattctgtacgccaaggggcatcacgtccatcaagttccttggtcgcttcgcaagtttcgggttgtttgtctgtatccagtttatgaatttcttccctttcaatctctttgaaagctcccatacgttttagcatttcatcgaaatccacttgatgtccgtcaaattcaggaccatccacgcatacgaagcgtgttttgcctcccacggtgatgcggcatgcaccacacatacctgttccgtccaccatgatggtgttcagagatacatcggtaggtatttcatatttcttagtcagcaggcagacaaatttcatcatgatggcgggaccgatggcgaagcatttgtttactttttcgcgttttatcacttcttctacaccttctgtcaccagtcctttacgaccatatgagccgtcgtctgtcataatgattacttcgtcagaactttcacgcatttctttttcgagaataatcagttctttgctgcgtcctgccaatacggtgatgacacggtttccggcggcttttaatgcttggacaataggaagcattggggcaacgccgactcctcctccggcacaaactacggttccgaagttttcgatgtgggtagcttttcccaatggacctacaacatcagtgatgtaatcaccctcattcagttcgcaaagacgggtagaggagagtcctacctcttgcactaccaatgtgatggttccttttatggggtctgcaccggctatggtcagcggcatacgttcgcctttttcgcctacacggacgattacaaagtgtcctgctttgcgagactttgcaataagaggagcctctatcaccagcttaaagaccttttctgagaaatgttcttttgaaataatcttattcattttgctatactataagttagttgttcttcttgcttggatatcaatttgataattgtttgcaaagttatgattatattttctaacgacaaaagaaaagccacccttttatatgggtggcttatgctatatgactaagtcttgttattgtatatgaaatttgtaaccgattacaccatagtatatcagtcaatcatgtcaaatccacaatagggaaccaatgctttggggatacggattccttcgggagtctgattgttttcaagcagtgcagcaacgatgcgcggcaatgccaatgctgaaccgttcaatgtatggcaaagttcggttttcttgtctgcgttgcgatatcggcatttcagacggttagcctgatatgtgtcgaagtttgaaacggagctgacttccaaccagcgtttctgtgcttccgaatatacttcaaaatcgaagcaaagagcagctgtaaaactcatatcaccgccacaaagacggagaatacgataggggagttccagcttttgtaatagaccttctacgtgattcagcatttcctgatgtgattgtttggaatgttcgggcttgtcaatgcggactaattctactttggagaattcgtgcaagcggttcagaccgcgaacatctttaccgtatgagccggcttcacgacggaaacattgagtgtatgcacaatttttgataggcaattgcttttcatccaaaataacatcgcgatagatgtttgtcacaggcacttcggcagtgggaatcaaatataaatcatctacttcgcagtgatacatctgtccttctttgtcaggcaattgtccggttccataaccggaggcggtgttgacaaccgtcggaggcataatttcgtcataaccggaagcacgtgcttcgtcaaggaagaagtttatgagtgcgcgttgcaagcgtgctcctttacccttatatacaggaaaaccggcgccggtaatttttacgcccaagtcaaaatcgattaagtcatatttcttggcaagttcccaatggggaagtgcatctttagggagctcggtttccatacctcccatcttttccactacgttatcttcggccccaaagccttcgggtacttcatcatagggaacattggggatggtatagagcagattggtcatgtcttcttgagcttggtccatttcggcttgcagggttttgctgatttctttgatttcagcaacgcgtgctttagctgtttctgcttcctcctttttgccttctttcatgagcagaccgatagatttcgagatagagttgacctctgccagatttttatctaattgattctgtgtattacgtcttttatcgttaaatgcaagcacttgttcaatggttgcttttgcatctttgaagtgctttttttccaatccgcggataactccttccgtgttgtcggtaatttgtttaatagtaagcatatcttttactctttttgatatttctttaattagtggacaaagatagataaaaaaatggtaaggtgtatgagttattcgttacttttgcatttggatttaatatgaaaatgaacggaagatgaattatcttgaaatagtgggtactcttgtcgggctgctttatttgtggtttgagtacaaggcaagcatttggttgtggcctgtgagtgtcattatgcctgccatttatatagttgtgtactatcaggtggggctgtatgcagattcgggtatcagtgtttattatttgctggcgggtatctatggctggtgggtatggttgaggcatgttcccggcaggcaggagaaattgattacttttactcctcgcaagttgtttatgcctttgtttgttgttctatgccttgtgtttgcgttgataggtgggatattggcaacgtatacagacagtacaataccatggtgggatagttttactacagctttaagtattatagctatgtggatgttggcacataaatatgtggagcaatggttggtgtggcttgttgtagatgttatatcttgcgggttatatctttataaagatctttattttacttcctttctttatggactttatgccgtgatagcttttggggggtatctaaggtggaaacaattaatgaatgtaacagaatgaaagaatataaattaccggaacaaataaatatacctcaaactattatattggcagatggagacttcccttcttcttctttggctaaggaatggttgagggagtgtccttatgtggtttgttgtgacggggcggtcaacacatatcttcgctttgggaagatgccggctgctattgtgggtgatggtgattcgttattgccggagataaaggaacgctatgttcatctcattcatcgtgaaacggagcaggatacgaatgatttgagtaaggcatttcgtttctgtctgtctcagggaaggcgggatattacgattatgggggctaccggtaagcgggaagatcatactttgggaaacatcagtctgcttgctgactatatggagcaggcagaagtgaggatgttgactgattatgggctgtttatacctattaaagaagatagcgtgtttgaatcttttccgactcaacaggtttctgtttttaatatgggggctacggaactttcggcagacggcttggtttatcctctttctgattttacgaattggtggcaggggacattgaatgaagctatcggcaatcggtttattattcatgtacacggcaaagtgcttgttttcagggtaatatgattcttttttaaagatttcaatgcctttttgggaattacccgtaaaatagagagggcttgcttcattccatgtcggaaagcatgcttttacacgtacgtccgcatggagcttcacatacgtatgtgtaaggctgcgcatacgtccgtaaaggctcatacgtactaacgtgaaattatgtacttccaaaaagacaaagacgttttgtaaaaagagcaagagctttctcaaaaagataatggtcttttaaaaaaagaaaaggagctttttccaaaagataacgagcttttttaaaaacactttgatctttttttaccctttgtcgggacttggtaagccgttggaaaggctgatacataaagggcacttccggaagttatctgaagaacagggtgaacttttaagagtaaaagctcttctttatggtttggcaggtgagccaataacaaaggctcagttgtaattcttggggggatta

SEQ ID NO: 6677 - DNA, 52920 bp, Unknown
  gut microbiota DNA sequence
agaaagttctgtacaaaatatgggatatccacatcctttgtgcgcaagggaagggcggccaaagatgagcctttgaggaaggtgcttagaagcgaactctcaaaagaaagggcaacacggcttgaaggaagcttcggcactcaaaagcaacattactcgctctcaaggataaaggccggaaacaggaagacggaaatactgtggattttctttggaatacatacggcaaatgccatactgatgatagaaaaaatcagaaacaaaacagctaaagcagcatgatatgattttactcacagaatcagaagaggtcatcagacttcttccggaacgtcatgtcctgtcggatagaattatgtgagaaagcacggaaaaatgacaataagaatggcatatgaaatggtcatgccctatcatcttcatatgccatcttattttttagagacatttactgaatatccctattttatgcctgtgcaggcatgggcttacacgtacgtatgtgtgaccttgtgcattagtacacgtagggccacacatatatatgtgtgaccctatgcgtactaacgtgtaatccgtgtcgttagaacttggtatatatgatttgcatttttaattcatttcctgctttggtgccgcctttcagctcagcgctctccatatccaagttattgcttaccccgataatcgaattgtttgtatcaaagtccacctttacaggtatcagcacaactttattccaatcgggattctttttaacccagtccgggtcaccggcttctccttttttcttttcttcgatgcagtgagtaatcaattgggcaatattggaaaaagtatatttattactgttgctggtaaagcttgtgatgaaagaagagatattgtcggtaatcttattctcctcaaagaacgagtacatttccttctttcttaccattaataaatattggggaatgcccattgcaaaactgctgttgtttttttcgttaaagcgggtgaaagaaagagttgcagcattcaatgtatcattctgatgcgcttcatatatttcatcgacaggcaatgtagcttccgtatagattccggcaggagtctttatgtaagtacaattgtctttgtccaccaattctttcaatctttcggaattctggaaacggttggcttgaataacttcttttgtcgcagcaaaatcagcgaatgtatttaccaaagagtctagcttattggaagaactcttaatcaatctgctgaaatgcatacgtaagtcaaggttgtcaatatatagaatagtaccgtcaccatgtgtacaacgtacatagataccttttaagacattcttgataaatgcatcggcattcttatagttgtttttatcttccttatatttctcatacataaattttcccagattagtgggtaattttatggtttgagtataatatctgctgctaagcgtatctgtgaggtgggcatcggttccgcctgccgaataagctttttcagcgataggtttggcattttcgttgtagtagttgtcgggatttacattcgtataaaatgtgttcaaatctccttccggtatcactttgtccaatgtatcaattctcatgcgcatggagtttagggaatctccgaaaaatttcgtatattggacaaagagtgtcagtcctgtgatctcttgtacagcttcggggaattcaaaatcatccgtacagttgaattgcgctataaagtcggacgtgaattcaccgaactgagggtcggtataacgtcccagataagcagtactggtacgtgcatatacggaatccgctaaaatagaacgggtggtgacatcatagattttgcctccggcctgaatatggtctccatccggaatagtcgtatcaccgattcccggtgtcgtatcatcgcaactgtatgtaagtgcggctaacaacaatgcgcataaatatttgattttcatttttgtaatctatattgatttatttcttttcaaactcccaaacttcatcgtagaagttattaaaagcgtctgcataagtttcgggtgattggtaatcaagaacaggaatacccgattcgcgtgcgaatttcatcacgttctcatttaccttttcactattttgaattacaccgtctgaataggcgatggccaatttgcagagttcttcataattagccggagttttgataatgttgtctacatcatttctttcaatgcctttcagcatcaatttctcggctaaatcaccttggaattccgatttgaaatcatctccgaatacagagaatacaactttagaatctctgaaagacggttcgtcttgataagcttttttgatatagaggggtacaaatgcactcatccaaccctgacaatggataacatcgggacaccaacgcagtttctttactgtttccaatacaccacgtgcatagaaaatagcacgttcgtcattgtccgtgtattctactccgttttcatcagctaccatttgacggtgctggaaataatcatcattatcaatgaaatatacctgcatgcgggcggcttggattgacgcaaccttgataatcaacgggtggtctgtatcgtcgataatcaggttcatacccgacaggcgaatgacttcgtgtaattgatttctgcgttcattaacattgccccacttcggcataaaagttctgatttctctgcctttttcctgaatagcctgcggaagatatcttcccatgcttgccatttcggattcgggaacgtaaggggtaatctcttgtgtaataaataaaactttatttgccttcatcttaactttttgttgctcataaacattttgcaaagatataaaaaaaatagctgagagaggcaaaaatacacacttaataattccttatgatttgttaagcgtctgataataaaggaaaaaagaattgtttttctgtctgatagcgagctgaagttgtcgttgttggcatatctttggctgataataaaacgttttttttttcgttatctccaaaataatggtttactttgcagccgttttaattgaaacagcttaaaaagaagtgagataaaatgaagttagttcatacgattaaagagcttcagtcagagcttgatgccctgcgtaatataggaaaaacaatcggtttggttcctacgatgggagcgttgcatgcaggtcatgcttcattggtgaaacgtgctgttgccgagaatgatgtggtggtagtgagtgattttgtgaatcctactcagtttaacgaccggaatgacttaattaaatatccgcgtacgttggatgccgattgtgaattattggaaaaggtaggggcatcttttgtttttgctccatccgtggaagaaatttatccggagccggatacacgccggttcagctatgctccgttggacacagtaatggaaggacgattccgtccgggacattttaatggtgtatgccaaattgtgagtaaactatttatgatagtagagcctgaccgtgcttattttggcgagaaagatttccagcagttggctattattcgtgaaatggtgaaacaaatggaatttaagttgcagattgtgggatgtcctatcgttcgcgaagaagacggtatggctctgagcagtcgtaatgcacgtctttcacctgaagaaagagaatatgcattgaatatatcacaaacattgtttaagagccgtatgtttgctgcgtcacatacagtggcagagactcagaagtttgtagagaatgctattgcagcttccaagggcttgcgtttggagtattttgaaatagtggatggaaatagtctgcagaagattgccaattgggaagatacggaatatgcagtaggttgtatcaccgtattttgcggtgaggtacgcttgattgacaatataaaatataaggaaaagctatgatgattgaagtgttgaaatccaaacttcattgtgttcgtgtgacagaagctaacctgaactatatgggtagtatcacgattgatgaagatttgatggatgccgccaatatgattgccggtgagaaagtacacattgtggataacaataacggagagcgttttgaaacgtatattattaaaggagaacgcggttcgggatgtatttgtctgaatggtgcggctgcacgtaaagtgcaggtgggagatatcgtgattatcatgtcgtatgccatgatggattttgaagaggccaagtcgttcaagccgacagtggtttttcctgattcgatgacgaatcaagtgttgggatgattcttttaaaatataatcatttttattttttagatgtattaaattaaagtttgttggagggtgtgtcgaaactctcatttcgataaaaagggaattttgacacaccttccttttcttttatgtccttacaaggctttttctttaataagtcccatgcggtaggctaagagcagctttttcaaatcattgatttgggtaactaattcccggcctttgtccgtatccttcaccatcattctctgcgagctgagttctacgatttgtgtactcgatttaatatcctgtccttcttctatcgctttctgcatggatgtgaaaggttcatgctggactagctggaagccgcgtgaatgatagaccaaggtatatccggcaataccggtctcggaatgataagctctggagaatccgccgtctatcaccatcatcttgccattggctttaatagggttttccccttgaatggttttaaccggcacatgaccgttgatgatatggcggtgttttcctactactccaaactcgtctaaaagcatatcgcatactttttcttcgttgcgaagagtgtagtagtgtccttttatctctttatgcaattccttttctttcaggaaatagcgttcaaaagtagccatcttgtttttgtcgaaggcaggagagtcttttccgctccataaataccacacatagtctatggcaaattgcttctcttcattattttcttctgcaaagtaagcggtgcgtatcagatgcccgaccttttcgagcagttttttgcctttataggctttcccggctatcatcacgtttttcaaggtaccgtcttcattgaggggaacggaagcatgaaacagcaggttggagttgcttacggtgtacatgcatccgtagcggaacaggcaacgcatatgctttttcagtttttcgctgctgacgaatgaatgatgaagcttattcatgatttctctttcttcggaagtcagcttataggggtcggcaggatctactgtcggtaggaaactgtctttcaattcatattcttttccgtctaaagtcagtatattccgttcgaagtcgatgcgatgaagcaacatgcggtcatccattccgaaatcgggacggcgtttgatgatttccgcttccagtttgaattggataatgcttatggctttatgcatttgagcaatcatgcgcaaggtcttttcgttgtacgtgcattcctgaccttctactttgggaccgaacaggctgcacgagtcttcggcataagtttccatggcaaaggttgccagcggcagaagattgataccgtatccgtcttcaagtacggacaagttaccatagcgcattgccaatctgagcacgttagccatgcaacattcgtttccggctgcagctcccatccatagaatatcatggtttccccattgtacatcaaagttatgatagttgcaaagaatgtccatgatacggtggggagcgggtccacggtcaaaaatatctcctaatacgtgcagtgtatcgatagtgaggcgctgaatgagttgacagagtgcaataatgaaatcatctgcacggcgggtactgataatcgtacttataatgacattgatataagcctgcttgttgggtaccatcgaactttcgtgcagcaattcctgaatgatgtacgaaaattccttgggaagtgccttccgcactttggaacgcgtatatttggaagaaacattttggcagacgcggaccagttggttgagtgtgatgacataccagtcgtctatatctgtttccactcccttgataagctccagtttttgttcaggataataaatcagggtgcaaagttctttcttctcattctcacgtaaagtattgccgaatatttcgtttacttttcgtttgatggctcccgaagcattacgtagcacatgctgaaaagcttcatattctccatgtaagtccgccagaaaatgttctgttcccttgggaaggttaaggatggcttccagattgatgatttccgtactggcatcggctatggtcgggaagctgtgcgataacagttgcaggtatcgcatatcttcttgtatggtttcgggggtaatttgattataagcgttcattgttatattttataaaaagaacatgagtattaattgtgcaataatgacacggctgaacatagacagcgggtatactgtggcatagctcactgcagggttgtcaccgggcaaagtgtcgttggcataattaagtgccatggggttggccatgcttccacacagcattccgcaagtgctgccaaaatccagatggctcatgcgcagggcgatgagtgccatgattacgacaggaagaaaagtgatggcgaatcctaaaccaatccagattgctccttcggggcgcataacggtctcaaagaagtgggctccggcatccagacccagacatgccagatagagtgataaccctattcctctcaacatcaggttggcacttcgggttgtatatgtaatcagatggaaacgtggtccgaaacaaccgatgagaatacctactacgatagggccgccggcaagtccgagtttgacaggagtactgactcccggaatggcaatgggaattgaaccgagaaccaatccgagcactatcccgataaagatggcggcaaggttggggtctttcagtgtacgggtagcgtttcccaatactttttcgacgttttctatcgcttttgcttcacctaccacagtgagccggtcacccagttggaggattaaccccggagttgcaagcagttgcacgccactgcgcatcacacggctgatattgattccatagctgttgcgcaggcgtagggaaccgagtttttttccattgatttcagggcggctgacaacaatgtgcttggaaatcagctggctgtcgatagcattccagtcaatgtcttttttattccaatcctgagcttcctgctcgccgaaaaggatagtaagggtgggggcgtctttttcggtagtgatgattagcaagcggtcatcttctttcaaaaccttttcagaagtgggaatgcttaccgcgccgtttctccataggcgggagatgacaaatttgggataactcagttcggctacttctttgatgcttttattaaaaatagcgggattgtgtactttaaaagtagcaatgaaagtctggttggcatcttcgtgctcgtttgtttcgatatccgatgggcgtacaaaaagcttgcgaaccaccagcatggcaaggatgacaccgactactcccagcggataagtcaccgcgcaactcaacgctgctccattggccggttcgccaagttgttttagagtctgttgggcggctcccaatgccggagtgttggttgtagctccacaaaggatgcctaccatgtcgctcattgggattgtagtgagtttgcttaatattacagtcatcaccgtacctattaagaccactcccataccgagcatgttgagtttaactcctcctttccggaaagagctgaaaaagcccggacctacctgtaatcctaattcataaacgaagagcaccagaccgaagctttcggcataattcaacatattggaatcaatggagaaccctaaatgtcctgccagaataccggcaaaaaagacaaaagtcactcccagtgagattccgaatacatgaatcttacccaagccgagacctacggcagtaattatcgacaggatgactaccgcttgtaaaggagtatgctcgaaaaatagactatttaaccattccatgatgcaaagataacaaatactaattgtaattatcctaaatccgtttgactattttcacccaaccagtcatctatcagttttcttgccagactgagttttcccggaatttcaggcaggttatctttagtataaaaagctccggcatttaattcttccgcttgcagtttgatctcaccgctttcatagtcagcggtgaatcctatcatgatgccgctgggataaggccacggttggctgccgaaatatttcagattcttgatgtgcagtccggtttcttccgccacttcgcggtgtacacactcttccaatgtctctccgggctccagaaaaccggcgacaagtccgttgaatgtgccgcgaaagttacgggcatgcactagcaggatactgtctcctttttgtatgcgcacgatgatggccggagagatacgggggtagaactcttgtcggcattgcggacatttcttggcaatgggagagatttgatgggtgggaacaccgcatgccgggcagtaacggctgttttggtcccaatttaatatctgaaaagccttgccgcccatttggtattcttgcaacggcagaaaatcaaaagaagcccgaagtcccatcatctgtcttgccggactttcggaacccggaatgggggtgtgcagagaataggttttgcagggaagtccgttcatctctcctattgtgtgaatggtgctgccgataggaactgctacgggaggttctgtacagcaaggcacatgatatccgttttctgtttgtaagattagaatttggtctttataaaaaacaaaccaattacaattttcttgttccattatcttgttttattgtcagtctaaaatcatcgttaattgtattctctttctttctttgtcgatagtcattacttttacttgaacatgctgatgtatcctgactacggtgctcgggtcgctcacaaattccctgcatagccgggatacatgtaccaagccgttctctttgatgcctatgtcgacaaaacaaccgaagttggtgatattgtttataatgcccggtagtatcataccttctttcaaatcgtcgatggtacgcacattcttgtcaaattcaaatacttggatttgctggcggggatcacgccccggcttgtcgagttcttgcatgatatctgttagtgtaggcagtccgactgtatcggagacatactttttaatatcaattttggtacgcaactctttattctttatcaagtcgtctaccgtacaatcaaggtctttcgcaatatgttccaccaccggataactttcgggatgaacagccgaattgtccaacggattctttgattgtgggatgcgaaggaaaccggcgcattgttcgaatgcctttgctcccatgcggggaactttcatcaactctttccgggaatgaaaaggaccgtttgccgtacggtaatccacaatattttgggcaagtgtgggaccgagacctgaaatgtaggtcagtaaatgccggctggcggtattcagattgacaccgaccagattcacacagctttctacggtttggtccagcgatttctttaaaagagtttggtctacatcatgctgatactgacctactccgatggattttgcatcaattttgaccagctcggccagtgggtccatcagacggcgtccgatggaaacagcaccgcgcacggtcacgtcataatcgggaaactcgtcacgcgctgtcttggaagccgaatagatggatgctccatcctcactcactacaaaaacttgtaattcacggttatagctttgtgaggtgacaaattgttcggtctcccgactggcggttccgttaccgatggcaatggcttctatggcatattgttccaccagtttggcgattttccgtccggcaagctgatattcgcttttgggaggatggggataaatcgtttcgttgtggagcagggtaccttgtgcatcaagacacaccaccttgcagcccgtgcgatatccggggtctattcccattacccgtttttgtcccaggggaggagcgagcaacagttgcctcagattttcggcaaatacccggatggcttctgcatcggctttctctttgctgagcgtggcgaattccgtttctatggacggtttcaacaggcgcttgtaggcatcacggacagcttctgcaacctgatgtccacattcgttattactgcgtacatacatccgttcgagccgttcactacattcattgtcgtcagggctgatggtcactttcagcagaccttccgattctccccggcggatggcgagcaagcggtgtgaagtgcatcgtttcagcggttcgctgaagtcgaagtagtcacggtatttgacggcttcctcttcttttccttttattactttggaagtgatgacagcctgacgcgaaaactgattgcgcagttggttacgggcacgttcgtcttcacttacttgttcggctatgatgtcacgagcgcctttcagtgcatcttcttcgtctttcacttctcctttgacgaaagagccgagacggttttccagatgattttcacgttgcagcattaagagggtggcaagcggttccagtcctttttgtctggctgcttcggcgcgtgttttccgtttgggcttataggggagatatatatcctccagttcggtggaatcccagcaggattctatgcgggtacgcaactctccggtcagtttgccttgtgtgtcaatagtagataaaatggtttctttgcgtttggataattcgcaaagtttatcgttgcggtcttttatctcaccgatctgtacttcgttcagccctcctgtggcttctttacggtatcggctgataaatgggatggtggcgcctccggccaacaatgataatgtgttatttacttggtgtacggcaacgcccagtgccgtggctatcattttgctgaataattccatgtttattgttttctatcggagtgcaaaggtaatatttactaagcagaaatccctacttccgcagaataaaaagaagaagctgtccgaaaaggcgttttttttgttggtagtgtgtcaaaactaaaccgggctatcccatcgtcagctgtaggggcagggttatccacgttttgacacatttacaaccccaatggtcacgactttgggagtaaatgcacaaagtaaacagtttttaggcggacaaacctgatccctgccggtaaaatggcagtcgactccctacggttgacgattgaacggctgtttctgtcaacggtagaattgcagttcgctttttagcgaacggacttggtgctgcaaggattctatccgttccagcatgtggtggatggcgtctatgcctgctacattgatggacaggtcgtagtataaatgtgtataacgctccagttcagccagttgcgacaccgggatatagcgttcctcgccaatcacttgaacgttgattaatccgtcttcttccagttccacaataaacgaagggtctacgtggcaacggtcgcaataatcattgataattattaaatcggtctgcataatccttttcttttttagttgatactattcttcagttggcggaacaactctttctgatgttcagtcaggttggtggggatggtgatgttataagtcacaatcaggtcgccaaacttcccttcttctttataaaccgggaacccttttcccttcaggcggactttggtgccgttttgggtttcgggttttacttttagctttactttaccgttcagcgtgtctacggtttcttcaccgcccagcacagccgtgtaaagattgagtggagcagtgacataaaggtcattgcctaagcgcttgaacacagggtcgtccggtatgataaaggtaatatacaggtcaccgtcaggtcccccgttaactcccggtgcaccgtgaccacgcaacttgatggtttgtccgttggcaataccggcaggaacagtgatacggatattcttgccattcacattaagtacctgcttatgtgtcacggcagcctcacgcagtgacagttgcagttcggcattataatcctgtccccggaatccggcacctcgtctgctgccggctcccgctccacgatgtccgaacaactcttcgaagaaatcagagaatcctccggcatctccgaaaccttcttcaccgttggaagaataccagtacgagccgttaccggaagaaccgaatccgccggtcctgcctccaaagcctccggctccgtattgttgcttttgtttttcaaattcatcggcatgtttccagtgctcgccgtattcgtcgtatttctttcgcttttccgggtcactcaaaacttcgttagcctcatttatctcctgaaatttatctttggccgaagggtcgttaggatttaggtcaggatgatatttgcgggctaactttcggaaagcctttttgatatcatcttgggtggcacttttgtccactcccaatgctttgtaataatcgatgtaagccatattgtttttagttaaatttcgtctgtaatgaaggaaacaaaatacatgccaattagttgtgctataatttattttattatctttgcacctgtattttttagatttattctgaaagagaatgaaaaaagtgataatgatataccgatttctactgttagtcatgctgattacggttggatttccacgtccgttaaaagctgaagtgactacagacggcacgattctgattatcacttcctataatcctgagacacgtagtatttctgacaacttgtctgcttttatggacgagtataaactgcggggaggaaagcgtctcattacgatagaaagcatgaattgcaagaacctgtccgaggcacacctgtggaaagaacgtatggcttctatccttgaaaaatatgaacgtactgcggcaccttcgctgattatattattgggccaggaggcgtgggcatctttcatctctcagaattcggagatagccaagaaaactcctgccatgtgcggaatggtgagtgcgaataccgttgtcctgcccgaagacagtgtggatttggtgaaatggtctcccgatagcaaagatatctttaaagactttcccgattataatatagtttcaggctatgtttatcagtataatgtggataagaatattgaactgatgcgtcgtttttatccgaatatgaagaaagtcgcatttatctcggataacacgtatggtggtctttccatgcaggcctttgtaaagaaggagatgaaaaaatatcccgagctggagctgatgttgctcgacggtcggaccagcagttttctggaggtcagtgagagaatacgtcatctgtcgaatgatgtttgtgtgcttgtgggtacgtggcgcatagactgtacggaaaattatgtgatgggcaacacaacgtatatgttgcgcgatgctaaccctacgttgccggtttttactattgcatctgtcggtttgggccattgggcgttgggaggttatactccggtttatcataaggtgggaaaagaaatagccggcgccacatataattttctggacggtgagaccggcagcgagactggcgttgtgcctgttcccggtaattatgtgtttgatgtgaaacggatgcatcaatttggattggattctattaatttgcctaaaggtgctgagttgattaataaaactcccggattttatgagcaatataaatattgggtgattggagtggttgcagcattcatgttcctgatagcttgttttctgatagccgtatattatattgtccgcatcaatcatttgaaggataacttggaaaaatccggtgaggaactgttggttgccaaggagaaagcagaagaggcgaacagattgaaaacagcatttctggctaatatgagtcatgagatacgtacaccgttgaatgccattgtcggcttttccaatgtattggtcggcgatgatgcaacaagtgaagagaaagcacagtattgtgatattattcagaaaaactccgatttattgcttcatctgattaatgatattcttgatatctctcgcatggaatcggggcgtattaagtttgtggaagaggagtgtgatgtggtagagctgtgccaaacggcattgagtacagcggaatatgctcgtcgtactcaggcaatatatcaatttcaaactccggtgtcttcgttgatattaaagacggatgcgcaacggttgaaacaggtgttgattaatcttctttcaaatgccggtaagttcacaccttccggttttatccgtctggcaataaaggtaaacaaagaggataactgtctggagttctcggtgacagataccgggtgtggtatccctgccggtaaaagcgaaaggatttttgagcggtttgaaaagttgaatgagtattcgcagggtacaggtttgggcctctctatctgcaagctgattgtggagaatttgggtggtaaaatctgggtagataagaactataaggaaggagcacgatttgtgttcactcatccgttgaatgaaaaataatagatgtaatatgaaatatttaatatgtttggcggctttgttatgggccggaatgaagctgacggcggctgataatgtgaaagaggtagagataaaaataatagagacgagtgacgtacacggtaattttttccttataattttatagagagaaaggagtggaacgggagtctggcgcgtgtttattcttatgtcaaggagcagcgcaagttatatggagacaattgtattttggtagataacggtgatatccttcaggggcagcccactgcgtattattacaatttcatagatacggtttctactcatgtggtagccgagatacaaaacttcatggggtatgcagtgggcaatatgggaaaccatgatgttgaaaccggacatgctgtttatgaccgttggataaagcaatgtaagtttcccgtattgggagccaacattgtggacaatgccacaggtaagccttatctgaagccttacgaaatcatcaatcgtgatggtgtgaagattgccattctgggcatgattactccggccattccttcttggctgcccgagaaactgtggagcggtcttcattttgaggatatgcaggcatctgccgcccattgggtggatatcattcggaagaaagaaaatcccgatgtgctgattggtttgtttcatgccggaaaatcaggcaacgtacttggcagtgtggtggaagatccttctatggacattgctcaaaaagtgcccggctttgatatcgtgttgatagggcatgaccatgcccgtgcttgtacaaaggtggctgatataaaaggagatagcgtactgataatagatccggcaagcaatgcgaatgtggtatctgacgtgacactgaaagtgaaattgaagaacgggaaggtggtgtctaaatcggttgatggaaagctggaggatatgaacaagtatccggtcagtcaagagtttatggcacatttcgctccgcaatataaggctgttaatgattttgtatcgcagaaaataggaacgatttccagaacgatttctaccaaagatgcctacttcggctcttcaccgtttatagatttgattcataaattgcagttggatatatcgggagcggatatttctttatgtgctccactctcttttaaggctgaaattcccgaaggggaaattatggtgagtgatatgttcaatctgtataagtatgagaatatgctctacgtgatggaactgagcggcaaagaaattaaaggatttttggagatgtcgtatgccatgtggaccaatcaaatgaaaagcgctgatgaccatttgttgctgtttaagcaaccgatagaagagggtaagcgtgctaactttgagtattacagtttcaactttgattctgctgccggcattaattatacggtagatgtgacaaagccccggggcgagaaggtaaatatcctgagcatggcagacggtactccgttcgatatggacaagaggtataaggtggctttaaattcttatcgtggtaatggtggcggtgatttacttaccataggagccggaattgcaaaagaggacttgtctgagcgtattgtttttgcaacggataaagatttgcgctactatctgatgcagtatatcgaacagcaaaagagcttgcatccgcatgccatgcatcagtggaaattcatccctgaagaatggactgttccggcggcaaaaagagattacaagttgctcttcggagaagataaagagtgattttgcaggaatataaaatagaagaacaattattttttcatccgagaaattgagtaagagaaggtacatattggctccgttgtttctgctggcactgtttctgacgtaccaggtaagcattactatgtttactcacgtacatatcattaacggtgtgatgattgtacactctcacccttcgtcggacgaccaccatacacatactgcgggacaggtgattaccatcgcccacataggctcctatcaaacgccggaaccggaggcaggggtaagcaatgtgactgtggagtgtcctttgctgtatgtcttggggctgaatacgaatactttccgcgctgttgcgcctcacacgcattgcgttcacctgcgtgcccctcctgcttattgttgaaatattaaaatttggtatgaaaaagacaattgcctttttcagaaagttcgaagtctttcgtctgaaagaacttgaagttttctaaaaaggtcaaggtcttttttgaaaagtccctgaagctttttgaaaagctcctgaagttttttaataagcgatacagggagcttatggaatccttttatttataatttaacaataagacaacttaataatgaaacaatatattttattgctcgtactcatggtgatgggtgcgggtatgactgtacatgctgaagatgtaaatcctgtgaaagttggtaatgtaatttccggccacataatagagaaaggaacggaagcgagtttgccttatgccactattttgattgtagaaacagggcagggaactgtgtcggacgagaatggagagtttgtttttaagaaaatcccggcaggaaaatatacgctgcgcgtgcaattgttgggctacgagactcaggagaagaaagtaaccgtaagcaatgattttacggtggatattcattttctgatgaatgatgacagtattttgaccgatgaggtggtggtttctgccaatcggaatgaggtgagccgccgtgtggcgcctgtggtggtaaatgtgatgaactccaaactttttgaaaccgtaaactctacggacttggccaagtcactgaattaccagtcgggacttcgtgtggaaaacaactgtcagaactgcggcttcccccaagtgcgtatcaacggactggaaggaccttactctcaaattctgattaatagtcgtccggtggtgagtgcattgtcgggtgtgtatgggctggagcagattccggtgaatatgattgaccgtgtagaagtggtgcgcgggggaggttctgccttgtttggtgcgaatgctgtgggcggcactatcaatatcatcacgaaagatccggtaagcaattcattccaggtatcttccactctgtcgaacatgaatggcaaagtgtgggaacaatatatgggggccaatgcttcgttagtatctaaagataacacctacggcattgccctttatcagtcatatcgcaaccgcaacccctatgatgcggatggagacggattctccgaattggggaagctgaatatgaatacctttggcttgcgtacttattaccgtcctactcagttcagcagaatcagtttggaatatcacacgacgaatgaatttcgccggggaggaaacaaatttgatttggagccttttgaaacggatatcacagaacagaccaagcatgtgattaacagcggaggtctgagttacgatattttctggaaggagtacaaacataaactgtccttctactcgtctgttcagcatactgaccgtaacagttattatggtgcacagcagaatcccgatgcatacggcaagacaaaagacctgacttgggttgtcggaggtatgtatgtcggtaactttgagaaagttctcttctcaccggccacctttaccgccggtatggaatatcaaaacaactctttgcacgatatcatgttgggctatcaccgcgatatgaaacaagacgtgcgtattgccggcggatttgtgcagaacgaatggaagatgaaccgctttattctgttggcaggcttccgtgtggacagtcataacctgattgacaatcctattttcagtccgcgtgtgaatcttttatataagccgacggataagtttcaggctcgtttgacctggtctaccggttttcgtgctccgcaggcatacgatgaagatttgcatgtgaccgcagtgggaggcgaaggcgtactgataaagttggcggatggattaaagcccgaacattccaatagcttcagcggctctgtggattggacggccaatatcgggcattggcagactaaccttttgctggaagctttctatacagggctcgacgatgtgtttgtgctggaaaagataggacaggatgaacaggggaacaccgttaaagagcgtcgtaatggtaatggagcccgtgtatatggtgtcaacctggacggaaaacttgctcacggacgggatgtggctttgcaagtgggctttacggttcagcgcagccgttataccaaatacgagaattggagtgaggacgaaaatgtggagccgaccaagttcatgccacgtactcccgattattatggttattttactttgaccagtgctcccttcaagaactttgatatgtcggtgtcgggtgtatatacggggcgtatgcatgttcctcatttggctcctgactttagtgtgatacccgaaaattatgaatacagttatatccgaaaagacgagttggtgcatactcccgatttttttgatttaaatctgaaactgaactatactttcgtactgaatgatcatatcaaattacagttgaatggcggtgttcagaatctgttcaatgcttttcaaaaagatttggataagggaggtttccgtgattccggttatttctatggtcccacacagccacggacttatttcataggagtgaagattacgaactagaagaaggactgtccggttgatacttgggcaggaaaagacggggatgccaaaacgtttctgatgcaatctgttaccaatgttttggcatcttccgtttgttatttgccggcagcagtcatggattactcttgttccatacccagattgctgtatgtctcggttatcttgaaacctgcatccgggtaattgtacagagggaagcgcggctcagtttccccttccgtgtaattccatatgctgttatattcttccggattttcacccatttcccgaagttgcaacatatattggtagatggatttgttttctttgatgaaaaccttttccatttgatgaataatgggactgtgtttacgtgtgtggtcatggtcaaattccagaatacgtttgccgtccggtgtaatgcctaccatcacaaaagtcatgcttttgcctattccgggcagattgagcacactccggtctgttgctacgaaaggtatgtttttctccgtgcagaactttttgacggctgttgcccggtcattgttacttctcagcagggtcagaaactcagtctcatcttccttgttaagctttcccaagattttctcttcgtgctgttcctgcaacgaacggctgttgggagtgaagacagcatgattttcttcaaatcctttgacggagaatgtatagtagcagataactcccagttcattcaatactttgcgcaacttggctgtatgcccccggcgtgatgctgccacattgtacaccaattgattggtaatggtccatccggcagccagaattttgcggatggcttctttggcttcgggggttacttccagaggtgtctggaaatgagtctgtatcaagaattgcttgatgcctatggcggacgctttggttttgaattctttcagaatatccatcagctcttcattgatgcgcatgggcagatagacgggcaggcgggaaccgagacggacacgttgcaattctgcatacttttctccttcaggacgtttgaggttggcattccttttacgtaccgccattttatatacagcctccaatatgttgcgtaatgtcttgttttggctcatcagtgcatcgcctcccgtaatcagaatatctctcagttgggtgtcgttttcaaaatattccatcagtttccgcaagcgtttgtcccaactttccttgggcttcagttcctcaaaattaaagttcaggcgttcactttgaaaatcatacatacgttggcaagacgcacatagtcctccgcaagcgcgtcccatagaatcgggaatcaggatggctacttcgggataacggcgatgaatgttatgtccgtcgggcaccagccatccggcggcatttggtttgccggcttccaccacatcctctttttcccatgcatgaattttcccataggtgttgattaattgtggtgaatataggatatagctgcgtatggcagcatcatcataccctttgccggtcgggtttaataaagaaagatagtaaggggtgatgaaaaaaggcattccttttttacgtgcctgctgatacaattgcattgtttcttccgaaagggagttgcccaacatcttgttcagttccgtggggcttttgatggcgagggctagatggaagcgtgcttcgttccaccattggttgacccattggcgtttttcttcatcattgattccttcgggaaacacataccggctggagggggcatgacggttttctatctttttaatgagcaatgagatgattcgttctttgtttgcattgcgtatggcacgcacatcttcgttcaggccaccgggccaacgtttcatccattgacgtatctgtttttcattcggaatgttgttgggaacatgatagaggcgtaggaactgttggtataaatccaaccataaatcaacggaagtctcttcatcggtgatacggtttgtcaagaattgccaaagcagtgagatggtttttatctctatttctttttctgtagataattcatatatcgttttgctgtcattttcaatcagtcttgcaatgtttttagcggcaatagggtttttaatgtgtgcagataataaataatcatttagtttattcttgaaaatagtctcattccggctttccgcagccaatgaagtgagttgggttaattttgtttcgaatagagtttttacatctttgtgggataacatcttattcttttgtttcataagcagtgtgatttgtttttagggttaatactcgaataatagaacgctcattatgaaagttactttaatggcaacttttgttgtggctaagatacaaaaaaacagttgttgtgcaagcttaattgcaaaaatagatattacctgagaagaaatatctttgaggaagaagcggaaaaaacatccccggacaagcagacaagccggtccggggaatatcggttataagaatatgattctcttttgcaggatggatgctatttgttgttttagcagcggtgcattgataggtttggacatatatccgtcgaacccgttttccagtactctttgttcgtccgatgcataagcaaaagcggttatggcaatgataggcacatcagcagataactttcttatttcttttgttgcttcgtaaccgtccattctcggcatattgatatccattaagatgatttggggctggtgttccttaaacttttctattgcttcctgaccgtcccaggcatgaataagagaatattctttccgtaggatagactggaacaaccgatagttactttcgttatcttcggctatcaaaatagtcagtttgtctttttgaacggtaatcggttggaattcttcagcctttttttcgctcaatcgggccggttgataaggaatggtaaaccagaatgtagaacccttcccttcctcggattccactcctatcgttccattcatgtgctctatgattgtccggcagatggaaagccccaatcctgtgccttgtgcaaaagagttcaatttgacgaagcgtccgaatatagaatcttttttattggcaggaatgccgcatcccgtatctgtgacatggaagtatagcattttatcgcgtatctcgtatccgaatgtgatgcttcctttttgagtaaacttgatggcgtttgtgaggaagttattgataacctgcatgagccggtttttttccgtacggatgaaacatgaggagaggggagtttccgcaatgagctgtaccccacttccttccatccggcatttggtgatgttctccacttcctttatcatatcattgaggtctatatttgagtaactgaactccaaagttccggcttcaattttggataaatctaatatatcactgataagctgtaataacagtgtattattactctcaataatattgatatattcctgtttttcctgttcctcttccgttgaggcaagaatattggagaatccgataatggcattcagaggagtacggatttcatggctcatattggccaggaaagcagatttgagtcggttggattcttctgcccggtctttagccgacatcagttcctcttccatccttttcctgtctgtaataactaaggatgagccgaccagggtgagtggcctgttctgctcgtctcttgtctctattgtagcctgtgcttccacccaatcaatttttcttccgttctttcctttgttcagtacacggtattcttctttgactttattgatttttccttctatcagatcgtgaaaagcctgcataacccttggacggtcttctttgattattttagagaagtattgttcatccgatacactcaactgttcttccttgatttctcccggcatggcagtcataatgattggacgattgatgtcgcatagaatggagtgttctttaagattccatttccagggtatgatattggctatttccagtgccaaagataatttatggttagtcgaactcagcatttgttgtgcattatgcaactccgtgctgtcaagacagaacatgtcaatcgtgtcttcttctaaagacgggctgagcacgatatcatagaaagtgtctacgtctttaaagtaataagggaatgtgatggagcgcttttctcttaaagctgtttccataaaatgggtaaattctgtcatggattcaggaaatagctcggaaccctttttcccgattatattttcttttttcctgaaacaagtttcaaagaaacggttaacgtcacaaaaaattgtttcaacaatattcccgttttcatttctaatcactttctctttcatatagagaataggcatattgtcgataaggtttgtatatttgatttggttttcgaattcttgcttttgaacccttcttaattctttcaacatttgtatgcgtttttgttggataagggctatcagcaaaagtgtgatgaatattcctgtgataacccatatatatttcttcaggaaattttccggcttatcataaaatatgctgttttgagggcataatttagggttgagtcctttattgaccagcgtcgtataattaaatgtgggatgagcatctgcaggaacaaagaaaggaatttcccttgccggctttccattaagtatttgtgagacattccggagcagttcattgataaatatcttttcattatacatatatccgcccaccatgcctccgtcgtccataccggcatagcggatagagaacaggggagaagaaatgctggaaaggcttcggtatgcgtttatcaacatttgttgtgaggttaaggtttccgcaaaccatgtggatactaaaactccggtttctttgtcggcatttcttaaggcattatacaattcgggtagcgtataattataagaggagataaattgatattggagatatggaaaatccctggctataatattctttaactgcttgttgtattcagggttaggataaatgccgtctcccaaaaaaataagttttttcatattgggaatcatgcgcgtcattagttttacgctttctttcagataggccggagtatgcatgaaggtgatattgtaatcatctctcaaactgtctacatgaattttattttcaggagttgtcacatcttgttttctgtaatattcttctgtatatatgtatgggtcggaatcgcatactaaaatagacacgtctccccacatttcctttatctcttctctgaaaatcatgctcatacttcccagcaggaccaacagcttgggaggagttttgccatacttgtttaaaagcatttgtggaaacctgtctaccataacagaatcgtttaccataaaaagatttaggtgctcaatgtatgcatcaatatcttttagttcggatattttatgcatgataggagaggtgatactgttactccagggggcggattcgttataactgtttaagatgagtacataatcatattgcctatgatccctgtcagaggctttggcagaatatgtaccggcaaaaagcagacaaatgcagattgtcagtgtttgaaagaattgccttgatgtggctgtgtgtttattattcatagcagaaaatagactctttatgttatactctttatcagacttcttacaaaagtaaaacaatatcagacagttatgtataaaaactcccttattaacaaatattaatttcacgagtaagttcttacagaagaagattttttatgatattttgagcagaatgggaagtttggctaacttatacggtgaaattgctatttttcaggcgatgaaaagcgattaactttgcaatatcagaaaaagataaaaaacagataaatatgaaattaataaaatcaaccattaccgcccttggcttgttattcacagtaaccgcttgtgcaggcaataaagaaagtaaaaaccaaaacatgaaaggagaaaatatggaaattgttcatttaaccaaagcagagttcttgaagaaggtatataactatgaagccaatcccaatgactggaaatatgaaggtgacaaaccggctattgttgatttctatgctacatggtgcggtccttgcaaagcattggcacccgtattggaagagttggcaaaagaatatgccggaaaggtttatatttataagatagatgtagacaaggaagaagaattggccggtgcattcggcatacgaagcataccgactttgttatggattcctcagagtggaaaaccgactgtaacacagggagcattaccgaaacctgaactgaaaaagatgattgatgacactttattaaactctaaataaatgttctcgtaaacaagtggagaagatagggcataaatcttttgccctgtcttcttttttatttaaataagtatgcgtatatttataccgacaataaactatgaattatggaatatcgttttaatacaccgctcaatggcaatatagcgatgacgtatcattatcatgaggatgctgctctccggcgtgataaaagcttgtataaattcgtatgggtacaaagtggcacgctggatatagaagtagaccatgtggtaatgcaccttgaaaaagatgaaataatatcgctgactcctttgcatcatgttgaggtaaaaagagtggaaggtgagtacctcactttcttgttcaacagcaatttttattgcatttacggacatgacaaagaagtgtcatgtaatggtttcctgtttcatggttcgtcccacatcatgcgtttgcagctctctgcggcccagtcggaacaattgaaaagcatcattgatatatttgccggtgaattcggcataaaagacaatttgcaggaagagatgctccgcattattctgaaacgttttataatcacttatacccgcattgcccgtgaaaaattagatgtgggacaagataaagaaaagagctttgacattatccgtcggtattatgtgttggtagacaatcattataaagaaaagaaacaagtgcaggactatgccgaaatgctctaccgctctcccaaaaccttgtccaatctgtttgccgcctatgggttgccttctccgttgcgtatcatacatgagaggatagaagccgaagccaagcgtttgttgctttacaccaataagagtgcgaaagaaataggtgagatattaggctttgaagacttggctgctttcagccgtttctttcgaaaaatggcaaaggaaagtatttctgaataccggaaaaaagagaaagaaggaataatggcaaactaaaacggtataattgccatttcacagggaggaaaatctgccgacctttgcaatgtaagttaaacccttaaaaattaaagcaaatgatggcaagattaaattccctgtttactgcatttctgacaattgcagcttccactcaaaagttaggtattaatctgattcgcgtggcaattctggtgatattcgtgtggattggtggtttgaaattctggaactatgaggccgagggtattgtgcctttcgtagccaacagtccttttatgagtttcttttatactaagagtgctcccgaatataaagagtataaattaaaagaaggtgagtttgatgaggccaagcatcagtggcatgaagagaataacacctatggcttttctcatggattgggcattttgattatgaccattggcattcttaccttcttgggtattttctctccgaaaatcggtttgataggtgcaggtttggctattataatgacattgggaacgttgtcctttctggtaacgactcccgaagtatgggttcccgatttgggaagcggtgaacatggttttcccttgctgacaggtgccggtcgtttggttattaaagatgtggctatcctggcaggtgcattggtggtactctcggattcggcccggtcaatattaaaacaacaaaataaaggataatcccccactaaaaacaagtaagattatgaagcagtatgatgcaataataataggctttggcaaaggcggtaaaacactggctgctgagttggccaaaagaaatgaaaaggtggctgttattgagcgttccgatgagatgtatggaggtacctgcatcaatattggatgcattcctacaaaaacattggttcatcaggcaaagctggctccggtaaaggcatcgtgggaagaaaagaaagcctattatgctcaggctatcgctgaaaaagaagaggtaacctcttttttgcgtcagaaaaattatcataatctggcagacaatccacatattacggtttatacaggtattggttcttttgtaagcacggatgtggtggaagtggtgatgcatgatgagatcttgcaattgcaggctccccggatttatatcaatacaggtgcggagactattattccgcctatcgatggagtgaaggataatccgttggtatataccagtacttccattatggaactgaaggatttgcccgaaaagctgattattgtgggtggcggttatatcggtctggagtttgcgagtatgtttgcttcgttcggttcgcaggtagtggtgctggaaggcaattccgagttaatctccagagaagacagggatatcgcatccgctgtgaaggaaactttggaaaagaaaggcatcgtattctgtctgaatgccaaagtgcaatcaatccgtgaagggaaagtagtctatcgggatgcggttagcagtgaactgcattcattggaggctgacgccgtattgttggcgacagggagaaaaccgaatacggccggattgaatttacaggtggctggagtgaaggtaaacgagcgtggcgctatcattgtagacgggcatttaaggacaaccaatcccaatatacgtgcgataggggatgtgaagggtggtttgcagttcacttatatctcattggacgattaccgtattatccgtgaagatttattcggcaatggcggacggaatctgaacgaccgtgaaccggtgagctattctgtctttattgaccctcctttgtcgcgtatcggattgagtgaagaggaagccgtgcggaaggggttgaatattaaagtcaacaaacttcctgtagcggctattcctcgtgcacggactttgggaaatacagtcggcctgtttaaggtggtggtagatgtagataccgatcagattgtgggatgcactctgttcggccctgaatccggcgaggtaatcaacagtgtggccatggcaatgaagaccgatcagccttatacattccttcgcgatttcgtctttacacaccccagtatgagtgaagcgttgaatgatttgatgaacttttaattgaatattttctgttaaatagtaagcattcggttaaccccgtcttgcgatgtctataaacagaaagagatgtctcctgaaaattccagcttttctctgaaaaagtccctatttttacgagacatttcttagtttttatgagagtcttaaataaatgattctttccttatcgtggttctcatctttggcaataaatccatatattcactgtgctatatattgattttcaggtatttctttatctgatattgtaaatgtacatatgaaattattcgtttatactaaaaccttttcagcatcagtgtggcataatcggatttcaatatcaactctttaccgttggctttcaccacttcaaactccgtatccaatgcattgatgccataagggagaagctcctccaccgtgacatcttttttatcatcgcttgtgccttttctccctttgaagtctctcatccgcacgtttccgttctcctcatgctcaaaccggcctatgaccggtttatgcgtagtaccgctctgcttggctgctatttccaccacccataaccggatgctgtaataaatccgctcgcacacatgcaccttgccatcggccgccgttgtaaactccagcaattcccagtgcccttccatgtcactgtcgatagccttcttctggcatcctcccatgatgaagcccaaaaagagaacaaccaccactcccgataaaaactttaatccgcgtgtatttttcattttccgaatcctcctgtttttctcactgtcaacatggcccccatgctgttacccaaataatttcccctatccatggcaaaggcaagcgtagcgctccagcccgtccacttccgtgggcagtagcttacttccaccatactgctgaactgctttctcactttgtccagcggcatcggataggtgccccaatgccgcacatacgatgccagcacgcggtagttccattcactgtccggttctccgcagaagcctatatgatgcgcttttacacgggtactcttaaacagcaccgttccgtcgtcgttatatacaggtcccggaatcagtccgttgcccatacccattccccaatgctgccatgccagatattgaccgttattgaaataattgtcaccaccgcttatctggaattcgggaaacgagccggctatcccgtcatacagaatcggtcccgtctgatccttcgtaccgagaccttcccacagcacccggctcacccaccggttccggggcaatgtcacttccagtcccaactgtccgtctttccacataccatactccatgaacatctgcgaatggtcctcgaagaaatgctccatgtaagcccttatcttccagtcaccggcataataagaaagtgccgcgttccagcttccgctatggtttccctccacattctgcaacgtactctcctgagcaggcaccagcgccttgaagaaactcttcagaccggccggatacttctttagcagcttgatacttccgtccgcattcttcacatacctctttcccccgaactgtgcaatgtccaacaatcctatttccagctccagaggcagcttttccctgttgccgaaccgcagcatcagtgatttgctgtgatacaacacatccttcagaaacggttcgtccgctccggcaaactcttcctgccaattgccatccgtgcacagtccgtaagcgatatgccctttcagtgccagccaattacctgtaaacggcaccgtcagatactccggcaatcccaccctcacctgcggaataggtcttgcattcgcaccttccaccatcatgccactgctcagcctcacatccttttccagcgggaatccgtttctctccttactcccgatgctcatctttatcgccttccatgcaacatccatataagcctgttgcacaaagaaatccgcagtcagattctttcctcctgccaggtctgcacccgcctgcaccctccatccgtgctgccattccttctgccattgcacaccggcacgcaggtaagcacttttgggctcttgcgaagacagtccgtaacgattggcggtgaaccacaacggagcataccttccgtcggcaaccgagacagaagtttccacccgataagaaaacggagtagatgctttctgttcctgtgcagacaggcagattgggatacagaaagtaaatatgggtaagataacagatttaaattgcattagttttgtgtataatttaatctattgaatacttctcttttactatattccataaaaacaatatattgccgataatatatcttcgccacattcttccgggttcttttatcagtctgtatagccattccaaactatgttcctgccaccaaagaggagcgcgtttcacggttcctgcaaagaagtcaaatacggcccctatcgttcccacgtggcagtgtatgttcagcttattccaatgcatataagtccatttttcctgctttggagcagtcatacctatccacaataggtctggattagcacggttgatagtctcaataatgtgcttattctcttctgccgtaaactccggcttatagggtggggaataggtctctacagtaatattgggataaactactgccgctttttctttgattaatgaaagcactttttcgctgcttcccataaaaaaacattttcctccttttttattcaacttatccatttcaaattgaaataaatcccacccggcaatacgctcaagtggtctttgaggagtactcagccacttacaggccattacgataccggctccatcaggaattaatgcgtctcccttcagtaaagcctctgcaaaaagagggtctttcaaggcagtattataagaatgagcattgatggtgttgatcagcaatttaccatcgggcaagtcattcagtctttggcgatattccaccaaagagatttcttttaacgttaaaggcattgttgttataattacttctagtttgtgacaagtttttctagaagagttttcattctgttttcaaatctttttatcgtgaattcggctaaaaatttttttgaccgttttctcccatcttctggcaaagcgaaggattgtttaacagcaattctattttgtcagcaagtgctgatacattctttttttctattatatatccggttttgccttcttctatgatgcttggtattcctccttcattggtagatataacaggtaatttatattccatagcttccaaattgaccaagggaaaacactcattatgagtggggagcacgaatatatctgcctgttcaaagtattgtttcttttcttctccgaacttttttccatcataaatagctagcttgtttaatcctctttgctccacttctcttttaaaccttgcggcatctatttctgcggttttacctcccacaaaatcgcagacaaatgagtatcctttgtccgaaaggagctttagggcatcaagtaagaccaatactcctttactctctagtaagttggaaaggaatagcaaatgcggtactttgttatttcgttcggcagtagattctttgttcaaggtttcagggatgccattgggacaaaacatcacgtcttcacgctttacatatttttttatatcggcatagagagcttctgccagtaatattaccttcaatcgtttgaagataaacggtaaagcttatcatccagccaatggtcttgtcgtgtgtatacccccttgttatgataatgcgccactatttggcatcccattgtttttaacatttggactataatgaaatctttataaaatgcaccgcccttagcgttgggagtaatatatattagttgtggcttcaggcggtttacttcctttcggatggtgttcagtaactgcgcaaactgaaccagtttgcggattcccaccttaccaatgtccgcaaggtctttggctgtggtaagattgatgtaatagcagtcaaaacttgtgttgatgagcttgctgtcgtggatgtactttcccatcatggctgctccgtgaacgggagggggagatggagaatgaaaagaactctcatgcagccctcctttcctcattaccatacgaaagggaaaagtaactatagtttacacttttttacccccccccagagagagatttcggactgctcgtaagaatagcgtttagctttctaattaggctgttccacactataccataggttaaattctggtattttaaagtcatttttgtattgatataaaccttattatttcctctttccttcatctgccgatagatgctgaaatgctcacatctcacctcaacccttttgtcagcattgttctccacttgatacttgagaccatagacagcagcatatttgtatattgccaaaccgccgaaagcggagaatacgcgaatcaacgatgacctgcccgaatgcttcccatatttctcagctagcgattttatcttttcttccgtttgcggattacgctcatcgccatattcggtcaatgcatatgtatcatgatatctcctgcgtagtttgggtgaggtagagtaaccgaatgccgtaatagcatcccattccgtgtccgtttggaaagagctaataattcccttcaagtccaagcgtgctacatccaaatccaccacaatcaggtagtccgcttttagctgatttgttaccacgtattccatatactggttacgtagtcgtaccatcttctcaatcctctgccgcgaatagaagggattcacattgacgaccgatgatttgggaatggtggcagaagcatctttatcctccatgatgcaatggatgcgggttgcatcctgctttatccagtcagttagcaaagccttcgtaccatcagtactattattctcgaatatcacaatctgaaaatcatgcacctctttgcaaaaggcattgattacagggatattcactttcaatcctttctctgcattcctaacgatactgcaaatgatgaaagtcttgtcttttatagaaatactcattatttgagattgtgttaaaatttaagtttgtccgaactttctatgttggtttcagaattagcttcatcaatttttgcaatcagtgactcggataatccggattctaactttctgacaaacatctttcctgatttcattagcttatcataatctttcaaggaataagaaaatatcttacctacatattctacgtaatgtaacttggttctatttacaagtcctgaactcatctctcctatctcttcctcaatgccttttttatatgacgaagccatgatgcacgttgcaaaaataagttcgtcaggagcataagaagtttggaaataacgcgccaaagatttgtacatatgttacctattgtcaacaactttttcaccaatctgaaaagttgctgttcgtccttatgtgcagcaattagaaaagctatattcatactattactgaattaaaagatacatgattctactataaattctaatgaacagcccattgtaagccatggctgatttgtagagctttggattgacttctgttgacgacggcagcacgaaatttttgctcccctcttggtcaaattcatacttgaaccgattgaacttcttgcaatttgttccatctccatcgaacccatcgttcctgaccttacttataagagggaatagcgaaatcttattttgcaagaattgagcaaagcaaaagcgtattgcccatgatttatttttgccatgtttccagtcattgagcatcttccagcaatcagagccaccccattgattgaatttttttcctaaagaagtgtatttgtcccaatccttcaattcccaatccacactgttccagcggtctgcccatgtagcccatccccatgaactgcttcgagtacaaaagtacgagtcagctatatagccattaggtttttttactttattggaatagccacagatagagaacactttttcattatgctcataatgctgcaaaccttgattcatgaatgacaggaagttgggagcgaaaaccaaatcatcttctagtacaatggcactgccgtattggttaatcacctgcgtcaccccttttatgatggaaggtcctagtccgttattaacttctgcaaaggtataggttacagatttaaatcctttgatttgccgcacatattcttgcacggctgccactttatctgcttcgcccaccttttgtttccgtggtccatccacaaagacaaagaggtcggaatcggctgattccgtgttttgaagtaatgagttgattgtgtttttaaaagcctctaatctgttaaatgcaaaaacaatgattgcagtattcatgaaaaaaggattaatgtctttttttatatgctctatatgcttgacggataaatcccacaaacgtatctattatacctaccattttgatggtgaaccataaaggatgttgttctttcttttcaaacttcaatagattctctgtatctagattgagaacaacgggtaatgctactttcagaaaaggaataccatgatggcttgtgtgaaaagcaatccgatgcaaaccggctactgattctactactttggcttgttctatatcccagcgagatttattggagtaaaagtagaacactatatcaggatttgatatatagttagatatattaaaataccccccccatggcttttgaacattctgtgaaccagtgggttagtacattctgtacttcttgatagcaaagaatgtagttcaaattgtggattgaaagccattattttggcagcatgaagcaacgatccgtaaagtgttgcggcataacctccggctgaacttccaacagttataacttggtacccagtggtttctttttgtaagaaatcaagtaaacgttttggtgaattgattatgtggttaattcctatcaagtaccattgtttacagacatctcgtacaaaaatgtgtttgcatgctttttgaatacgatttccataccattcaaacgaatttttctctatcacacgtgttttgaatgtctcttcattatctggatagtacaaatcattacttgtgaaatagatagcacaaattttgtcgttctctactgagttattgctttcaattaagtaattgggatattctttgtatgctttttgaacgatatccgaatctgttttaaagctatattcctttatttccatattcagtagtattctattgttgtatcataaagtttttcattccatattctttgcatatagtgttccattgtatgtcattttcattacatcccacattagtggacattaaagaagtaacttgagaaccttttatttggacaccagttgtcaaatactctccactagccactttgacgcctactctcatttcttgtattttcaaccataaatcatcagcttttaaagcaagttgctttatctttgctatgttaaaaacatctgatttgtctaaacagtgtggtgggtaaagcactcctttgtagcctaatgcacaattccaatcagatggcgatgactcagaaagaacttttccccaatttcgataaccatttaaatttccattgggcttttttgtaatacgacacactttattggcacatattacattagggtataattgatgtatcttttgcagattagcaattgtgtcatcatgatagtatatatcatcatccactgttattatgcattcgtctccatattcctgtaatgcataaaaatatttcttgtgtggcattaggttaagctctctaaagtatatttccagccctagagcttcatactttaacaatcgctgaggcaatgaggctttccctttaggaaattcttcattacttaaatataaacatatttttctcggctttacttgctggcgaaatatagagtctactaccatccaaacgttctctatacgtttaggaaaagaagttaatgacactatgaatttcccatcgcaaggaagtggagggggcattgttcctatccatttatgtactgtcatacatagcattaaggcttgctctgccatgcggaaacacacattacttactatccacaagaacctgttcgtttctttgtatctgttcttatcattatgcccatagaaatatttatggactctcagtatcaattgtcgcaaactcatattttttatttgaatatttagtaatatattaaataattaattgtttaaggcactcttactaattagaaattttggaattatttttattgctatttttttattagacattagtgatgttaaaatgaaaactacatatgtccaaatccatgcaacaatagacgtacttaatatattatttaggaaagcgaaggataaaaaggcgaacatcataaacattttgctaaatagacttagtccttttaaagctcgaaaatatatcttaaaataataaattaaaaatgctactgtaaaaggtattcccatattgtaaataaatccagctaaccaattttccattgtgttaagttttactaatttgcatacttctttataccgctcttgagagaaacctatgagcaattcttttacttccatgtgttccaagggtttccaaattgtcagcctggtttgtgcggaaccatctattaaatcagaagtaactaaacgtccagctaaaggtgagtttattattatattaaatgcataaatgaatatacagataatgcaggttacaagtagaagctttttaaattgaggatgttttattgtttcatatagtatatatataaacaaaaaagtacaagatagtattgtagctcctcttgcattaaaacaaagtaaagatattatacccattccccaaagggtatatttaatccatgattttatgggcatgacaagaatagagcacataagaatacttattgaaaaagcattggtcagaggatgtcctaataaagcggatgatctgaaaatataatttaagccaacaccgtggtaatcattttcccatgtctcttgccatctattaggtataagatttatcatattgattcgctcataataagacattaaagaattcactataaagaaaattaaaataccaataaaaagatttctgacaagtttatagtccatattagatttcataataaggataaacatggcagaactcattaggcagccatatagataactcatccctttgaatttatcaaagattagtagtataattgttataacaaaaacaagtaaaaatattctgtattcgtttttagtatcttttaataatgtgattttattataatttactgcgaataacatcatcgtagcaattataggaatatatccggcaactgttaaatttatactgttgggaatgagaaatggagcagttaaatgaaataataagattagatatacgtacatacggttttctttaaagaattaaaatcttttgtagtatggcactatttgataatgttccaattattaggataaagaatattatatggacgatcctgcttgcttttaagtctataaaatggagcacaaattattttagcattagaaagataagccccccaccaactgaaagttgaattggcaataattgcatatttacattgtgacattaagtaaaggtcttcgtaatctttattcccttttatatatgtcgtggggtaattggacagaaattgaaagtgtaatttgcaatattcgggatcatctgatattatatagagatgaaaattttcattttcttcagtattgttttctataaattgaatggcattctggtaatatgttgtctttgataaatcaacaaaatctgttttaagatagtccccacggcgtacatggatgaaaacagagttgttaatttgcatatcttttgcaatatttttgacattattgcttcttttttccaatgattgtgtgaatactttttttacaatgtcaccaacaggatgaaaataaaaatcagatccccaacttccatgaaataaaattgttgcgtcgtctttataagagctgttttcaaaagatttaaattcatcaatatcctcatgaattattggtgtatgtgtaatagtataatatatatcttttatgtatatatataatctataccataatctttcgatgagattgtatctttcttttaaattgaatggataatttaaatcgaatacttgggctagtcgtaaaccattatgaaatttgtaatacttatattggtcgtagtcaatcgagactttgtttaaggggtattgttttttcattctaaggaaaaaacaataacaaaacatttggtttcctaaccctccactcatctttattttaatttttatcatgttgttctttcttttttgatataatccaaggaatatatttgtttattatcattactgaaatataaattataggccatataataacatttatagctaggccataataaaaggtgtttagtgaaaaaaacagttgtaacccatacccaaatacggttatatatataaaatgaataagcattatagtaagcgaattttttcctaaccatataaatgctctttttatatggttaggaaaatctattgctgttgataaacaaataatgcttagtgttcctactgttgcgaccaatatggacagatgccacggagtgaaaagagattgtttcatatctaccataatgtcccaaaaagaggcagtgaggatgtatataacagttaatataaaactaattagagccataatttttataggaaattgaatgactatttttgataataaatacccccccccctgtaaatatagatgcaaatatgattgatttcatggaatacggaagttgtgaaattgcatttgttataattcctccctgaaagaataaaaataggacagataacaagatgattttgtcatttaataaaattaaagaataaacaattgtaattgatataaataaaacaggaagaaaccatagagtgtgtccgatattaggataaaaatattcccataaaaactgccttttaatactagttgtcattaaaatttctataactgcaaaataaaagaaaggtaatatgagtgatttgaatcgtttctttataaaatccaatattgtatatttcttttttatacaatatcctgatagtaaaaagaataaaggcatatgaaagcaatagaccaacttgtgaaaataatcgaaataacaagtatgtcctaatactactaatagtatacctatacctttgcagatgtctattttttcattccttataatcttaatttgagtatttgccaattccatgaatgattaaaatttgatatactgttttactgtttttcttattcgagaagagaagtttgcgagcatgtattttctttttatatgtgggtattcttttatgatatcgttgtaatcatgatagctttctaataccttgtgtaagtcattggcatattttttttcttttacttgttgaaaaactttatatatgaaaacgcataaatattgtcgtaaatctttaatacactcattatagcaatccatttgtttaatacagtttaataatttttcatagcgttccgtttccctgttccattgagatatgtaatctttataagtttgttctgtcatacaagtttgggaacgagtaagtgatgttgcattgctacaatcatagaggtaaagatactggtttaaaaaataaacagaatgtatattcattaaatagtcatcattgaaataaacatcttctgctgacctcacgtttgggttaaaggtaattttgtgtttttggacaatgcttgttttatagcatttattccaaatataatgccatattggatgtgggcgattgattttggctgtcattgcagctttaactgatgacagaccaatagggaaattataatttttcttcagctttaaatgtccatgcaaagtagcatatttaaacattaacaaatcaggagactcttgtgttaaaatatgagtcatttgtgctaaggccatatctgacaaataataatcatccgcatctacaaatgtaaaatagggtgtagttactgcttttattccttcctgacgtgcaatggaaggacccgaattgtgtgataaagtttttatcaatatgattccttgcattatggcctgattaaaagcttcttggatgcaaaccactgtattgtctgttgaacaatcgtcaataagtattattttgaatatacagtttttttgttccaaaatagatgtaagggttctttttataaatgcttctgcattgtaagtagggatgataacacttaatacacattgggaatcgaataatttgcctcctttggtttgtagcattatattattggtgttgttttcttccattttgatttattcttttaagtattttgtatgccatggaatatattttattccgctccatactattcaatgttatgtataaagttaagacggtatacaaaagcatagatagtatggagaataaaattaagaggattatgtctgaatttacagtttcgggcttcaatacccaacaaaaggaaaagaagaagacaatacacgacattggccttaatacatcattgagtagcatttgcgttagattgaaatggcatattttgtgtgaataataaatgcgaatgcacaacttgaaaacagcagatataagcataaggatatatgcccaataagggggaaagtccatggcaaagaataagatagaaccaaagaatggaaatagggaaataaaactgttaaataaattgatttgcttgatttttcctataccattgatgcttgtaataaagaatagaccaaaactatccactatgtttgtcataaaataaaagaaaatgaaaatagaggtatattcagggacatttacaagccatagtgttagaaactgatgttggtttagtagaaaaggaagaaaaatgactgtggtcataaaaagggttattttacttcctaaagacgctatgttgtacatttggtccaattgatgtgctcccgctttttttataatgggaggattcaatgctttggtagtttgagtggatagcacacctagctgtccgcttagttgataggttattccttgggcggcatttactatagttccaaaaaaatgatttagtactaatccagttccctgatgtgatagcaaccccaaaatggaggtcatgaaattccatcctgcaaatgaaatcatttccttcattgtgcttttatcccaatatttacgcaaagcaatagcacattctgcataatgtctgtggcaatatattcgcataatggtaagcgtaattaggggaatacaagccattagaataccatacacaataagcttgtcataaaaggtataaacacagacaaaggctacaaacaatttcaacaaggattcgataatgcccactaacgcatagtatttcatgttttcatgtgcattcattacagcatcgtaagggacggtcatcacagtaaacatagtgctgacaatcaaactgccatatacgacttgtgctgcaaaaatacgattggaaggaatattgagtactccgttaaaaaaaacaaatccagcagcaagcaatataatgccgacaagtatcgaaattacaaagtgtaaagctaaactgatattgaatatacatttttgcttttccttattgccttctccttctgaataactcatgaatcgctgtgtggcacttgccatggctccattgaggaatcctaacatggcaatggctcctcctactatattgaagatgccgaagtctgatgcaccgagggaattcaatattagtcgagtagcgtaaagcgagatgaacatggtaatgctcatcttagcatagagaaagccggtattttttatgacacgtttggcagtagaactcatgtctctattgttcttttatttgttctttcccaataatagtaatcttatgattggaaataaattgataaattggttgataaatatgcaagcataagttacgacaattccaagaaatatagtaatagcaagtccgtaaagttcgttttgaggcaatagaggagaatatggtgtcattgggagaaaagtccaatgaatgacgtagatacccaaagaacagatgccacatttttggatgaatttgtcagttttagcattccaatccatttggcatacgatataaatcaattgtatgacagcgaatgatactaaaatttttaaaataatattgattatggatgtagcacctgatgtccaaaaacaagtgcataaacagatgctaattaggctgattgttcctgctgttttattttctaaccatttttctttactaagtgccgacatgagtattcctgttgaaaaataggggaagtagagtgtggcgagatgaaaattgccagtaatcttccatgcaaaaagaagtacaatctgtatgaatacaaagtaaattacccccccccatatagtatttaagtgcttgattttaaatgtgtttataaggttgagaccagcaaaagcgaacatgtatccataaagagtaagcaggaaccacaatgtcggatgggcgaaaccctcagctacatcgttccacgttattatttgccagtcggtagtaaagaaaaactttcttactacaaattgccacatgataaaaggtaacatgagttgaattgttttctttttaagaaatagacgaatatcttggagacttgtcattcgtgaagtcttttctattatatacccgctaataaaaaagaatacggccatattagatatgcctattagcttatgatagacaaattggttttcaaaacaataagtgaggtgttgtatcacaacagataatatggcgagtccgcgcatacgatcaatccaaataatgcgatttagtgatttttccatttttagtctctcctaaatatatcacgtgtataaactttccctttcacatcctccaaacattcatcatagcgattggcaataatagcatggctctgttgtttgaaagtatcaaggttattcactatccgactgccgaagaaagtggttccatcttccaatgtcggttcataaataatcacttcggcaccttttgccttgatgcgcttcatgataccttgaatggcactttgacggaagttatcagagttggacttcatggtgaggcgatacacaccgattacgcaaccgtgctccttacttgcatcgtaattgcaattctcatcgtaagcatagtaaccggcttttttcaacactgcatctgcaatgtaatccttgcgagtgcggttactttccacaatggcttcaatcaaattttccggaacatccgcgtagttggcaagaagctgtttggtatctttgggcagacagtagccaccgtatccgaaggacggattattgtaatgtgtgccgatacgcgggtcaagacccacaccgtcaataatcgcttttgaatcaagccctttcatctcagcgtatgtgtccagctcattaaaatagcttacacgcagagccaagtaagtattggcgaacagcttcacggcttccgcttctttcatacccataaagagggtgtcaatatcttttttgattgctccttcttgcaacagggctgcaaaagtctccgccgcttttttcatactgtcaacatccgtcactgccttgatggcttcattttcttctgcaaaatccggtgcttcaataatctttggataaccgacaatgatacggctgggataaagattgtcatacaacgccttgctttcacgaagaaactcaggtgagaaaaggaggttgaatttcttaactcctcttttggcatactttacgtaaagattacgggtatagcccacaggaatggtactcttgataaccatcacggcatcgggattcacttccaataccaggtcaatcacttcttccacatgggaggtgtcgaagtagttttttaccggatcatagttggtgggggcagctatcactacgaagtcggcatcccggtaggcttcgctaccatcaagagtggctgtcagattcaatggcttttccgccaaatatttctcaatgtactcatcttgtatcggtgaaattctgcgattaagcttttccactttttcgggcactacatccacagcttttacttggtgatgttgagcaagaagtgttgctatgctcagccctacataaccggtaccggctacggctatttttatctctttgatttttttcattgtaagcacttactatatggctagaatgcctataaagctattctagctcacattgagttatattttttgattaataattacgttgagagtcatacaatgagtgcttacttacattaagtatttgcttcctcaaataagacttttgctattggaaatattgaaaaactaaatgttagttaatcttacactctttgaatttgcattctagctctttcatatatatcactttatttccattttccttttctccggttttaataatttgaaattgagttccttttacaaagttgacttgcagttcgttgtttttattataaatgtgatataaacaatgggcgtgtgttttttcagctcctaatgtcgtaattacatagctgtcacggtttcttttaaaatcttctatactggtggtaaggctatgactaggcatataaatatcacccggttgaaaatcaacaggatcgtgagaagtaagatttctatagagaatccttccttggtaaataggggctttaaggattagactatccagtacatgttgcatttcttgggctatagccggaattttaccattatagtagtcgtcacgaaaagcaccggatatatttccgtaaaagcaacgcagtatgagtatttcgacatcagttaaaccatattgcttgaaatgtgtattatatcggtggctgtcatcaaaaccaggctttgcacataaagtaaaggattgcttgcgtaagaaaccaagtggttcgtttggtatggtgaattctcctaattcctgattataatacatcttaggttctggagtattacaaaattcagtttcgatattgataaagtattgtatgtctttcattgctttagcaaatttaaacatcagctaggatacctgttgttggaaagagtgcttacgccatagattcatgaggtaagcgagtcatttcatccataatcttcttgatacattccagcatttcaggtaagttctcctttacaacattgaagacgatttctccgtccaagtcaaaatagtgatgggcaatgatatcacgtatgcccattgctcctttccagtctatttcaggataccggggaaataattgtttgtctgttagtttatcaattccttttatgctttctccaatggcaatcagtagcatgcaggtactttccaaacgttccattcccgctggagtcaggtaataatattggtaatcgtctatattctctgaattatgaatgatgcgttcgatggattgtgccaccttttgcaatatggaaagtagtaattcctgtttatgcataaataccctcctccatgatgcaacgtttcagcagttcatccatattctttcttaatcggacgatatctacaggacatccgaatatagcctgcaattcctctttgatgtgaatgagatgaaatatattgggggtatccaattctacacagatatccacgtcactgtgctcggcttgttcgccgcgggctacagaaccgaaaatgccaattcgggagatgccgtattgggctgctttcctcgatttgtaatctttcagtatttgcagatattcttgagtcgttttcattatatgagcattgaatttttctcaaaaatacatattatttctgtgaatgcaatgaatatgcttctttttttatttcaccgcttccacaaaccccaccggcatatccactccggcgcatcccagcatttccagtcgcactaccaccttgctgcgtccgtccacgttcaccagttctccttccattcccgccagagggcctttgattaccctcaccatttcaccgggagccagtggtgtgctgcacatttccaccgcctcttcgctatagtccagcataaacttgaaacgctccatctgcaggtcgggaatcacggcaggtgtatgttcgcccctcagcaccatgtagcggctcaccgacgagagtgtcagcacttccgcacgttcctgcggtgtggcgtgcacaaaaatcatcatcggaatcaccacgcgtgtcaccttctgacgacggtgcgcccattggcgaatctcctcctgcacgggcaggaagttctcgattcccattttcgtgagacgctcggcagtctttttctcgtgacgggaaagcacgtaggctacataccattttttcattctatatcagtcaaggggggagtggaaaggaggggataaggtgcgctacgcggtcgtcagtgtaatctcactgccgatccctccttgttattctctgcaaaattagacattaatttacgaattacaatattttgttcataaaaactcaaatatttaacattgtaattgcggatttttatatttttgctcctttttaatttttaaatattttaagaatatgaataaaaagaagatttggaaacaaatcaggacagatggaacaaggtgagaagtgtggaaaaagagttggaggagctggagcgagacattgagaatgtatcgttccgacagctggcggaactgaagcggatgtgtaggaggggctataaaatattctccaatcaacaagaaaagaagaagaaaggggaagattgaccggcaaaagaaaaagaggcaggaagaagatcgattgacctaaaagaaggaaggggaggagtgataacggaggatgtatgtaagcgtctccgtgagtctgtatggctgtccttctggggcttcttataccgttggggtataaaaacgaagcatcatggatttaaaagaatacagattggaaacaatttggaaaggttcccttggaatattgtccttactgttaaaaagaataaataaaaagaagaatgccaattgtacactttagttctgccggctgtttgttaggatgctgataaacagtaggtaaacggtgggtgatttggcgtaaagtgtaatatttcgttagttttagatgtcgtactttcgcacattgcaattttgaattgcaggcgaagggcaacgttttttccctatcttaaattaaaaccccattttaacatggattttaatgatttgtgctctttctattttaacgtgcgcgaacagcgttgcattgaaatgtcactggaagagtttgtaaattacatctgcaacggacgatggaaatcgacggtcgagatgtatcaccgcctaatggctgagggcgataagagtaaagccaaagagttgaagaacaaactgcccggcctggtggtggcggggtattgcgagggaagccatgcattgaagaaccgccgcacgtggagtgggaatgccatgtttgatgtcgaccatacgcagggacgtacacaggagttcctgcagaagctgaaggcggtgccgtgggtcggggcaggttggcgaagtgtatcgtacgatggtctgaaagtggtggtgcgtatcgaggctgcaacagtcgaagagtatgtgcaggcttatgcggtggtggcgtggcatatcggccgcgtgattgattttccgtgtgacatgagttgcaagaatcccactcgtccgtgttatgcgtcgtatgacgaggaagccttctgcaagcccgctttcgagcttttcccttggcgggaattcctcaaggagcatcccgataaagcgacgcagatcatggaggagctgaaggtgagacctgccgcaccggacagcacgacaggaaccgcttcggaatctgcttcggagtctgtctcggaacccccgtcgggcatcctgcgcaccttttttaatgactttctggcccacaacgctttcattcccggagcaaagaatgatttcttgctcaaattgggtcgtatagcccgatataaaggactgtccgatagtgagttgagacaactggaagcgttggctgtggagcgtctgagcgatgccgggtgtccgcccgaagatatcatcccgaaaatggatgccggatatcgttatgtggataaaaccaaattgtctgattatcagcgtaataatgctaatggttgggaccacaaggaccagggaccatctttatgctttcccggtcccgtgggagaggctgaaaaggctgagaatgagaagcttgaagcggacaagctccataagaacgctccccgctttccgaagtcggtgtacgacgctcttcccgaccttcttgtccgtggcttggaagcagctcgaagcagccgtgaaaaagaccgtctgctgctggggatgcttgccaatctgagtgcttgtcttcccggtgtgtggatgaattatgccgacatgtgctacactcctcatttttatgcgatgagccttgccggtgcggggcgcggcaaggggattgtgacgctcggctctattctgcccgatgccgttcagcgctatctggaagacaagaacaagacggtgcagtcggagtatgacaagaagcagttggcatgggcgctggaagagcgtttggccattcaggagaagcgtgtgcccgacatcgacaagcgtcccgagcctccggtgaagcgcatgctcaagatttcgcccaatatctcgaagagtcagttgattattgcgcttgaggaggccggtgcgcaaggggtggtgattaatgcttcggagctggatatgcttaccaatgccatgaagcaggactgcggaaagcatgatgatgtgcttcgtgccgcttttcaccacgaggaggcatcgtcttattataagacggataagcgcatggtggtggcgcatgttcctcatctggcattgtgtcttacgggcactccttctcagcttcaccgtttcatttcgtcgttggagaacggtatgtacagtcgtatggctttttatatcggtgagggacggtggaaatggatttcggcagctcccgtggagggtagcaccgaccatgtgaagctgttcaggaaattgagtgaagaggtgcttcgtatgtttgtctttttgtccggttcgcccaccgaggtgtgtttcactcccgggcagtgggaggagcatacgcagcgtttcagcaacgttcttcaggaagtggtgagtgaagatgatgattcgcatggggcgattgtgtttcgtcacgggttgatagcggcccgcatagccatggtgctgacggcgttgcgcaagtgtgagccgatgtggaatgtgcagcagtgccggtgtacggatgaggattttcatacggcaatggatatggtgaaagtgttgttggagcacagcttgctgttgtctaccaccgtgtctgccgtggagtcgggcaaggaacccaagccgatgaagaagttttatcgcatacgttcggtactggcaaagcttcccgaaaacttcacttatacgcagttgaaggaggaggccgtggaacatggaataccttccagttcgcttaaaagataccttgtccgtttgcttgagatgcaaatcattgaaaaagaggatggtatgtatcgtaaactctgtaaatcctggtccggaaactcataaaggtgggccctggtcccagtggtcccaaagttagatgtcattatgttgataatcagtatgttgattgtgaatcatattggaaataaccgcaaccaccgggagggcacctgtgaaagcctccgctgcaccgtttttttgttggtttgagtgggtggatttctatggtgtatgtgtggaattcagggcagacccgtgtgtccgcccgatagcattcaccctgaaaaaagaccttgatgttctcgaaaaacatcaaggtctttttcccaaacataatagtcttttcctgaaagacggaagagttttccggaaacactttagtgcgtttttatgctgcttttctttcgcagctctcttttccgctaaggctctcccaggtatttcacaatgatttccacctcctgtttcaggtagcaatggcggtatttgttgtagcctgtggcattgagttcttccgtcaggcgggggatacgccgtatccatcgataaaggttctgcagggcggctccgggttcgcgtccggggcaatagagcgacgccagttccgctttgtcgtaagtgcggatggcgaatgtttcttcttctttcttcattattcttactatgattatttattgttctttaatgtaaatataacaataaaatctctgattatcaaatgattaatgaagtttgtttcgacatgctccgttctttttttgagggggaggagttccttgtggagtagatgggatcttctccggcggaactccgaatggtctctgttttttaagtctttctcatggaagatgaagaaagttggttacagagattcgatttctgtaagggaaaggccggtgacttgcatgatttgctcagaggtcattcccaaggatttcaggttgcgagccgtttcaaatttttcttctcgacgtcctttctcaatccctttctcaattcctttttcaattcctttttcaattcctttttcaattcctttctcaatccctttctcaattcctttttcaattcctttttcaattcctttttcaattcctttctcaatccctttctcaaaccctttttcgattcctttctcaaacccttcttcaaacccttcttcacttcctttctttgctgcatagtcgatggtagccaaataatcacgataggcgtttacactgttttcatagcgcacacggtcttcttcggagagagaatgaacatcaacaatctcttccaacttctcaaatacggctttctgagctttaaaaggcatacgatttaatgtttccatgttatttaatacaaatatccaacgttcaaaatccgtttcgcactctgtttctgtcttattaaacaggggtaatgcgataaagatttgcctcagtttatccgaaaacaattttccggtctcacggtctgtcaatataacatcggtgcgcaacttatggttctcgtccaacaggaaattgatgaagaagactccgtacaccgcttttatatcgaacttccaactctctcccttcacgccctgacggacaatggcatgggaaagataatacagagcacgttccttgaaataaacctgggagcggttttgcatctccacaattattttctcacccgtgtccgtggtgcagaagatgtcgtagatggcaatacgctctcccggatagatcggcaactgctcattgttcagaaaggtaaggtcggttatcacccgttcgccctccaacaaatcatttaagaactcgattagcaactccttggatacttcctgaccgaatattttcttgaagccgtaatcggtgaacggattgataaactttcccattatgtttttctgtgtttctataacggacaaagataatgatttatatggaaaaggcattcggtgcagtctgtttttttaagagtgaggtcgatgtttctcaaatgctctcgctgaaagcaagttttcaagaccattcgttacctttctccaccaattccgacgaagcccgacaatggcttctctcaccgtcgtatctttgtcatgtaatcacagagtaaccggtgcttgagatttcgaagttataagtataaatcattaaaaattagaagattatgtcaaagtcagtatcttattcggtcgtaccccgtaaaaacccgcaggaacccgaagcgggagtacgtttctatgcccaggctcaggccagcggcgatgtcacagtccgcgagatgtcggaacgaattcagagaacctgtaccgtgacacgtgctgatgtggcggcagtgctcacggcgttggaagatgtgattgtggaggcgctgagtgcaggcgagattgtgcgtctggcggatttgggcacgtttcagagtaagcattcgataaactccccctttcattctaaaaatgtgatattacttttgtaatcaaagtaaaaaagctcaattgttatgtcacatcaatggaccatggaagattttgaatctatttattcccgtttcaagtcgagcggactgtcagttatggatttttgttcgaatgaatgtattcgtcccaaacgtttctacgagtggcgttccaagctgttgcgcaaaggcggctttatccc

SEQ ID NO: 6678 - DNA, 27001 bp, Unknown
  gut microbiota DNA sequence
taatcaacaactaaacaaatttaggtattatgtcaaaattaagattcagagtagtcgaaacggctttcaagaagaaagcagcaacggtggagacaccagccgaaaggcccagtgaatatttcgccaaatacgttttcaaccgcgagaaaatgttcaagtatctgcccggcgccgtctatgccaaactgacggacgccatggacaacggcgcccccctggagcgtgccatagccgacgaagtggcggcaggcatgaaacgctgggcaaccgagctaggtgtaacccactacacccactggttccaacccctgacggaaggcacagccgaaaagcacgacgcctttgtggaacacgacggcaagggtggaatgatggaggaattttcgggcaagctcctcgtacagcaggagcctgatgcttccagcttccccaacggcggcatccgaaacaccttcgaggcacgcggctacagtgcatgggacccctcatcgcctgtcttcgtggtggacgacaccctgtgcatccctaccgttttcattgcttacaccggcgagtcgctggactacaaaacgccactgctgaaagccttgagtgctgtgggcaaagccgccgtggacgtgtgccgttacttcaacccggaagtgaagaaagtggtggcctacctgggctgggaacaggaatacttcttggtagacgaaggactgtatgccgcccgtcccgacctgctgctgaccgggcgcaccctgatgggacacgaagccagcaagaaccagcaattggaagaccattacttcggagccatccccacccgtgtggctgcctttatgaaagaccttgaaatacaggcgctggaactgggcatacccgtcaagacccgccataacgaagtggcccccaaccaatttgagctggctcccattttcgaagaatgcaacctggcggtagaccataacatgctcatcatgtcgctcatgcgcaaggtggcgcggagccacggcttccgcctgttgctgcacgaaaagcccttcaaaggcgtcaacggctcggggaagcataacaactggtcactgggtacagacaccggcgtcctgctgatggctccgggcaagaccgccgaagacaatctgcgcttcatcaccttcattgtcaacaccctgatggcggtataccaccacaacggtttgctgaaagcctctatcatgagtgccaccaacgcccatcgcctgggagccaacgaagcgccgcccgccatcatttcttctttcctgggcaaacagctcacgcaagtgctggaccatatagaagaaagcggcaacgacgaccttgtctcactagcaggcaaacagggaatgaaactggacatcccgcaaattcccgaactgctgattgacaataccgaccgcaaccgcacctcgccgttcgccttcaccggcaaccgctttgagttccgcgccgtaggctcggaggcaaactgtgccagcgccatgattgcgctcaacgcggccgttgccgaacagcttgcccggttcaagcaggacgtggacgcgctcatcgaaaagggtgaaccgaaaatctccgccatcatcgaaattatccgccgctacatcaaagagtgcaagcctgtccgctttgacggcaacggctactcggacgaatggaaggcggaggccgcccgccggggcctggactgcgaaacgagctgcccgctcattttcgacaactacttgaagcccgcgagcatcgccatgttcgaatctaccggcgtgatgacacgcaaggagctggaggcgcgcaatgaagtgaaatgggaaacttacacaaagaaaatccagattgaggcgcgcgtgctgggcgacctggcgatgaaccacatcatccccgtagccaccgagtaccagagcaagctgatagacaatgtgtataaaatgaaagaactcttcccggcggaaaaagcatcccaactgtcggccgagaacatgaaactcatcgaagagattgcccggcgaaccatcttcatcaccgaacatgtagatgccatggtggaggcgcgaaaagtggcgaacaaaatagagagcgaacgcgaaaaggccattgcctatcacgataccatcgccccgatgctggaagagatacgttatcatatcgacaagctggagcttatcgtagacaaccagatgtggacattacctaaatatcgtgaattgctttttattagataatcactgcatgaagattatctatttcttttgttggttgttttaagtttgcgaagaggagcgtcgggatgacggtcctcttttttatttgttttattcctcccaaatctgcctgaatttcgcaatttctttctatctttgtctcactaaacaatgagaaacaactaaaagatgaaacgactaatccgtgcctatattatcataataatctgtttgctggccggaagcgctactgcatccgtatctccccagcattttacaaaagacgaaatacttttcatcagctcttataattcagatacaaaatacacttattccagtatcagccaatttgtagacgagtatataaagctaggaggaaaatattctcccgtagtggaatccatgaactgcacgacattggaaaaccaagcagaatggatagacaatatggacctcattctggagaaacatccccatgcaaagcttatcatccttctaggttcggaagcatggataagttacttttcgcagacagacgagaaatacaaggaattgcccgtctactgcctgatgacgcaacgatacggcgctaccctgaacactccccggattactaccgtataccaagaaaacacagacgccaaaagccaagtggacatgttgcaattcatgaaaggattcaatgtcaagctatgctattattatgaatacggcgtaaaagaagatattgagttcatccgcaacttattccctcaaacggagaacatcgccatcatcagcgacaattcctatgccggcctcagccaaatgaaatatgtagagaatgaaatagccgaacactttcccgacttgcaaatcatccatatagacggacgaacaatggatatggcgcaagccagacaagccatgaagaacctgccggaacgaacggcggccatgctctgcgtctggcgatatgacagtaaaaaggtcactcacataagtaatgccgaatatgtattcaaattggcgaacaacctccccgtattcagtctgacgggaagcggcatcggctattgggccatcggaggcaacattccccgatacgatgccgtcaactcaaaaatccatctggctcagaaagcctacgacctactggacaagaagatagacgccaaacccgacttcttttgttatcccaatgaattcaaaatagacatgaacatgataaaggcattcaggctggaaaacaagcaactcccctctgatgccttatacatcaacgaatccaatacgttggcaaccttcattgagcaatataaaggatatatcatattggcaggcgtgcttcttgtcgtgttggtggcaggattcatcgttgccatttcttattccgtcagactgaacctcttgaaaaggaaccttgaaaaatcggaggcgcaactgcgggaagagaagaaagtattggaactgtccgaacacaacttactaattgccaagaacaaggcagaagaagccaaccgaatcaagagccagttcgtatccaacatgagccacgaaatccgcactcctctcaatgccattgtcggctcctccaatctactggcgtcacaggtagaaagcaatctggaactaaaagaatatgtagatatcatttatcataactcggatttgctgctaaagctgattaatgacgtattggacatatcgagcatcgaaagcgacagcctgaatttccactttgaaccttgtcagctcctgccctattgccaaaccattgtggacagtttcagtacccaagttcctcaagggatagaactccgtgtagatgtcccgcaaaaagacatcagcatcacgacggatacttatcgcttgcaacaggctatcatcaatctgataaacaatgccatcaagtttaccaagaaaggctatatagaattatccatccggcccgaccaggacgacgaaacggtcgtcttctcaattaccgacacgggatgcggcattccccccgaagaacacgaaaacgtgttcaagcgtttcgtgaaactcaatgaatatgtgcaaggcacaggattggggctctccatcacccggctgattatcacgaagctgggaggcaagatatggatagacggcaactatcagaagggagcacgttttgtgtttacattgccggtctgcccggccgaacaaaaaaataatgcctgatttatagcattattcatttcttttcctttatctttgcgaccgtaaaagcaaaggggtgcccacggacagacgggctgagattataccctgtgaacctgatgcggttagtaccgacgaagggattgttacttcttgccacacatctatccggtttaaaagcaactctttgtatttacatacaaattcataaattcctaacttatgaaactgaaagtaaacagcaaagaaacagaagcaaaggacggatgtaccattgccgaactcgcctcacaactggcactccccgaaagaggcgttgccatcgccgtaaacaacaagatgattccccgcacagagtggaacgaacgcatattgcaacccaatgacagtttggtagtgataaaagctgcctgtggaggatgagaccgatggaacttcaattcattacacatttcaccgacagttattcctactacgattcagcatgtatggcactcgaaggcggttgccgctggattcagctacgcatgaaagatgcgcctgtcagcgaagtagaacaggaagccttacgcctgcaacatttgtgcagagattatggtgcgaccttcatcatagacgaccacgtagaactggtcaagaagatacacgccgacggcgtgcatctgggtaaaaaggatatgcccgtagcagaagcacggaaaatgttgggaaaagatttcatcataggtggcacagccaatacatttgaagatgtaaagatgcactacgaagccggagccgattacattggttgcggtccgttccgattcactaccaccaaaaagaacctctcaccggtattgggactggaaggatatcgctctatcgtctcgcagatgaaagaagcaggtatacatctgcccatcgttgccatcggaggcataactttcgaagatattccctctatcatggcaaccggtgtcacagggatcgcccttagtggaacgatcctgcgtgcagacaaccccatagaagaaacaagacgaatcataaatatagaaaagataaacaataaataaactatacccacaatgaagaaactcatcattgccggacaagaatttgattcccgtttatttctgggaaccggcaaattccattcaaacgccaccatggaagaagctatcctggcatcaggatgcgaaatggtgacagtagccatgaaacgtatcgaactcgatgacaaggaagacgacatgctgaaacatatcattcatccgcatatccggttattacccaacacttcgggagtgcgcacggcagaagaagccgtttttgccgcgcaaatggcacgtgaggcatttggaaccaactggctgaaactggaaatccaccccgatccgcgttacctgctgccggattccacagaaacattgaaagctaccgaggaactggtaaaactgggttttgtcgtattaccttactgtcaggcagaccccactctgtgcaaacgtctggaagaagccggtgccgcaaccgtcatgcctcttgcagctcccatcggtactaataaaggcttacagacacgtgatttcctgcgcatcatcatcgagcaatcctctgtccccgtggtagtagatgccggaatcggtgctccgagccatgctgccgaagcaatggaaatgggtgcggatgcctgtctggtcaatactgccattgccgttgccgggaatccggtagagatggcaacagcatttaaagaagcagtcatcgccggccgccgtgcttacgaagcagggttaggtattgtcggacagaatttgattgcttccgcctcatcacctctaacttcatttcttgattaaaatttaaatatgatggacaaagaacaagataaaaaagcatacgcccatgcagaaaaggcatacatgcacggaacgatgtttccatatatcaaggtaggtatgcaaaaggtaaaccttacccctaccgtgaacatcgtgaacggtgagaaagtggcaacacccaatgctcccgtctacatctatgacaccagcggtcctttcagtgaccctgacatcgaaatcgatttgaagaaaggactcccccgtatgcgcgaaagttggattaccggacgcggagatgtggaacagctcccttccattacttcggaatacggtaaaatgcggcgtgacgacaaaagcctgaaccacctgcgcttcgaacacatcgctttgccctatcgcgccaaagcaggaaaagccatcacacagatggcatacgccaaagcaggaatcgttacacctgaaatggaatatgtagccatccgcgagaatatgaattgcaaggaactgggaattgagacacatatcactcccgaatttgtccgcgatgaaatcgctgccggacgtgctgtcctccctgccaacatcaatcatcccgaaagcgaaccgatgattatcggccgcaactttctggtaaaaatcaacactaacatcggaaactcggccaccacttcttctatagatgaagaagtagaaaaggcggtatggagctgcaaatggggaggagacacattgatggacctctctaccggagccaatatacatgagacacgcgaatggattatccgcaactgccccgtacccgtgggcactgtacccatctatcaggccttggaaaaagtaaacggtaaggtggaagacctcagctgggaaatttataaagatacattgattgaacaatgcgaacagggagtggattacttcactatccatgccggtatccgccgacagaatgtgcacctggcagacaaacggctttgcggcattgtgagccgtgggggaagcattatgagcaagtggtgcctgatgcacgacaaagaaagtttcttgtatgaacattttgatgatatctgtgatattttggcacaatatgacgtagccatatctttgggtgacggacttcgtccgggctgtattcaggatgccaatgatgaggctcaatttgccgaactggacactatgggagaactggtgcttcgcgcatgggacaagaatgtgcaggctttcatcgaagggccgggacatgtacccctgcataagattaaagaaaacatggaacgccagatttcacattgccacaatgcaccgttctataccctcggtccgttggtaacggatatcgctccgggatatgaccatatcacttcggctatcggtgctgcacaaatcggttggctgggcactgccatgttgtgctatgtcactccgaaagaacacctcggactgcccaacaaagaggatgttcgcgtgggcgtaattacttacaagatagccgctcatgccgccgatttggcaaaaggtcatccgggggcacaaattcgtgataatgctttgagcaaagcacgttacgaattccgttggcgtgaccagttccatttgagtctcgaccccgaccgtgcattggaatacttcaatgaaggacgccatacagacggtgaatattgcaccatgtgcggaccgaacttctgcgccatgaagctgagccgcgacctgaagaatgtagaaggtaaggaataaatcatattctcatccaccgtaggggcaaacccatgtgtctgcccctatggtaaacaatcctcataggaagacaaatggaagaagatttcaagaaagcactggaaagcactttaggaagaaaatacatagacagcatagtagagcaggtgatggattcgcctgcccgcttcgatgacctctatgccctcaccgaacatgaagaagaaaagatagcctggcgtgctacatgggcttgtgaaaaactgagtattctcgccccttccttattgataagcaaaagggaagagctgatgcaacgagccatgcaatgtccccatgggggcatacgccgtctgctattgaacacacttcttcatcttcctgttccgaaacccatcaatgtggcttttctcgacttctgcctgaacggaatgttatcgcccgccgagactgtagccggacaagccgtatgcatgaaactggcatatgctatctgcctgaaagaacccgaactgatgggagagctggaagcctatttggagaatatggagccggaatactataccgcagccgtacaatgtgcacgcaacaacattctaaagaaaataaggaaatgaataatcagaaaatcagaatgtataatcccggaaagattgtaaatggagaatatgtatttgaatgaagcgggacggttggtagaaatcagcattcatacgaagaaatatcggattatatcatcaccaacccattacgatgggaaaaagacctattattcattgaacaataacagaacaataaaaaaataacaactatcatgttttcagaagaacttgaaaaaatagactgggaggaaaccaccaaagccatctactccaagacagagagtgacgtgcttcgcgccctcggcaaagaacattgtgatgtagacgactttatggcactcatctcaccggcggcagccaaatacctggaaccgatggcacaactgagcaaaaaatacaccgaagaacgtttcggcaagaccatctccatgtttatacctctatatataacaaactcctgcaccaactcctgtgtgtactgcggtttccatatcagcaatccgatggcacgtaccatcctcacccccgaacagatggaagatgaatacaaagccatcaagaagctcggcccgtttgaaaacctgctgctggtaacaggagagaatcccgccaaggcaggtgttccctatctggcaaaagcgctggacatcgcaaaaaaatacttcagcaacctgaagatagaagtgatgcccctcaaagccgaggaatacgccgagctgaaaaaacacggactgaacggcgtcatctgctttcaggaaacttacaacaaagcccgttacaacgtatatcatccgcgtggaatgaaatctaaattcgaatggcgggtaaatggtttcgaccgcatgggacaggcaggtgtccattccatcggcatgggtgtacttatcggactggaagaatggcgcacggatgtgaccatgatggcctaccatctgcgctaccttcagaaaaagtattggaaaacaaaatacagtgtcaacttcccacgcatgcgcccggcagagaacggcggcttccagccgaatgtcatcatgaacgaccgtgaactggcacaacttacttttgccatgcgcatcttcgaccacgatgtggatatctcctactctacccgcgaaccggcacacatccgcgacaacatggcaggacttggagtgaccaccatgagtgcggaaagcaaaaccgaaccgggaggatactacacttatccgcaagccctggagcaattccatgtaagcgatgagcgcacggccgtagaagtggaacgtgcactgaaatcattgggacgagaaccggtttggaaagactgggatgcttcttttgaccaatttgcatcaacacgatagcatacagatagtattacacttagtcatacagcctttcataataatcgtttcactttagtgatgatagtttatcactaaggacattcaattatatcaccgtagtgaagaaatttaatcacctgagtgaaacgataaaatcaaccgttagataatatggaaagatacaaccgtcaaatcattctccccgaactgggagaagaaggacagcaacgcatccaacgcgccaaagtccttatagtcggtgtaggcggactgggatctcccgtcgccctttacctgacaggcgccggagtaggcaccatcggactgatggacgatgacgtggtaagcatcagcaacctgcaacgccagatactctatagcgaagccgaagtaggtatgcccaaagccatccaagccaaaaaacgtctcgaagccctgaacagctccatacaaatcaatgcttaccccaatcgtctcaccacagaaaatgccgccggaatcatcagccaatacgacattgtggtagacggatgcgataactttgccacccgctacctcattaatgacacctgcgtgcagttgggaaaaatctatgtatatggtgccattcgtgctttcgacgggcaagtatccgtattcaattaccaaggcggaccggactatcgccactttttcccggacgaagacgaaatgctctccatgccccacccgcccaaaggtgtacttggagttactcccggcatagtgggatgcaccgaagcaaccgaagtactgaaaataataggcggatacggtgaagtgctaagcgggaaattatggattatcgacctcaaaacaatggaaacgcatatcctctcattataaaaacagaatcttttatgatgtgaagtattgctttatccattttttatattacctttgtaactataataaacccttaatcttcgtttgcctgtgaaggtcgacgaagatttttttattcatgactctcccccaaccgttaaataaatacagcaaactgttaggaatattacatattgattactatctttgcttagcaattaattggaaagtatgaagttaattctaatcacaacccctacatattttgtggaggaagacaaaataatcacggccttgtttgaagaaggactggacaccctccacttacgcaaacccgacacggcgcccatgttcgccgaacggctgcttaccttgattcccgaacagtatcataaacgcatcgtggtgcacggacatttctacctgaaagatgaatataagttgaaaggtatccacctgaacggccgcaatcccaacccacccgaaaactataaagggcatatcagttgttcatgccactctttggacgaagtaaaggagcgcaaacagacgtgtgactatgtttttctgagtcctgtattcaacagtatttccaagatgaactataactccgcatatacggccgaagaacttcgtgccgccgacaaagccggcattatagacaagaaggtgattgcactgggtggtatcgatgtggacaatattttagaagtaaaagacttcggctttggcggagcagccatcttaggtgctttgtggaataagttcgatacacgctgcgaccgtgactaccgattactgatagaacacttccgcaaactgaaaaagttggcagattaactaaaagcagagaaaaacaacacatattcctgcctgaaaaacaggcgtttcaaggaaacgcgaattaatttttaatgttcgatttttaaattctaattataatacgtacctttgtacgcaaattaataaataggtaatatctattacaaaatgagtaaaacatctccttttaaagtattctcgggaacaaactcgaaataccttgcagaaaaaatttgcaacagcctcggttgcgaactgggaaacatgaatattacacactttgctgatggtgaatttgctgtttccttcgaagagtcaattagaggtgcccatgtattcttagttcaatctacctttcctaattctgacaacctgatggaattgctgctgatgattgacgcagcaaaaagagcttctgccaagagcatcgtagccgttatcccttacttcggatgggctcgccaagacagaaaagacaaaccgcgtgtttctatcggtgccaaactggtggctgacttgctgagtgtggcaggtatcgaccgtttgattaccatggacttgcatgccgaccagattcagggtttcttcaacattccggtagaccacttgtatgcatcaggcatcttcttgccttacattcagtcactgaaccttgaaaaccttgtaatcgctactcccgatgtgggcggttccaagcgtgccagcacatatgccaaataccttgatgtgcctttggtattgtgcaacaagactcgcgaaagagcaaacgtagtggctaccatgcaaattatcggtgacgtaaaagacaagaatgtcatcctggtagacgatatggtagatacagccggtacaattaccaaagctgccgatatcatgaaggaagccggagccatttctgtccgcgccatcgcttctcactgtgtgatgtccggtcctgcttccgaacgtgttcaagattccggtttggaagaaatggtatttacagacagtattccttattctaaccgttgcgccaaagtaaaacagttgactatcgccgacatgtttgccgaaactatccgccgcgtaatgaataacgagtctatttcagaccaatatattatctaatttcagtagataaaagatagagagaaacagaggcttccttgaacaaggaagcctctactgttttttataaaatccgtaagtccggagtgtcaccggaagcgcaaaggattatcttctttttctgtgtctcctgcggcgacgttgcaatttctcgtgctgataacgctgtatccgcctataaaccgtataaaccagcatcactccgaccgatacaaatatcacaaccacaattcccaatccaagattatcccctttcacacgcgaccacatttccaataccgcttccgtacgttcgcccgaatcacggatcatggcacaacgctccaccacacgacggtcgggatattgcactttgtcaatccggacactatctgcctcgggaccaaagaaatagctcaagtcggcataatagttcaaagtagtatccagcttctcttccaatatttcgggagtggcaacagaactcacataaccgcaagcatccatattgcgcaaagcaacttcgggacggcacagataattgataaaataactggcagccttcacattgcgtgcatatttaggaatcacccaaccgtcataccacacattgctcccctcctcgggcacttcataatccaagttcactcccacagcaccggcttcttcaattgcccatacagcatcaccactccaagtcatgttgagccatgccttatttttggtcatcatctcctttccgaaatccgcttcccaaccggcaatcataggtttcatggccttcaagtacttctctaccgtatcgacagatgcctgtgaatagttgttcatcaactcttctaccgtcaccttcccctctttcaggtttttgctgttggcatagataagggccgttccgtaggcatcacggtagctctctttcatcaagattttattcttgtacttgagattccacaggcttgcccatgtcttggcatcttccgcaggaacatggtctgtgttatacagaagtccggccgtcccccacatatacccgatggcataatcggaagcacgacgccccggctgactcaatttatccaactgctcacgaatataaggagactcgttatgcaaataattaggagtcttaccaaaaacagtatcaataggcagcaacagattcttcttcaacattcgctcgatgatatattccgaaggacataccacatcaaaatcctcatgaccgcgttcaattttggtaagcatgatttcattgatatcgaatgtctgatatacaatacggatatcctcacccgtttgctctttataccattcgggaaattcggcaagcacatcttcatcgatataatctgcccaattatatatcttcagcacattttcgcgaggttcgcccgtattgtagcatcctgtgagcgaaagcaacccgcaggcacatgccattatccatttattcatctttatcttcattttcttatgcctcttttttcttgctcgaacggcggttgattataatgagcagcaccaataccagtataaatataatggttgaaaggggacgaagttcgggagtaagtcctcctttccgcgcatcggcataaatataggtagacaatgtctccaatccttcattgccgatggtaaacacggtcacggcaaaatcgtcgatagacagtgtgactgccagcatgaaaccggaaatcattcccggaagtatttcaggaataatcactttacgaagtgcctgcatgggagttgcccccaaatcgagtgccgcttcataaatattcggattcatttgtttgagacgtggcaatacactcagaatcacgtatggggtgcaaaatgtaatgtgagccagtaccacggtagtgtatccttgagggatacccagcgaaacaaacagcaggaacaacgagataccgatgataatatcgccattcagaatagggatattattaacaaaaccgattaccttgcgcgaacgggcacgcagattgaatatgccaatggcagtgatactccccaataaagtggaaaccgttgcagctatcaacgcgatggtcaacgtattaatcagcgcattggtcagcgagtgatgagtacccgtggtgaacagcgatgaataaagttttgtggagaatcccgtccaattgcccagcacctttgcttctgtaaaggagtaaatcataataatgaaaataggagcatagagcaacagcaataaaagccacaggtatccctgacataatattttctttaccataaaccacctccttcatcattgcccttgtcatccgaagcaaacaaggtagtggcgccaatcaggaacaacatgataagtgaaagcgccgcaccatagttccacatgctgttattgatgttttcctgaatggtagtaccaaacagttttatattgttcattgtcagcaactcggcaatggcgaatgtggagatagtgggcatgaataccataagaataccactcacgatgccgggcatggacaatggcaacacagccttaaagaacacttgtaccggattggcacccaagtcttgcgctgcctccacataacttttatccaacttctgcaatgtgttataaataggataaatcataaaaggcaggaaattatataccataccgaatatcaatgctccttctcccaagggcacatccataaagtcgaaaagcgccactgtcgccaacgtacgaatcagaatattgacccacatgggaaggataaagagcaccacgatggtttgtgcatatttcattcgggtctgcgtcagaatataagcggcaggatagcccaacagaatacacgctactgtcgtgataatagcaacaccaatggaataaacaaacgtattgattgcctcagggtgggcaaagaacttggtaaaattgccgaaagtaaaatgtccggcatcgtccataaatgcataaaccactatcagaagaagcggaagaataacaaatatcgctgaaaatatcacgtaaggaatcgtccaactcttacgcgaggacaagaagaatcgtatcgttctgagcacctcttttcttttttatattagtctacaacctttattatcttaatcttttcgggcaaaatactgatacctacatgatcaccattatcccatacatcattggtatctacataaatatcctctccccaatccgatgaaacggtgaggtggtaatgatcgcctttataaaggataaaacgcacatcgccggttaatgttccgtcttcttcattgtcatgcaggataatatccttaaatgccaccactacttttactttctcgcccggttcgatatcctttacaggcaaacactcgaagtgacaacccaggaagtcaacatgactttcgtctatcatctctccctcgaaagaattgcatacacgctccttcttcatgatatggatgtcaaacggtttgaccagcagacctacttcctgccccacgtcaaagtgatggtagtcttgcacgataaactcataaccgtttgccacaacaaccatctcataatgcactcccttgaagatagaagaagtgactgtacccgtaatctgtgcagcatccgaaagagggaaaatataccagtcttcagggcgaaccaccacatccacaggcatattctcaccaaaaccttcgtccacacattcaaactctacaccggcaaaacgcactaacttatcttttatcattatgccgttcaagatattactttctccgataaaatcagcgacaaatgagttgatgggttcattatagatatctacaggagtacctatctgctgaatacgcccctcactcattactacaattgtatcactcaacgtgagcgcttcttcctgatcgtgtgttacatatacaaatgtgattcccaatgttttatgcatctccttcagttccatctgcatatctttacgcatcttcaggtcgagagctgccagcggttcgtcaagaagcaatacttccggctcgttcacaatggcgcgggctatggccacacgctgctgctgaccacctgaaagcgagttgacatcacgatactcataatcagtcatccccaccatacggagggctgcctttactttcttttcaatgatttgtttcggtagtttctttagctttaacccgaacgctatattatcatatacattcagatgaggaaacaaagcatacttctgaaatacggtatttaccggtcgtttgtgcggcggagtttgtgtaatctcctgccctgctattcggatttctccttccgaagcagtctgaaaaccggcaataaggcgcaaaagtgtagtctttccacatcctgaaggacctagaatcgttacgaattctccttttttcacgtacaagttaatgttatccaatgctattttatcgccaaaaaacttggatacattcttgacttcaattatataattagactgttgcatactacttttggtaaccggacgaaaaacgcctctacattttcagtcggcaaagataaagaaataatcataattatcagctacattgaaacgggaatatgccgggaatacatatatacgctcataaaccggaagcgacaacaaaatcaaaagctgtgttttcgtgattccgattcgtttctcaccggcggacattcgggcaatataaaccagaaagtcgatccttctcccggcttagagttcacacctatcttacctcccattgccctgacaatgctgctgcatatcggaagtcccagaccggtaccttgtttaaagctatccaactggacaaaacgctcaaatatctgactttgattttcttccggaataccgcaaccggtatccttcacatagaaatagatttcttccttccgcttttcgtaccccataataatgctgccctgtgtggtaaacttaatggcattggtcatcaaattagacaccacttgaatcagccgctggcggtctgtacgtatcacgcagtcgcccacacttgccacacattttatcacaacatcaggattggcggcatttcgcatttgaaatatcttttccaaatcatacatcatggcattgatatttacattactccacacaaaatccaacgtatccgactctatcttcgagagatcaagaatatctcctatcaattgcaaaagctggttactgttctgctcaataatctgcttgaagttttcagaatcccctttattttccgaagagaccaacagattggcaaagcctacaatggcattcagaggagtgcgaatctcatggctcatatttgctaaaaaagcagacttcaacttatctgagctttcggctttttcttttgccttgcgcagtgcctcttctgttttcttctgctcattgatatcaacatttacccccaacagaacaatgtttccattatccggatcgaatgtctgctgaatgaggtattgcttaatccacctgggttcgccatttactatcaaatatatattcctttctaaagcttccaccctttcatgtttagctttctccacgtaatccataaatacctgctgctgtcgggatgcgtcctcatccgcgtatttcatatgagagaaaatggtgcgcaaatctatttcttcagatatccccaaattcctcagatattccggtgtcaccagctgttcgttcttcaataagttgatggacgagaagcctatcttggaagcggatgaagatgcaccaatcatctcgtgaaagttcttattctgacgcaatgtattatgaatcaaagtattttcaacccaaataatcagaatattctctacattacctgctgcatccctcagatagttgactataaaacgaaaataatgcacattcctatgccgactctttacatatgcctgattaattattttataatcatattttacttcccccgataccgggatgcctgacctcatcatttctttaaactcagggttaatacaaggattagtataaatattaagttggctgactgcatctttctttgactctaatcccatatactccacataggtatcattcacctctatcaacttaccttctttatcacagatagcacaacctacggtcacattatcgaaaaaacaaagaaatttttcattactatgcttcaatgaagacttcaaagctcgctcctcactgatatcatgaacggtaagtatcacataatcatgaccattgagcgacagatagcgacccgaaaccatcatgctgtaaagaccggcaagatgggaagatatctgaatatccattgtagtctcgaaattgctaaagctgccgcgactcttaaacgtctcgcttatcttactccttattatgcagtcacgacacttctcgtgcttattgcagttatctgcctcacgcgcatagcgacactgcaatatctccccgaaacatttccggtcttcccggggaggcatcttgcaaactgtgtaataattggtcttggtgacatgcgaagtcttgtctatcaagaatataaactcatgggcattattccagatggcagcgtagaactgcttagccaactttatttctttagccataactctttctctgatagtagcccatactaacaaaagaaacaggatagtaattaatgcaagactcggtattaacattttgcgaatggtatttaggtacaaagataaccatttgaaacaaacgcagtcacattatcctgcaaaaaaacacataatattctatatattattaatgagcagatgaaaataaaaacctttttttctcttctgtattaattaagtaactatctttgcgttcaaattataatatcatcacaatgaaaaaattagtttatttattggctgtaggaagcttagctttcactgcatgcaacaattcacccgcttacaaagtatcgggaacagtagaaggtcttgccgatggcgacactatttatttgcaggaatataagaatggcgactgggtaaaattggattctaccactgtagcaggaggtactttcacattcaccggaagacaggacacagcaacaaactgctttatcatctatgcaaaagacggaaaacgtaaccgtgccgatttcttcctcgaaaacggaaatatcactgttgcactgggcgaagaaaacaaaatcggcggtactgcaaacaatgatacttatcagcagttcaaagataacttcatcgctatgagcaaagaaatgaatgacatgtatcgtagcgcaatgtctgactctaccttgactgacgaacagcgtgaaaacgtaatgaaagaaatagaaaagaaagacagcattgccatggatatggtcttcaacactatcgaagctaacattacaaatgcagtaggtatacaattacttccttcttatgctgccgcattcgaattggacaaacaaaaatctttagttgaaaagattcctgctcagtttgccaataatgaccgtatcgttaaactgaagaagcatattgaaactgtagaaaagacagctgtaggtcagaaatacatcgatttctctatggatactcctgaaggacaaacagtgaagttatctgatttcataagcaagaacaaatatacattgattgatttctgggccagctggtgcggaccttgtcgcaaagaaatgccgaatgtagttgccgcttacaaagaattcaagaataagggcttcggtatcgtgggcgtttctctggataacaatctggataaatggaaagaagctatcactgctctcgatatcacatggccgcagatgtctgatttgcaaggctggaacaacgcaggtgcaaaactgtatggcgtaaattctattcctgccactgttttagttgatcaagaaggtaccatcgtagcacgcaacctgcgcggtgaagatattaaagcaaaattaagcgagctcttaaaataagagaaaagcaagataaacggaaaggggttgaattcaaaacgtggataatgctgtcgtttagctcgtaggggcaaggttcgctcgcccgaaaacagttgactttgtgtcttcgggcaggcaaatcctgcccctacagctgatgatgggatagaccatagttttgacacattccctttctatatcacaaggaagatagctttcacacaggattcccttgaataggacgtttcaacacctgttatgtgtgaaaggagaataataaaaaagagagccggttccaaatctgaccggctctcttattatattattatgaaatcgctttaaaacagaaaagtgatttcaatgaattatacgaaccaacgaacatagcagaaatcctggcggtgaggcagatctacgttcttcgggtacatacggtatgcaaccttaaagctaccggagttagaaagactgtgtttacactggaatgtgtacagattaccttctttcttgattacttccatcggctctacagaatagatatgttctttaccttcagcattggtgtaagtagtaaccagttcaatacctacggcatcatccagtcctttttcatccactacataagtaatagtatattctttaccggtttcgatgttaccacttgccaattcttcattcttttcgcaggaaacaatttcaatagaatcccacaattcggcaaccttttccttccatgcggcaatttcttttgctttagcatagtcgttagctaccaattctttgaaacgtttagcttctttggtatagaatttagaatagtaatcatccaactgacgcttcatagtataatgaggagctacctgagcaatagagttcttgatagtcttcacccaaccttcagaatagcccttgcggttacgtgcatagtacaacggcaggatttcattttccaaaatactatagatagtagcagcatccaactggtcttgatgctcctggttctgataagtacgtttttctgtcaacgcccatcctgcaccttcacggtagccttccaaccaccatccgtcgagtacagagaagttcacaacaccattcatcaaagctttctcgcctgatgttcctgatgcttccaaaggacgggtcggagtgttcatccaaatatcaacacctgacactaaacgacgagccaactgcatatcatagttttccaagaagatgattttgcccaagaactcaggacgacgagagatttctacaatcttcttaatcaatccctgaccggcaccatcgtgcggatgagctttaccggcaaataagaattgtaccggatagtcaggattgttcacaatcttagccaaacggtcaatatcagtaaacaacaggtgtgcacgcttgtaagtagcaaaacgacgggcaaaacctatcatcaacgcattcggattgatcttttccatcaaagaaacaatgcgtgaaggatcaccttgattcttcaaccagctttcgctgaactgtttacggatatgatctaccaatttgttcttcaaagcttgacgagttgcccagatttcttcgtcagccacattatagatagcttcccaaattttttcattagactggtcttccataaagttgggagcaaaatgtttggcatacagtttcttccattctgtcgcactccaagtggggaagtgaacaccattggttacataacctacatggctttcttcggggaaatagcctttccaaatacctgagaacatctcctgagatacttttccgtgcaaccagctcacaccgtttacttcctgacaagtgttgcaagcaaaagtagacatacaaaaacgttctccggcatctcccggattgatacgtcccatatccatcaaatcctgccagctgatgcccatacgttgcggataaccacccatgtacttaccaaacaaaccttcatcaaagtagtcatgaccggcaggcaccggagtatgaacagtataaagagaagaagaacgaactacttccaaagactgttcgaatgtcaaaccaccttctacataatcacacaaacgctgaacgttgcataatgcagcatgtccctcattacaatgataaatatctttcttgatacccagtttcttcagcatcaatacgccaccgatacccaataatatctcttgtttcaaacggttttcccagtcacctccataaagttggtaagtaataggacgatcgaactcgctgttcatttcattatctgtatccaacaggtacaaaggaacacgacctacattgactttccacacataagcatgaacgaaatagttcagataaggaacatcgataaccatcggttgtccgttttcatccaacacacgttcgataggtaagctaccgaagttctgagcttcgtatcctgctacctgctgtccgtccatcgaaagactttgagtaaaatatccatagcgatacaagaatccgacaccacacatatctacgttgctgtctgatgcttctttcaggtaatcacctgccaagatacccaaaccacccgaatagattttcagaacatgtgtcaaaccatactccatacagaaataagccacagaaggacgcttggcgtcgggctgtacatccatataagctctaaactttgcatatacatcgttcatgcgtttcaggatatttttatcctttgccagtttttccagtgtctcatagctcaatcgctccaaaagaactacaggattctgtccggcttctttccacaacgccgggtctaaatctctaaacaactcaattgcctcgtagttccatgcccaccagatgttgcgtgctaattcttctaactttttcaattcctcaggaatacgtgattttactgtaacgtctttccaggtaggagtatttgcattactaatcttgattttcatgtctctctaattatattaatattatattcaattttcacctaataaaagtctcttctgtgcattgcgcaatgccacatcataagcctcataataatatttaatgaaatgcttccacaaagccttttccgcaatatcggcagcacgtttacgtatcactttgatttcagtatcagacataccggaaaaaaccgatatattgtcctttataacgtctgccacttcagaatagttgtagtccgaacgatgaatcactttcacaccgtctttcagttcactatacgagcctttcagtgaattcacccaaagtccgaaacctgccaaatcagtagtaattgtcggcacatgaaaagcaacactttccaatggagtatatccccatggttcataatatgaaggataaacactcaagtcatgtcccaacactaaatcatagtattccatatttatgatgccgtcttttccatccaaataacagggaacgaagataactttcactttatcgctagccgaatttgccatacccagatacttcatcatatcaagtacctgatcgtgactcatgttatgcaaccaatgagtaataaacggacattccaacggagtggtataattttcattgcttttcaaacgttctaccaaatcctcacgaggatctcctacccatccaggaacattaataaacgccagtacttcttttttcagattcttgtcacgggtcaatcgattcaaagcttccaaatatacattgatacctttatttttaaactcataacgcccactggttcctaatatcaaagtatcatcgcccaaatttactcccaataacttattggcaagattcaacaaagtggcgcgcgcttttttacgtttagcagtaaaggtacggccttgaggaacaaaatcatcttcaaaaccattcatcaaaatcacatccgccggtttctccaacagttccttacattcattattagtgatttcactaacagtggtaaaacaatctacatgatgcgccgtttgtttctctatggagtgtttagcctccatattaagctcacgtgccatctgatcaccattgtaagcaaataaataatcgtaaagaggtttattgttaccggcaatcgaacggccgatagaagtagcatgagtagtaaatattgttgctatttcggggactgccttctgtagataaagtgctcccatacctgtcatccactcgtgagcctggtaaatgaccttatcgttctctgtcagattgaatcgatagaaactttcaacagtttttcctgctgcgtatgagaacatggatgcttcatcgtaatctccatatgcatgaagtgaatctacttggaaatcttcccacatttttccgtatatttcattcttctttgaaaagaacggataaaaatctattaatatgactatagggtttccggggatattccaacggccgacacgaactttcaagccatcgtttttcaaagcatgttcacgccacgctgcacacagattttcattctctataaacaaggggttctcttttcctacccacacatccgggcctataaaaaacactttatccttgtaaatatcttgcagtgtttttgcccttgttgacaacactgtataaatgccccccaccttattacacacttcccaactcgcttcgaagatataaccgggggttaatagttcttttgccatctatataccttatcttattttcgagtgcaaaggtacacaaattcaatgagataataaagtttttcccagactttattagatttttcagactcacttattaacttttaccatttcatatttaacatttatcacaaagaaagccggtataagcaacaatagtaagtagtttaataaatttagtctcttttaggacgaaaaaagggccatttcgtaaaaatacaaaaacagccctttttcattaataactaatctgattatgcgactaatgcagagcccatcaagaaagttgcagccaaagcaacgatagcatacaactctgggaatacagctaaaatcaaggtattaccaaatacattatgtccctgaccgatagcagcaataccgttggcacaaacctgtccctgacggatagctgagaaaagtgcaacaagacccaaagcaatgcctgagcccaatacagcggcagcttggatgcctgtaatagccggagtcagtacaccgaaaatactttggaacataaagtaaccggcaaaaccatacaaaccttgtgtaccgggaagtgctgtcaacaccaagaagttaccgaatgcactatcgttctttttcaatgcgccaatagatgcgttacctgcgatagtcacaccatacgcactaccgatacctgacaaaccaaccataattgcaatgcctacataggcaatcaataaattcatttccataattcttctattttttaatttttaaattcttaatttttaaatggcttatattctttaccgccaccctcgtagcccgaattcttgaagaactctacgaaagtaagacgcatcgggtgaaccatcgcacccaatatattcataaacatattgatagaatgacctatcaaaaagataagtaccatcactatcggaccggcaatagcattatccggactcattccggcagccaaactattaaatacactagccaaaatacctcccgaaagtcccaatgcaaacaaacgtacatacgaaagaatatcacctagcaaaccggttgccatattgtaggaatcccacaaacccaaaccaatgttaaggaatatattctttccgggactgttaaacaggaagataagcactccggcaatacccagtattaccaaatgagctgttccgcccatcggcatcacatcgcccaaaaggaacgccaatgccgtactgaccaatactataatccatccgacagtagaaagtgcatacttaaatccgaactgaatcgtctgattggcagctttcagcaccataccaaagataatctggacagctcccaaaatcaatgaaaggttgaacatccactgattgtcgaggaagaacaaatcacgcatcttgttaaagaacggaatgtcattaccatacaaattaaatccaaagaaagtacctgtcaacataccgcagaagaaagtagaagcacccaaaatctgcaccaaagttaaaatgggcttcatggaagcgctgatattcttcgccaacatacgataaacagttactcctaataccatgaacaaaccgtagcccgaatcacccaaacacagcccgaaaaagagcataaagaagggtgcgaagaacggtgtcaagtccagttcattatacttaggaagcatatacaacttcataatcggttcgaacagacggaagaatcctttattgttcaactgaataggtacattatcctccggtgtaggatcggcaatttcaaagtatacctcctgttggttcaggaaattagtaatctccgaaatctgcgtagccggtgcccatccctgcaacaacatcagtttattatccgcagcctgttctgtattcagcaccactttggagaactctatctgtgaatggacattggtct

SEQ ID NO: 6679 - DNA, 6161 bp, Unknown
  gut microbiota DNA sequence
tagtaatggtaataaaatagatgcgtgaacctatgcgattaatctccgtagcatggtaagcttccagccattcttcattaaagttcttctctgagcatatatagaaatccacttgatatccagcatcttgcaaccgataaactgatgcgggctcaaagtctccccatacctccagtgcagcacgttccttgtcacaagcctgtaactgatgctgcaactgggtcttttccagttgaagagcttccacttcttccaaagccttctctccacgagctgcatcacctttctgttctttcaattcaacattcagtgattgcaggaacttgatagttgaagcatagcggttggacagacggatgctttcttgaagttcggtattctctgctgttccctgcgctttttccgccacatggactacgcccaaatcacggatactttgcaggaactgttcatattccttatgatagataaggaaagtcaacttcttcatttttgtaatcatgcctctgcctcctttcttttctcttgaatggatttcagaatcttctgcgatgatttggacaagttctcctcgtcctccataaatcgtttaatttttcgcagagcatcctggtatccgggtatctgtaccttctcaaaaagattcactttctgagtggtctttttacgcgcatgttccagtaggttcagtttggcaagcataaattccctttcaatagcggtctgtgccagtcctttcagcaaatgtatcccgtcggaataccatttcggactgttgaacaggctgtagggacgaatgtcaaaatctacgttttccagcaacggaacccgtacaccggcaattttctttatgcccaaatgaacgtcactcactttaattaatgaagcatcaaactcattccaaagtgcgaacatggcttcgtatgcctgaatttgtttttcaagcctttcctccaactcggcagcttcggtcttgcatctctttacctccatgcgaagggcgctttccttattcttaataatgggaagcgtgcgcacacggaccttgagttgcttctcaagctgttgcagcgaggtcttgttatattgaaactttattgccatgtttcttcattaatttattgtttttgccagtgttcgtcaaccaattctttcttgatattgacttcttccggcttaaagtatttactgaacaatccccatgtaacatccagcatttcagtagtatctaagttcacatcaatagccagcaattgatttgcgtaatccttagcgaaagccaaagtacgctcgtcatagttggtcaggtcgaaaccgttttccatctttgtcttggcattggcagcatcagcatacagacggactgcggcattcatcacctgcggatggtccttacgagtcttcttaccactcaccaactgtttcaaacgagacaacgaacggaacgggtcaacgataactttaccgatatcgctgtcacgacgcaggaacaactgaccttcggtgatgtaacccgtattatcaggaacagcatgtgtaatatcgccgccactcagggtagtcaccgcaataatggtaatggaacctcctgccgggaactgcaccgccttttcgtatatctttgccaaatccgaataaagagaacccggcatggagtccttggacggaatttggtccatacgattggaaacaatagccaacgcatcggcgtaactggtcatatctgtcaataacactaatactttctgattgtgttccaccgcaaaatattcggcagccgtcagcgccatatccggaatcagcagacgttctaccggcgggttttccgtagtatttacgaaactgataatacggtcaagagcaccggcattagagaatacattcttaaaatacaggtaatcatcattggtcatacccataccgcccaagatgatcttgtcggtttcggcacgcaatgccacatttgccattacctgattgaatggctgatcaggatcggcaaaaaacggaatcttctgtcctgataccagcgtattattcaagtcgattccggcaatacctgttgcaatcagttccgacggttgtttacggcggacaggatttacagaagggccaccgataggcacttcttgtccctctatttccggtcccccgtcaatcgggtcaccaaaggcgttgaagaaacgtccggccaactgctcgcttactttcaacgtaggtgatttacctaaaaatacgacctctgcattagtgggaataccttctgtaccctcaaacacctgtaaggtcacttcatcgcccatgatttttaccacctgggctaacttcccatttaccatagccaattcgtcataacctactcctgacgctttcagcgaacaagtagccttggtaatctggctaatcttggtatatattttttgaaatgcttttgttgccatctatttatttacaatttacaatttacatttttctcttcttcccttttaccacctgcaaatacacgccaaacggtcaatgatacattgcacgtgataaatggtacattaaatcagacgcttctctcggcaaccaactcttgcaactgcttattgaaatcctcatactgctcagatttatatttagcatagttcatctgcttgcagaggttgatcatcttcttaaagtagtccattacttccaggaaagtatcaaacttaaattctgtatgacagatgtcgataaccatgttcaatatatcctcctgacgttccatcggagttacagaatcaatctcatcgaaggcatcctgttgtaagattacaaagtcaattaattccgatttccagaagataacgtgatattctacaggtacaccatcatcacccagaatattaatctgttcggcaatttccttaccacgcagcaaccgagtcttgatttcgttcaccttgccaatccattcgccgttaatacgtttggttatatattcctcaaattcaggatattccaaatatttagaataagaatcaatcggatttactgccggataacgttttctatcggcacgttcctgttccaaagcataaaaacaacgggctaccttcttggtattttcagttacaggttccttcaggttaccacctgccggagatacggtaccgataaaagtaatggaaccggtttcaccattattcagatgtacatatcctgcacgtccgtaaaagttggaaatgatggccgagatatccatcgggaatgcgtccggaccaggtaactcttccatacggttggacatttcgcgcaaggcctgcgcccaacgggaagtggagtctgccatcagcaacaccttcaatcccatggcacgatagtattctgcaatcgtcatggccgtgtacacggacgcttcacgagcagccaccggcatgtttgatgtattcgcgatgatgatagtacgttccatcaacttacgtcctgtatgcgggtctaccagttcagggaattcggtaaagatttctactacctcgttggcacgttcaccgcaagcagcgataataacaatatccgcttctgcctgcttggaaatagcatgttgaagtaccgtctttcctgtaccgaacggaccggggataaatcctgtccctccctctacaatggggtttaccgtatcaataacacgtacaccggtttccagtagtttgtaaggacggggtttttctttatagttagtcatagccttctttaccggccacttctgaatcatattcacaggaatatcttttccgtctttatccgtcagtacaactaccgtatcttcaatgccatattcgccttcctttacaatggatttaaccttataagtaccatccaactggaacggaaccataatcttcaacggctgaaaattttcatccacctgacctaaccaagccgaagatcctacttcatcgcctacttttaccaatggaatgaaatgccatttcctttccttgtcgagcggataagtatattgtcctcgttttaagaaaacaccatccattttgtcaaggtcattttgcagaccatcgtagtttttagacaacatgcccggtcccaaggtcacttcgagcatatgtcctgtaaattcggcttcggcacccaccttaagtccacgtgtactttcgaacacctgcacataaacattgctgcctactaccttaataacctcagccatcaatcggtctccgcctgtcagaatgtaacaaatctcattctgcgctaccggtccgtcaacggtgagagtaaccatgttggcaattacgccactaacagttccttttgttgccatatatctttaatctgtttattatctgaattctgcgggaatctgtacttcgtccttcagtttgtcaatgatctgacggaacagttcgcttcccttttccttatccatagaaatccagcggccaatcatttccagtttcaataagaacacgaaaatccgttccaccgtaaaatagttgaagaagacagcgtcttccatccagttccatttcaacaaatctatcttcttttccctttccaccagttcttcaatctcgctgatacgaagtatcggctcaaaatattccagcatttcggtcaatccgaagtcgcgggcattcgatgtacggatcatctcactcacatcagtgtttcccactaccacctgggacacgtccattttgtatttacgtgcagccagtgcagccagtatattattgatattcagattaaattcaaaccaagaggaaataaattgattaccgcagttcatagcatacgcataataatatgcagaaagcatatcttccgcacgataaaactcttcggcggacagagccagataagcagtaataaattcgtaaaggtaagatggatatttcttatccggcgcatcgccttcgcgtactgcgctgataagggtcagcaattcatcctgagaataatttccctcagaatccgtcacagcctccttatctttcagcagtttcagcagattagcattatcgaatttcaaatagaataagtcaatcagctttctatctttttccgataattcaggataaatttccgatttaaaattggccaccgtatagttcagcttgccatcttccaatgaaagatcgggcaaaccggctaccaggcaataataatttgtcatagccatgctttaaaacaacatttctactaattgaggacgaaggaagtctttgaaatagttttcaaattcctcttcaccgaagttcactttgtaagaaccatcagcgggcgaaattgtgaagagggctttagtaccattcacttgttctattcttacccctttgtccaacacagcttttgcattgactgcaaaatatttcttaagtccttcagcatctgcggtagaaataacgataggttcattagccgaccattgggccgctaatgaaacaataaatttattcagatattccttatctgccacaaagcctttcacggcatcactcactacctcgttagtcagtaaagtagtaatttcggttttcaatgcattcacagcttgtccggcaaacaatttaatttctgattgtgtattttcggcagtttccattgccgacttacgagctgcggcaacaatagaatcagcttctttacgagcatcctctactatttttgctgcttcctcgtgagcactactgataagtcgctgtgcttcttcgtttcctttttccacaccttcacgataaatcttatcggtaagctcctgaattttattttccatattcttagaagatatttttttgagtttaatactttcgtttttgaaataaattccaaaaggcttgcccaaaaatacaaaattcaatgatagaaaaagaatttaataatagaatttccactaaaagtactgcaaaaagagaaaaatatgccacattcatgttacataacataatctttctgctaaacagattaataaatgattactaaaaaaatatttccccatctcatttagagaaaagatttaccttgtttaatagggtcagcggattttttcagttgataatatcctatcttgcattatattgttttacctttactctgcataaaatttatgcgtaagcaatgaatccatcaggtttttacgttgaccctaaatctccactaaaatatgcagttgagca

SEQ ID NO: 6680 - DNA, 14229 bp, Unknown
  gut microbiota DNA sequence
ccgaaggacattattgttacaccgaacctgctttttttgagatattcaattttccgataatcaagggggacaagaccggacaactggtgcgtcctaatacggtagtattgactgaaagtgcggcaagccgttatttcgatggtgaagatccgatagggaaggtgttgactttcagtacgtcttcatcgcaacaaaattttgaagtaaccggtgtgatagcggatatgcctgttcgctctcatctgaaatacgattttttactttcatacagtacgattcctaaagaacggcaggacatttggtacattcatggagtttatacctatgttcgtttgatgcccgggaagcatccggcagagatagaagatgcttttctcaggatatctgataagtataaaaccgatgcattgaaacataagacttgggctgtggagttgataccgctgaaggatattcacctcactccgcaaaaagcctatgagaaagaagtaaaagggagccggactgcggtttttatactattggtgatgtccgttgctttgctactgataggttgggcaaatgctttgaatctgactgtggcgcgttttttggaacgcggacgtgagtttgggttgcgcaaggtttttggtgcttcgcattgtcagattatcatccaggggcttcttgaatctggttttatgaatttgttggctacactgatagcctttggctggctggaactccttttacctcttgtttatcgttgggtagggcaaaactttgggacggatatactgatattacccgctttttggggaattgtagtcggagttgttgttatcggaacgtttgtcgtagggctttacccctcgtggctgatggtttctatacgtccgtcggagattatgaggggaaaactgttgcatggcaaacgtggcaaccggataaggaaagtactgattgtaattcaatttttgatttcttttgttctgattgtcggcacgtttacagtagtccggcaggttcgttacatgcaaagtaaggctttcaccgattcccattcacgcatgttggttattaagtacccttcgtttaccgagggattggcactgcgtatggagagtttcaccaagcgcctgaagcagcgggcggacataagtcacgttactgtttcgggagctgttcccggggtagaggtggccaattatttcaccaaccgcccttacggaagcgacccttcgcaggtgaaactgatacagatgtttgctgtagattatgactatttgcctgcttatctgcccgatctgatttgtggacggtgcttttctgaagattttggtggcgatctcaatcggattgtgctcaacgaggaagctgtcaggttgttaggctatgagtcacctgaagctgcattgggacaacaggttaaaatggaggtggtggctgatccgcttgagattattggggtggtgaggaactatcaccaacagtcgctttccgtggcatataagcccattatcttttttatgaaagaacgagtaccgtttattgaaactccttatatttcaatccgcctgacaggtgagggagaagatagtgttttagcagagattaggcaactgtatcatgaatactttccgacttctttattctcttatttctttttaaatgatttgaatactttcctatataaatcagaccgtaatttcggttggatatttgccggtgctgctttgcttgctgtgtttgtggcatgtcttggattgtggattgtaacgctgttttcaaccttgtcgcgcttgaaagaagtgggtatccgtaaagtacttggcgcaaataaaagcagcctgttctttgtcttaactaaggagctgatgctactcactgtattggcatctattattggcattcctgtatcggcagtgttgatggaaggctggttggaaacatatgcttttcatatttcgttgtcttggtggatatatgcagttactttcgtattgttgctgatgattgcatttcttactgtcttccaacaagtatggcgtataattcgcctgaagccgatgcgtattttgaaatatgaataacaaataaatattgaactgattatgattaaaactgaaaaactgacaaaactcttcacaaccgaagaagtgcagacaaaggcattgaatgaagttaccttgcaggtggaacaaggggaatttgttgctataatggggccttcgggatgcggtaagtcaaccctgctgaatattttgggtacactcgattctcctacttccggatcttactcttttgaggggaagcaggtggacaaaatgaacgagaaccagcttactgcccttcggaaaggcaacctcggttttattttccagagttttaacttgattgatgaactgactgtgtatgaaaacgtggagttgcctcttatttatatgggtatcaaagccggaaaacgtaaagcaagggtcaacaaggtactcgaaaaagtgaatttgttgcatcgtgtcaaccactatccccagcaactgtccggtgggcagcagcaacgtgtggctattgcccgtgccgtagtgacggattgtaaattgcttcttgccgatgaacctactggcaacctggactcagtgaatggaatagaagtaatggagttattgagtgatttgaaccgccaaggaactactgtcattatcgttacccactcccaacgggatgcaatgtatgcacatcgtgtcatccaattgctggatgggcaaattgtagcagagaatattaatcgtccgatggaaaaaataacaccggttaaaaatgaaaccctatgataggaaattattggaatagtgcctggcggaatctgatgaaacggaaaaagttcagtttcattaatatattcgggctggctgtcggtatggcatcggcattgctgattcttacttatgtggcctttgaattcagttttgataaaatgcatgcgaagcatgaccgtatctaccgtgtacaaagtacattttacgagggagaggtgctgaccgattattgggcaagcagctctttcggatatggttcggcaatgcaggagaatcttgccggaatcgaagactatacccggattgcatctttgttccagccggaacaactggtgaaatatggagaactgtgcctgcgtgaaaacgaaatagcctatgccgatcccggctttttccgtttgtttgacttcgaactgttgaaaggtgaccgtgcttcttgtctttctatgcccgggcaagtagtgataaccgaacgcattgcccgtaagtatttccgtgatgaagagcctatggggaagatacttgtttttaacagcaacataggaaaggtttcctgtgaggtgaccggagtgatgaaggaaatgccatccaattcacatatacattataatttccttttgtcgtataagtcattgcctaaatgggtacaagagtattggtataaacacgaaacatatacctacgttttactggattcgcaggaacggaaagaagagattgaacgcgcttttcccgggatggcggaaaagtataaaacggaagaggctttgaagaataagacatggggtgtccgtttagttccattggaggatattcatctcacaccgcagttgggttatgaggccgaacagaaagggaaccgttcggctatcatcgcattggtgttcgctgctgtggctatactggttattgcttggattaattatatcaacttgactgttgcccgttcgatggaacgtgccaaggaagtgggggtacgacgggtagtgggggcttttccgcaacaattggtcggtcaattcttgttcgaggcgttggtgatgaaccttattgcctttgtgatagctgtggggctggtcgaaatgctgcttccggcttttaatttgttggtagggcggacagtgagtttctctgtctggcttacaggatattggggtttgtccgtatttttgttgtttgtgtgcggtgtttatgtttcgggttactatccggcacgtgcattgctccgcaaaaagcctattatgttattaaaaggtaagttccaaaatggacgttcgggagaacgtacccgtaaattgttggtggttgtgcagtatacggcatctatgattttgctatgcggcacattgattgtatttgcacaacttaactatatgcgccgtcagtcgttaggagtaaggaccgaccggattctggttgtgaagtttcccggtccgacagaaggaatgaagataaagatggaagcaatgcgtaaagcgataagaaagcttccgttggtgtcgaaagtcacttgttcgggttcggttccgggagaggaggttgccatgttcctgtccaatcggcgaacgcatgatgccttgaaacagaatcggttgtacgagatgcttagttgtgatcctgattatatggatgcttacgggttggaacttgtagccggacgtggcttttcggaagattatggggatgatgtaaataaattagttatcaatgaaacggcagcacggacattgggttatacagattatgagagtgtcataggtgaagaaatatctgttgagacaatagaggagccaatgcaggtgattggggtagtgaaagattatcaccaacaggcattgaatagaaattatacacctattatgctgttccataaagataagatagattggattccgcaacgttatatctctattgtaatgaagccgggtgattcgttggagcttgtatcgcagatatcggaaatatggacaacttattttgctgattccagtttcgattatttttttctcgaccagttctatgatcgtcagtatcgtcaggatgaagctttcggagtattgatgggaggatttacagggctggccatctttatttcttgtttggggttatggattttggttatgttctcttgtgctgtgcgcacaaaggagatgggcattcgcaaagtattaggtgcttcacggttgaatttgttctatcagttaggtaaggacttttttattcctatcctgattgcaattgtgatagcattgcccgtggcgtggttcagcatgaatgcatggttaagccattatgcattccgtacagaactgaaagcttggtttttcttgcttccggtggtgttgatagtgctgatttcgtttttaactgtggcggggcagaccattacagtgatctacagtaagccggcgcgctcgttgcgatatgaataacagatacaggagtcttttatcttaataaatctatattgaaaatggactaaatgtgcagattcgggtcagtccgttatttaatgtttgtggaatggtggaagcaagcatcaagataaaacaaaaagctattattggttgtttgatagtattctattctttgatttaatcgaaaatagagctgaaaagtaacagatttatattacctttgccgcctaaaattaaagaaaatgaaatcggatattgaaatagcacgcagcattgagctgacaaagattaaacagatagcccgcgaaaccggaattcctgttgaacacattagtaattatggccgatatatagccaaagtagatgaaaaccaaattgatgaagaaaaggtacgaaagaataatttgattctggtaactgccatcactccgactaaagccggtatcgggaaaacaacagtttctatcggattggcattgggattgaacaggattggaaagaaggccatcgttgctttgcgcgaaccttcattggggccttgtttcggtatgaaaggcggagcagccggaggaggatatgcccaagtcttgccaatggataagatcaaccttcattttacgggagactttcatgcgattacctctgctcacaacatgatttcggccttgcttgataattatctttatcaaaaccgggacaatggattcggtttgaaggaagtgttgtggaaaagagtattggacgtaaacgaccgttctttgcgttatgtcgttaccggattgggaccgaaaacaaatggtatcacacaggagtcaggatttgatattactccggcctcagagataatggcgattctttgtcttgccaatgatgaagatgatcttcgccgtcgtattgaaaatattctgcttggctttacatacgataacaaaccttttacggtgaaagacttaggggtggcgggagcaatcacggtgcttttgaaggatgctctttcacctaatttggtgcagacaaccgaacatacggctgcttttgtacacggaggtccatttgccaatatagctcatggatgcaattccatccttgcaaccaagatggcaatgactttcggtgattatgctattacggaagccggctttggagctgatctcggtgcagagaagttctatgacattaaatgccgcaaagccggaattaccccgaaattgactgtactcgttgttacggcgcgcgccttaaagatgcatggcggtgttcctcaagacaagataaaggaacctaatttggaagctctgcaaaaaggtattgccaatatggacaagcatttgcgtaatttggagtctttcggacagacggtacttgttgccttcaaccgttatggtgacgatactcaggaagaaatagattttcttcgtacccattgtgcagagaaaggtgttgcttttgctgtcaataatgctttcactcaaggaggagagggtgcagtggaactggcggaacttgttgtaaagactatcgaagaacagccttccgaatcattacactttgcttatgataatgaagacagtgtagaaacgaagatttcaaaggtggcgtctcatctttatggtgcggatattattacttacagtgccgctgcgcgcaagaagttgaagcatattgaagaattgggatatgctcatttccctatttgcattgcgaaaacacagtattcattctctacagatcctaaactttatggtgcagtggagggctttgaattccatgtgcaggatattgtgatgaatgccggagcagagatgttggttgttatagccggagaaatcatgcgtatgccggggttgccgaaagagccgcaagcacttcatattgatattataaacggagaaatagagggtttgtcataatcccttttctgtgttttggcttttatttggttatcaatttaatcttctcttagcacagattgatacaaaacgcttctatgcttttgtgcaatctgtgctattcattaaataatttcatccacagttcttatgcaggaaaaattatactacttttctttttcgtcccgatattgctggggagatactccaagatgagctttcacatatttaccgaagaaagactgattggggaaattaaactcctctgctatttccttgatggacttatctgaatttctcagttgatatttaatgtgctccatggtatattcgttaatcaatgtcgacggatttttaccgcaagcatctttgatgactttagaaagatacttgggagtgtagaacagggcatcggcataatagctcaccgagcggtgcattccattgtctttcgataacttttcaatgaaacggcgaaatatgtattcatgctgtttcgtttcgtttttattctctgtttcatctttaggaacttctttggtgacaattgcgataatttcacataagatggacgagaatatatatttcatggactctctgtgatagggatgaggttcactgttaatcttagtcattatcaaatcttcatagtatcgaaagattatatacttatttccctctacatgcttgattggattattgcgcagataagtggctgtgttccattcatttttccccatcttgaagacgcgttgcagaaattgagtggagaaaccgatgatgcttattttgtgttgaggactcagcatggtatggctgatgatgacggacggtagcccgaagatgaggtcgtctttttgcaactgataggttttatcattcatatccaactgaatgctgccttccaaacaggaaatcagaagaaagcaattcagcctcaccgttccgttgctgtaagggacattctctaaactgtttatcaccataaagtcatcgtctacatagtttacaaagttctcgtttgttttaaagtcctctatactgacattttttattattcctttttccatactattccttttttagttgctacaaagttggtgaataataggataatcaatgtgtcccataatgcgtaaatgctgtccgatatttccctgttatgcagtgatttattattaaaaaagatgaatggagaaaatagaacataatcagaggaatataggtcactcggtctttccggctttggtctacttttgttgtcagttttttaataaagacaatcaatatgataacagtaaacaaaaaatggatgcgactgatgggagtaatcggttgcacattgtggatgtcctcctgtaaacaagcaccggaggcgcaaactagtgctaactatgcaataatgaaagtaactactgccgataaggaattgtctacttcctattcggcaacgattcgcgggcggcaggatattgatatttatccgcaagtatcgggcactatcgaacgactctgtgtttctgaaggtgaaaaggtacgcaaagggcagttgcttttcattatagatcaagtgccttataaagcggcgctgacaacagcccttgccaatgtggaagcggctaaggcaggacttgctactgcagaattggcctataccagcacaaaggaactgtatgtccaaaaggtggtttcgcagtataacctgaaaacggccgaaaacaattatctcactgccaaggcacaactctcgcaggcacaggcacaagaagtgagtgcccgaaacaacttgtcgtatactgaggtaaagagtccgagtgacggagtggtgggcgcattgcctttccgtgttggtgcattggtgagtcccggcatacaacagccgttgacaacggtttccgataattcagatatgtatgtttatttctcgatgaccgagaaccagcttctttccctgacccgtcagtacggtagcatggacgaagcgctaaaaaatatgcctgaagtggaactccgtctcaatgataattcaatatatgatgagcatggaattattgaatctatcagcggagtgattgaccgtcagacaggtacggtagtggcgcgtgccgtttttccgaatgagtcaagattgttgcatagtggcgcatcgggcaatgtggtcattcccagtgtctataaagattgtattgttattccacaaggcgcaacagtgcagatgcaggataaaacaattgcttataaagtggtggatggcaaggctgtctctacattaatatctgtagccggtatcaatgacggacgcgagtatgtcgtgctcgatggattgaaggcgggtgatgagattatttccgaaggtgcgggtttgatacgcgaaggaacggtggttaaataagaaggagaataagaatcatgaaaggaaatatatttataaaaaggccggtaatggccatatccatttctattctgatagtggtgattggattgatttcccttttctcattgcccgtagagcaatatcccgatatcgctcctcccactgtgcaggtatctgctacctatacaggtgccgatgccgaagctgtgatgaatagtgtaatcatgccattggaagaaagcatcaatggtgtggaggatatgatgtatatcacttctactgctacaaatgcaggtacggctaccatcgaggtgtatttcaaacaggggacagaccccgatatggcggccgtcaatgtacagaaccgagtgtccaaagcgcaggggttgctgcctgccgaagtgacgaaaatcggtgtgacgacgcagaaacgccagaccagtttcttgcagatcaatgcattggcaagcaccgacggacgttatgacaagatattcctgggaaattatatggatatcaatgtgattcctcaaatcaagcgtgtggaaggagtaggagatgtgatgatgctgggagatacgtacagtatgcgcatttggttgcatccggaacgtatggcacaatatggtcttgtgccttcggatgtaacagccgtattgggcgaacaaaatatagaggcacctaccggttcgttgggtgagaattcaaagaatgtgtttcagttcaccatgaagtatcgcggacgactgaaaagcgtggatgaattccggaataccgtagttcgtgcacaagccgacggttctgtgctccgtctgaaagatgtggcggatgtggaattgggcacacagacctacagtttcagcagtgagatggatggcaagccggctgtaatgtttatcgtattccagacggccggatcaaatgctaccgccgtgaacgaatcgatttcaaagaagatgaaggaaatggaaaaagatttgcctcagggtactgagtttgtcaacatgatgagttccaatgacttcctttttgcttctatacataatgtggtggaaacactggtaatcgccattattttggtggttttggttgtgtatttctttcttcaggatttcaagagtacacttattccatccatttccattattgtatcgttgattggaacctttgcttgcctgatggctgcggacttcagtatcaatatcctgacgcttttcgcattggtgcttgctatcggtacggtggtggacgacgccattgtggtggtggaagctgtccagtccaagttcgatgtcggatataagtcttcttatttggcaacaaaggatgccatgggagatgtgacgatggctattatttcatgtacctgtgtctttatggcagtatttattcctgttacatttacaggaggaacttccgggattttctatacccagtttggtatcacgatggcaacctctgtgggtatctccatgatttcggctctgactttgtgtccggcgctttgtgccattatgatgcgtccgtcggacggaactaaaagtgcaaagagtatcaacggacgagtgcgtgctgcctataatgcttcgtttaatgccgtattgggaaaatataagaaaggagttcttttctttatccgccatcggtggatggtatgggcttcactggctatcacgacagtactgctggtttatttcatgggtactaccaaaacaggcttggtgcctcaggaagatcagggcgttatcatggtaaacattgctacttcgccgggcagtaccctcgaagaaacgaataaagtaatgaataaattggaagatatcttgaaaaaaacacctgaaatagagcactattcacgtgtggcaggatatggattcctttccggtcagggaacttcatacggtctgattgtgattcgtctgagagactggagcgaacgaaagggtaacgaacatacatcagatgcggtggtggcacggcttaatgcgcagttctatcaaattaaggatgcgcagatattcagcttccagcccggtatgattcccggatatggtatgggtaactccatcgaactgaatcttcaagaccgaacaggcggtgatatgactaccttctataactcggtgatgcagttcctcggtgcactcaaccagcaccccgaagtagcgatggcttatacgtcatatgccatgaacttcccgcagatatcggtggatgtggatgcagccaaatgcaaacgtgccggtatttctccctcgacggtacttgatgcattgggcagttattgtggtggcgcgtatatctctaattataatcagtttggaaaggtatatcgtgttatgatgcaggcttcgcccgaatatcgtctggatgagcatgccttaaataatatgtttgtacgcaacggctcggagatggcacctgtcagtcagtttgttactctgaagaaagtgttaggacctgaagtagccaatcgctttaacctctatagttctatcactgccaacgtgaatccggccgaaggctattcttccggtgaagtgcagaaagtgattgaagaggtggcggcgcagactctgccgacaggttatggttatgaatatggcggtatggcgcgtgaggaatcaaataacggtggcggaaagacactgttcgtttatgctgtgtgcgtattgcttatttatctgattctgtcctgtctctatgaaagctttcttgttccatttgccgtcattctgtccgtgcctttcggactgatgggaagttttctgtttgcgaaactctttggattggagaataacatctatttgcaaaccggtgtgattatgttgattggattattggcaaagacggccatcctgattacagaatacgctatcgaacgccgccgcaaaggtatgggtatcgtagaatctgcttattctgctgcgcaggttcgtttacgccctattctgatgacagtcttgactatgattttcggtatgcttccgttgatgttttctaccggtgcaggtgctaatggaaacagttcattgggcaccggtgttgtgggtggtatggctgttggaacactggcattgctttttgttgttcctgttttctatatcatcttcgagttcttgcaagagaagattcgcaagccgatggaagaggaacccgatgcgcaagttttgttggaaaaggaaagaagtcatgcggaacagagtacttttggcaatgaaaaaaagaaataatgtaagaagaatatgaagaaaatactattactgactaccgttactgctttgttgagcagttgcggtatatacaccaaatatcagcccgaaacgacagcccccgataatctttatggtgaaggaacggcagtagtcgacaccgctaatctgggcaatgtggattggcgtgaattattcaccgatccgcgattgcaggaacttattgagcaaggattacaaagcaacaccgattacctgtctgcacagcttcgtgtagaagaggcgaaagccacgttgctttctgctaaattagcttttcttccttcattttctcttgctccacaaggtacagtgagcagctttgacaagcaaaaggctgtgcaggcttattctttgcccgttaccgccagttgggaactggatattttcggtcgtatgcgtaatgccaagcgtcaggcaaaggctttgtatgctcagagccaggactatcaacaagcggttcgtactcaattgatagcaggaatagccaatacttattataccttgttgatgttggatgagcaactctcgctgactcaacaaaccgaacaggcatggcaagaaactgttgtctctgcacgtgccttgatggaagcgggacaatacaatgaagcgggagtttcacagatggaagcaacttattatagtgttcaaacttctatcctcgacttgaaggaacaaattaatcaggtagaaaacagtcttgcgttactccttgccgaaacgcctcgtcattatgagcgcggaacattgtctgcacagcattttacgcaagacctttcggtaggtatccccatgcagatgcttgccaatcgtcccgatgtccgttcggcagaacgttcactggaagcagctttttacggaacaaatcaggcacgttctgcgttttatccttccattgtgttgagtggaagtgccggatggactaattctgcaggaagcatgattgttaatcccggcaagttcctggcttcggctgtcggttcacttactcaaccattgtttaacagaggtcaggttattgctcaataccgcatatcaaaagcacaacaggaagaagctcgtctctttttcgaacaggctcttctgaatgccggcagtgaggtaaatgatgctttgactgcttgtcagacaagtcgcgagaaaacggtattatttgacaaacagatagtatctctgcaaaaggcattgaaaagtacttccttgctgatggagcatgggacgacaaactatctcgaagtcttgactgcccgacagactttgctgagtgcgcagctttcgcaaacagctaaccgtttcaccgagatacaaagtgtgattagtctttatcaggcgttgggaggaggaagagaataggaaaaatctactgttatcttcatagcgatgaaggctgaaagggctgttcggaaagtgattttagaacagcccgctttaaacaccaaggtcttttcaaaaaagactttggtgttttaaaaaaagactttagtgttttggatgaaagac

SEQ ID NO: 6681 - DNA, 39336 bp, Unknown
  gut microbiota DNA sequence
acctatgccggaatctatactgaccaatccattatggagtggaaaagcatatcgagtagcagctccctcaggcaacggagcaatgacattaatctgttacaacctgaatgtttccccccgacatcagcaagtccaggccactataaaaaaagaagattattctcttcggaacagttttgagaaaatgtctgccacccccgaagaacgcgtgctgctttataattgggaatcacaaaaggcagaagaactatcagacagcagtacattcgaacttatcggatttacagacaaactgtttcatctctgccccatacggaaaggatgggcagtcattggcatacaggaaaaatatctgtccccggccaccgtccaaactatctctttaacagagaaccgcttggtgctgaacgtactatgtacgggtacactaaaagtatggatagaaaaagccggcaagcaagaactgagaagtatttccataaatacccccaaaaaaattgtaattgaaaaataacttataaaaccagccgatatgaataaaaaactacttgtatctttcgttctcgcttccttaacaggaatctcgacgcaagcaaaagaaaaaatgtcttcagaaacaacccaacaacgtcccaatatcatcttatttatggtggacgatatgggatggcaagacacttcattacctttctggacacagaaaacacattataatgaagcctacgaaactcccaatatggaacgtttggcccaaaaaggcatgatgtttacacaggcttatgcctgcaacatcagttcggcaacccgatgcagcctgatcacaggtgtcaacaacgcacgccacagggtaaccaattggacacttgaaagagataaaaccaccgaccgccaaagtgaaacggttcaattgccggattggaattataatggggtcagtcaggtagaaggcactccgaatacctttgtcggaacctcttttgtcgatttattaagacaaagcggttaccacaccatccactgtggtaaagctcatttcggctccatcgataccccgggcgaaaaccctaaccattggggattcgaagtcaacattgccggacatgccgccggaggactcgccacttatctgagtgaaaagaactatggtcacaaacgagacggccaaccttactcacttatggctattcccggactggaaaactactggggaacaggcgtatttgcaacagaagccttaacccgtgaagcaatcaaggcactggataaagcgaaaaaatataatcagccgttctacctgtatatgtcacattatgccattcatatacccatagacaaggacatgcgtttctatcccaaatatcttaagaaaggattaaccgagaaagaagccgcctatgcctcgctcattgaaggaatggataaaagcttgggagacttgatggattggctggataagaatgatgaggcagacaatacaattattatctttatgagcgacaacggcggactggcttctgaaccggcatggcgtgacggtgaactccatacccaaaactatccgttaaacagcgggaaaggctctttatacgaagggggtatccgggagccgatgattgtcaaatggcccggtgtagtcagtcccggcacccgctgtgacaaatatctgatgattgaagatttctatcctaccatcctcgaaatggcaggagtccaaaattatagaactgtacaaccgcttgacggaaccagtttcatgccgctgctaaaaggaaccggagacccttccaaaggacgtgcaatcgtatggaatttcccgaatatatggggaaataacggtcccggcatcaacctgaactgctccatccgaaaagatgaatggaaattggtctattattatgagaccggaaaaaaggaactgtttaatatccccgaagatatcggagaaaaacatgatgtagccgcacaacaccctgatattgttaaacgcttatccaaggaattgggtacctacttacgcaatgtaggagggcaacgccccggctttaaagccacaaacaaaccctgtccatggccggacgaagtgtaaagaattgattaaaaactctataagagtcggaattatttcatttcaaaagaaaacaggaagggaaataattccgactttttgcgtatattcaaataagcaattatttcacttccttaaaagccatctcctcggcttcactgataatttgttcgttgagttcagaaataccgatttcttcggacacagcactgattacagtctctacagcttcttcccggggaagcataacctcctcctgcggtgcctcgcgtaccgatttagccgccaggacactttccatgaaaacactgtcctttatcttgcccatagcctcatgagccgccctttgttgggattccttctttgaatagccgattcctcttccggccggaataccctcaatcagcacttcactctcaaatgtcggactgaaacattgatcatgtgactgagtaatcagttcaaatgtaagctcaacacggtttttttgactccactcaatcaatttagatttgaaattaacctcttttcgtgaaatcttttccaaattaatataaggaccgataatacgatgctccataaaatgcttacaagcacgataccccctgtccaaataaatagctccgaccaatgcttcaaacgcattgccacacatatagctgttgtgagacgactgacgtgcagaatatttaatcaacttatccaaaccgatttctatagccaatcggttcaaagtctcgcgttgaacaattttagaacgagtgttggtgagaaaaccttcacgttttccctcaaacttcttataaacaatatctgctaccactgcatctaaaatggcatctcctaaaaactccagacgttcattattaagcaaacgcccctgctcagactttatagacgaagatttgtgaagtaaagcctgttcatagatgctgatattcctgggataaaaacccaacatcttataaaaacgaaaataagactccttatccttacgaaaaagaagtcttatcctatctgttatattgctaaacacgattattcagcgtattttttcacgattacacatgcattgtgaccaccaaaaccgaaagtattgctcaacgcagcatttacggtacgtttttgagctttattaaacgtaaagttcaactcataatcgatgttttcatcgttatcaccttctgcgtggttaatcgtcggcggaacaatgtcattctttacagccaatacgcttgcaatagcttctactgctccggcagcacccagcaggtgacctgtcattgacttagtagagctgatattcagcttataagcatgttctccaaatacgtctttgatagcttttgcttccgaaacgtcgcctacaggagtagaagttccgtgaacattgatataatcaatgtcttcgggcttcatttctgcatcttccaaagcattaagcatcactaattttgctcccaatccttcgggatgagaagctgtaagatggtgagcatcagcagaagcacctacaccggcaagttctgcataaatcttagctccacgtgctttggcgtgttccagttcttccaaaattaaacatcctgcaccttcacccatgataaaaccatcacggcttgcgctaaatggacgagaggcatgctgaggatcgtcattgcgggtagaaagagcatgcatagcattaaaaccacctacaccggccgggaagatggcagcttcggcaccaccggctacaatcacatttgctttacccaaacggatatagttaaatgcgtcagcgatagcatttgatgaagatgcacatgcagaggtcgttgtaaagttaggtccatgaaaaccatacatgatagaaatctgtccggatgcgatatcagcaatcattttcggaatgaagaacgggctgaatttcggtccgatagtatcttttgtctgagcatagcccaacacttcttcttcaaaagtatgaataccaccgatacctacaccatatattactccgattttattcagatcttctttttcgaggtccatttccgagtctgcaattgcttctttagcggcaacaatggcatattgtgtatacaaatccatcttgcgcacctctttgcggtcgataaaatcggctccgttgaacccttttacctcacaagcaaactgtgttttgaatttagacgcatcgaaatgagtaataggtcctgctccgctgacaccgttcacaaggttttcccatgtttcggcaacagtgttacccaccggagtaagcgcaccaagacctgttactacaactctttttaattccatattataaaataaggataattacttagcgttagcttcaatataagaaacagcgtcaccaacagtagcaatcttttcagcctgatcatcaggaatagaaataccgaattctttttcgaattccatgatcaattctacagtatccaatgagtctgcacccagatcattagtgaagctagcttctgtagtaacttctgatgcttctacacccaatttatcaacgatgatgttttttactctttctgcaatttcagacataactttcaaattttagttaattaatcgaataattttattttctttgcggttgcaaaggaataaatatttcttgggctgcgcaaatattcaggcaaataaatgcaaatttttgcacatttttttgttttatgtgcaccaaaaccagtaaagttatgaagagaatcgcaattttagcatcaggggaaggaacaaatgccgagaatattatccggtatttttcagagagaaaaacggcaaaagtagtggttgtcataaccaataaagcacaagccggcgtattgaatcgagctgataaactgggaattcctaccgaatttattccggctcaggattttacagagggtagagctttggaagtactgcaccgctatcaaacagattttatcgccttggcaggtttcctgctaagagtacccgatgatattttgcatgattatccgaataaaatagtaaatattcatcccgctcttcttcctaagttcggcggcaaagggatgtatggcaaccgtgtgcatgaggctgtcattgccgcagcggaaaaagaaagcggaatcaccattcatttcatcaatggacattacgacgaaggggataccatatttcaagctacatgtcccgtcatgcccgatgacacaccggaaactttagctgcacgagtgcatgcgttggagtatgagcacttcccgcaagtgattgaaaaaatactcatgtaatccgtgcctatgccaatcaatggggatgtgtcaaaacattgctaatgttatcattttgctagtaggggcgaggttcgctcgcccgaaaacagcttgctttgtgtattactcccaaggtcgtgcccgttggttcgggcaggcaaaccctgcccctacagttgacgataggtcgttttagttttgacacactcccatgacaggttattttttatctttcagcttctttccaaaacagtgaatggaagtgttctgaataggacgaataatcaaatcaggtgaagtaccttcgggataaaccagcatctcctcgcctttctgtaaatcaacttgataagtatgctcatccaactgctttacttccagatggcgcttgcctttaaagaaaggccgtgcgatatccgttacaaggatacaaggttctccggccaaactcttcacctgtataaattccgttttcccggctttccaattggcagagaccttgaaagctccttctgtccgcaacccgtcaaaagccacatcctgccatgcatccggtacggcagggaaaacccttatcttgcctccccaactctgcaacaacatatcgtgtatagactgcgcacccgacaatggtgtttcaataaccggtccagattctctatataatgtattcacactcaaaaaacgtccaaacagcttattcaaataagccaatgcatcattcccttttcccagtgcagatgagatggaagaagctccggtcaatgaataaccctgatgagctccggtcttcgattgccagaaatgaagagatctctcaataagatccacatcttcagggtgttctttgtttaatgtatacaatggataagccgccaggagatgcgaataatgccggtgtgaaaacgcataaggcgtattccgcccgataaacagcccgttttcgtccatcggatagggggtcagctcctccaatacggttttccatttaggaagtaacggatcgtctatcttcaatctctctgccgattgtatcaaagtcagacatccccagcgaagcagggaaaggtcgaaattacaatcctctgcacttccatattcaggagaataagtagcaggaagatgcagcttcccgtcctcttccttctgcaagaaatgcaggtaataatttactgcccccttcaatagcggaaacaacttatcgcgcagaagtgcatcatccatcttatgacgataaatcaaccaaagattgtgacaagcccaagtgagcagccccacttcggccgttttactcactccgggaataccgaccggctctgtagcgcaatagaagttgctggtacgtcccagtcccaaagcgtcatgccgatacgcttccgggatattctttcgcaactgttccacattattataaagagcattctccaaagaagcagccaaatccagtctgtcggaagcattcaacggccagtaagtcaactgcacattcagattccaccacgcattcggccacggtgtcttggtgagccacggaccggtgcaatctatcaacgctctgtcggcacgcgtcgccgaagctaatttatacatctgtatccaatagaaattctccttcacaccttcgggtaatgtaaggaagctggcaggataataagcattccaccattgacgatgcgtcttctgcaaattcttatatccacaccgcaatgcatcctccagctcgttccggctgatttcacgggcattggattcgggataagaatgagtaagattcacccacagcacacgttctccttttttcacggtttctttccatgcaaccgccgtctcgccgcccgcctgaagtttctgataagacattccttccttttctgttccggttacttcgggagccggattaagcggataatcttcgggcactttaatccaattgccctctcctttggcaaacagatacctcgggctctctgaaggagccggcacccattcccaacggaaatctttttcctcgccttcggtagtggtcttggtgacgataatcatcttatcgctatgcacgaagctatgtaaatgaatttttccttttgtagtgacaatgtcggcagtagtctcggcattccataagtccacccgcatctttccatccaaaatctcacctttcggatgcaaagcaaaatgtccggtcagcagacgtccgatgctgaacaagtcgttcttgcccttccgatggtcgtgtactgcacagtttcctgtttccaaccgaatatagttctgtcccggttccttataaatcatcagccccaacataccgttacccatataggctgattcataccaatactcaggaagtgtttcccacaccatgtcctgtttactcataaactgtggccagtccacatccagtttcaccgacgaagcggcagtgcctgtcattacgcacaaagacaccacacatacagcaagtatatgccgcaaataacatttaatgatagaatacattgctctaatagtttataaatgacgtattttattctttttcatagacctttcgacaaaggtacagacattttctttataaagctcaaacaatgtttcttctttttacaagactgataagattttctctcattcgattagcagttcaaagcaaaaacaataaacgtgaccttccatacgttcggccaggatgaaatatacattagtccgaatcaatgtgtttccctaatgaaacaacctgtttcaactgcatgaaacaggttgtttaaccgtatgaaaaacatcatgcgaacgtacgctatggaaagcggaaaagaaggtgtctgcacatacttacataggaaaaaacatacaaataatgcaactttggacaaaaataagagatatgctctcacctttgaaggaatctctcacccctatctctcaccctgaaacgccctgtacattgtcgtttcgaaataagggtgagagcagtgagagataaaaatcaattctgcatagggaaagagaatattataatgataacctattcggtaatcttggcatatacttccttggctacctctatcacatcgccttcggcttgagaagaataaggatttgtctgctttgtccacggttcctcaatggcataaaaatctattgccttcaccggcgcaccattcagctgtgccttttgccggtcaatccacaccttccaacggttataatagaaatcacgcaacagaccgttccattctttgtgtgcatagtcacgtagtccgccttcatcagctgccacacgatttccccatgtagtaacctgcacgcgtgcgttccattcatacaaatctttttcctcgggagtcgtgcccaagttgcgtgctttctcaatccatgtgcctaccttgaattcaggacgggcagccaataatttatcctgcaaaagaatcaaatcgaggaaacgttgtgaagaggctgcaaacagttccttttctcctgccttatatgcatctatcataatgggataaaccaaacgccccttttctgccactgcctgacggacaatatctatcaagtcatactcaaaattattattccccttgaaacggtcagctgccgaaagcattatgcctgccgcacggataatatcttccggtttataataaggttccatctcgctccagctggacacctgataaacatcgtaatccggacgtccgcagaaaacggattcatgtgttccctgctgggtattctttgccggacagttataaatggtgttactcaatagcagccatgcatcctgaaccgctttgtcggccttgccataacgcgccactgtatagtttttcaaccattcatctttatcaaaccgggccggacgccaaggtagttcacacaacagctcgaacattaccggattattttccgaaccttccatagtcatacccactcctttcattgtcttgccgaaagaagatgtttttgccttatagaactcatcgatgacatgcttcatctttccatgcagacctacattgccaccatagttcagcagcatacagtaaagccagtcatgcttgccgaaaccttccttacgataccaggtagactcaggatcaccccattgaggacggctctcggcaaaaaggtcgagcacaatcaaatctccggcaggaagattttcaatcatcttttggcgaggattcgcctgccatgcctgagccacccagacagctttcggatttgcctttttcattgctccccaaatggcctggcctgcagcattcaaatcgacacctgccacattgcctccttcgtggaaggggtccatgctataaaaatcggctttgccgtaaagacgactcatctccttataataaaggtcggcaatttcgttgaaacgtgggtcggtgggctgcaagaaagcaggacgccgataaccgcaccacaagcccggatcggaaacattcagccccaaacgctctttggcattgtgaggaaccatgccagaataacccggcaataccggccggatgccatattcacgcatacgcttcaagatttgtttctgtaaagtttcacgttgtttataccagctatcgggattaggaccgccccaaccttccaggttattcattaaccaccatccctgaaaagcaggaccggcaataaattcattgatttcgtctttggtatagcccagtttggtcaatacattataccacaccacatctgcacctaccactgccaaaggaagattgatgccatgcaatgccatccagtcaatttccttctcccaacgatcccagtcccaaaatgccatggtataggaataggtacaataattaaagtcataacgatacttcaaatccgtttcatgacgttctttctgaggcacggccggaagaacggcaggaagttgcgccgtcatcccattccacgaaagttgaatacctgcatagtatttcaagtaccagttcactcctgtggcaatgctcacataattattgccacgaatcactactttatcacctttttggtctaattcaaagaaatcggtcggtgacttcacctgctcaatgacaaacttgcgcgaagctcctttatcaatgcgttccaataagccttgtatgggagaagccgctttaacaaccactgccagacagagcatgcaaataagacaaatcgttctcatgttcattttatgatttagaagttaatatgctgtttataaagacaacttgtaaacgtgtataccgggagaagagaaagaaacttctttctccaaaccattgcttgcaaacataaatttaacggtatcgggaccggtagtctgaaccctcaccgtccatccgtcagcctctttcacaatagaaagtacatcggtggtattacttgacggagctgccgccaactgagccgcacaatgaatcgtgccaagttgataacgggctatagataagcggaacttaccctttccatagataaaggtataaggatgcgtttcctcatcactctgccaatccgtattcaaaacataaagcgtgcgacgttcaccgtcctgccatgccgtaaatcctaccgacggagctgcctctatccaaccgttctccgcctccggatgaactgttgaagcggcaatatcctgcatcacttttatataggctgccttcagtttatcctctgccggataaagggcttccgggaaatagatgacctttcctttgccatagttcaatgttgtttgttgcatcaggctccgatagtcttctcccaacagttcacgaacgggtgcatcatcctgcggaaaacaaggcttttcatccggttgcagacaggcattgatatgggcagcagacaaaatcagtgttcctccatggaagacataatcgcggatacgttcaaaatcacctttgtcatatgtgttccatcccaagaaaatcatggctttgtagcggttcattacatcttgcggagcctcaaccggcagcaagtccaccggaccgtaaggcgtagaggtaaaccatccttcgggaccgcatccgtcaataatgtggtcgggataaaacactttcagcaagtcaaaactttcgcaagccttgttgaatttccatttctcgccttcttgtgaccacaaactgccacgcccaaaagatttccatgcatcattccgtccctgaatcacagcaatattgctatgaaactctccacgacggctatgtgtttcaataaaatcaaggacacgatgctgtgctgccagatgttccttgcccgacggagaataacggtcgttcataaattcatctgtccacaaagcttcttccgtatttatatgtgaagaaccgtgcatataagccacagccagtgaaagatagagacgcaacgaatgtttagggtcggtgaaaggaccgcttccccattgcatggcatgcaacgagccgtatgtcggacgactgtatgccaaagacgcaccacgcaaagcagaaagtatcgtctcttcaggtccatacatttgttcggctcccacccattcataacctgcctgataaaaataacgaaatagagaagacggacctgtatgacgcacgctttctcctttagagtagcgcaagttggataccagtttgcgggctccgtccgccatatcggtcacagcctccgtatcataatggataaatgtgccgtggtctgtataaataggacgatgctttgcaaagatacctccccagggacgattacgggcagccatgtccgaatgcaatccctgatatttgaaatgttgccaataatagtaaccaccgtcattctcatgggcttgttttccacggaacatgggggaggcaagttcttcattcgacggattcaggcgactacctgccaaggttctgccttctgcctgccatgcgtatggtatcttcaaaccatcaagcaaatgggtataataaccaattatttccgggtcggtgatacggcatccactccattggtaagagggacggaactgataccagttgcctacacgttgcgatatataccatttaaagaaataactgtatggagtatattgcttgtcgatatagatttcatctcctgaagaaatatagatgttttcgggagcccgttccacaatctgttctatcgcagcagactcgctacggctaccgtcgctgaattccatcttcacatcggtcagacaagaatccgccctgaactctacaacatgcagtccggcttctttaaatcggacctcttgcgtggccggttgcagagcggcatcgctctttacttgcaatgtcacattcggacggtttgtctcaatcaacacgccgaaagaagcggacttggaaacatacttaggaactgaaataatttcaaagtcacgggcagtctcttcaatcacctccaacgtgcgcacttcgtaaggaaaagcagcccggtgaggctctttcaacaaagagagcttaaaacagcctgttccctgcaggtctccgggcaacaggatatagaaatcggccacattggaagcacggtcaaagatatttccctcgaatacttcccgaccatcaaattccagcctccagcacggccaactgcgagtcgccagattacatcctacccaataatccacctgactcgctttctgtgcaaacttggtgaaagggacatgccacacagttttgccattctgctccaaacggggcgcttccagccaacattcaccactgaaaccgcttcctcctgcacacagcagagcgcaagccacgttatcgggcaatgtaaaagtatggctgacatcctgatactttcccgtgccgacagggacaggcacaaacaacacgctgtcgggagtatcaaaaatatcctgcgccgcccgtccgggtttcttataataaagttccagttccaatccgaaccgacccttaacgtccacagtcagttgccggcgacgaaccaccggaagatgcacagtcagcttccccggtttaagtacctctcccatgacgcggaagtaggcataacgctcaaaagcatcattctctcccttgaaatagagggagtagcgatctttacgagtaacgacagaatccaaattgtcatcaataaaaaactcacttcgacggaacatctcttcaccacgttcctgaaagggagcaggcatcttgactccacccgttacacgcagaaacttacgagtgggataagcacgtttggggaatgatacagtttgttccaaactatgtccgggctgcaagagataagatctttccggcgcttccgaggaatagataacccggcgttcttccttgtaaggtgtttccccaaaaagtggaaacacctgtacaaaagacagaagcaataatagcaaagagtgtgttttcatatcatagaatcaattatagataaatgtcctttccaaaagcccaacccaaatacgattgtttcaggtcttgagttttaccattgaatgatacggtataggcttttctcaaattacagtgcagattgactatctgcttttcatttgcttttatggtcagcttgtttccctgacgggttacccggcagttatagcctatcacttcgccatcgggccgttctacaacaaacgcattggtcaacattgtctcaccgatacatttaaaaagctcgtgcacatcattatcctgtgtattgactgtctgccaatcactaatcatatttacatattgctcaccaatcacaaactcacgggtatcatataattcgggatgcggattgccaaaactcaatgaatcttccgtcacatgagtatcggcactacaagcctgcttcactttcagatacgggtcgaccacaaaagcccaacgtaaatctcccgtacggaaatcaatcaaattggagaaagctcccatggcattaaatgtctctttcaaccaacgttcttcaccggtcaacagataagcataataggtggcataagcacgccagccactccagccgtgaggcgagttgaacatattaggcaacatctgcacgtcatattgagcctcccaatagcgcatggttcctccacgacggcgggcatcgggaacacgcaactgagtcagacaatcatgactgttcaatatctgtaacatggcatccgtataatgtttgcgctccttttcatcctgctgcatcaatgcaagcataccaatctgaagcgccgaacaggaaaccatcccatcctcaaaagtcagctcaccttcggtctcaaaatcgccttgtgaggccaccaactggtcgatggcacgtttggcagaagcatagtgacggtcggcagcctctttccacacactctccgtcttacccagttcacgttcgaccaaagtaagttccaacatacttttcgctacataaataacgctggtatacaccgtattatggtttacgtaagctccgtctttacgctgccaggtattcatcagccagtccgccagacgagaagccttcttcaaatcctctacatcgccataggcttcatatttatcaaccaacaatcctattgttcccgatgtattctgaatacgtgaggcatgatataacggcaccatctttgtccggtcgtgcaacagcccgaacaaataatcaaaacgactgcgcaaagcctcatccagttgcttttcagggaaatacctggctgcaataaaggaagaatggaaaccataccaactctcgatatgggaagttgctttctgatgatatttcaatgcaccttctctggcacgctccatagtccattcccaagaagcgtgggcagacaatacaccttgcgactgcttgtcaccgtctgtaaccttcactgtatacagtcccaccgaggaaagcatacaagatacctccttcacatgacccgatttacttttcactgtaaccttctgaagctttccttcactatctgtcacttcgacagtcggagcggctgcaagtacttcaaatgttgcagtctccttaggctgatacaccgtttgaggcatacgaatcataggcacaccggccaccttatgaatcgtttcttcaaattcgcccggagtattgatatcaacaaaggcaatcgtccacgttttacgttctccttgtttcaaaatccacaaatcttgcggacaatgctgaggcaaaggcagtgcattcatcaaatcaaggttcagggattcgatacgatgtcccataaaccaatgaggagcgggatcttgatatcccaagttataatccacgctccatgatgcaacaggctgcggtgagacaacacccaatgtatgtcccgacggagtctgaagataaccatagaaatgagttttctcgttcatcatcagcgttggaaaatacttaccgaaccaatcgggatacttatccatataagtatcaatccccaatttcaatcctgcctttacgggttgaaaaggaacatttcccttgttttccaatataacctccatagcaggctgtcctttccattctttataagtaagacggcactctacaccatcgatggttgcacggtaagaccgatatccatccggtatccagtccgcttttatattcccgttacccatattggcgtagaaactgggccccatattactcttatcatggaaaaaaggcaccgtatcattacgctgactgcctttaaaaacaatctgctccaatgtccctttatccgaaatacgacattcccatccactgcgtttccatattgtagtctgtgcaaaagcactcattccccataacaaggttcctataatcaaacaacttttcttcatggtataaatcctattattctattttcttcagagtaaagcagtcgatatcgggtgcccagcaataagggcttcccatacggactacattatttcccggcttcaaacgcacctgcactgttacggaagcaagctgctgtccatcggttccggcaaggtctttcagcaggatactcttttcattgtttactttaatttccagtttgcggtctgcatgaggcacatattggatggtcatttcatacattccgcccttttcactatatactttattccattcggcatagttttcggcacgtcctcccagatagctgaccttcatccccccggacgcttccttcatcggtgcatacagaatggttttcgggcgcagtcccaaatcattaaaacaaggcaaataagcccactcagcctcataacgcacaggttcaagacgctgctctgcttccatacgcaaaatcaggacactatgtgcaggcaattgccggttcagtgtcccctgaactgccttaaggtctttttgcttcaccaaatcacgcatcttcactttacctcccatttccaaaacactcatgggaacagagaaatcacaaatactgtccgaagggttatacaaagccaccgcacgcactttgccgcgttcctgttctatatcctttaccagcacatagcccttattctcatgctgcaccacataggcctgtaatcccaacgggtcttgatttaaggcaatcagttccttattcttcaagagtttcaaagaagcctcgggaatcgttgtcaggtcacagcctatcaacaagggagaactcatgatacaccacataccgaagtgcacctcttcttcctccggtttcagtccacggccaatctccagcatatccatatcattataatgaccgtctccggcatacgcagaaagatacagattcttatcaatgatatatttcaccgacccccattccgggcggatatcactactgatacgccaagagcagccgatattctttgcccatgtacccggaaaagcccatcggcacacattaatggaaacatggttacccgccactttatcaaaagcacggcgaatctccgtatatcgtttttcctcatccagactcaactcctgagaagcaccgcaataatctatcttaatgaaatcgaacccccattcattgaagtataaatcggcatcctgatgctcatgaccatacaagcccgaacctactccgttgacatccttatcccaaatggaaccgcaagtattgcttccggcatccgaataaataccggctttcagtcccaaagaatgaatatggtctgccacccctttcagtccgttcggaaaacgttccggatgagtctgcatcgtgccgtgctcatcacgccaaccaaaaaatccgtcatctacattgacataattataacctgcatctttcaaacctttctgcaccatggcatcggcctgcttctttatcaaagcctcattgatattcacccgataggtattccacgagctccagcccataacaggaggatcaaatacattttcattaccggcaaaagtcatggaagacatgcccaaagctaacacacataacaataatttattcataataaataaccaaccattaatgaatgctttattaattccatcagatctttatataaatcttctttttatataaatatgctccgaccaaccatacaactcccacaaaaagaaaagcatagacaaatgaagtaaaggcattatcacccaaccaaccggataaaccggcatatataatgtcgtgcatattctgttcttgcagtggtaaactgtcagctaatatatataatatctcactaagtacatagcaaaacaacggatttacaccaaatatggcaaaaatccaagtcttctgatatttcttcgtcacatcgatataccacagcagaatagacaaaagaagagcagaaaaaccgcaagtaaccaacacaaatgtaggcgaccacacctttttgttcagaggacatacatcctgtagcagaaagcccgctatcagccccataactccataaaggaacaaacggttcaacttatctttcatatcgggggtctccatgcaaatctttccaaaccagaaacctatcagaacttgggcaatagaaggaatcgtactcaacactccctccgggtctattccccggtcattatacatgtgtgataaccccagtacagacttatccacatgagaaagaatattctccgggccgtatacaaatccattgccgaccaacaagattccataatatacaatcaaaatgactgccaccagataagggatataacgatggcggaccgtagtgaccagcaatgagcctattccataacacaatgcaaggcgttgcaacacacccaatatgcgtacatgagccagcgatgcaaaagccgccttccaagggctgccaacaaaatcgggttgcaaagacgcctcacgcaatgtgcccagaaaagtagcggtaccataaataaatgtaccgataataaaaataagaaaagtacgacgaataattttcagaaataacgccttatccaaagtaaaggagaatttcttcagagaaatatacatggacattcccatcataaacataaacaaaggataaatgacgtccgccatcgtcaaaccattccaggaagaatgtaataaagggggataaacataactccatgttccgggactgttcaccagtatcatgcctcctatcgtcagtccgcgaagcacatccaaagccaacaaacgctgtttcataataatgagatattagattagagagtcaaaggtataaataaaagatatagttctaaaaaaggctgccggatttattttcccagcagcctctttatcttaattatcagtatccgggattttggataatcttacctttactctcgtctattacactttgcggcagcggcatcagggtcatataatcctgtgctgtgggcgactgtttgtatttgcgagcatactcaatatatcttccataacgaatcaaatccgaacggcgaacaccttcaaaccataattcatgtccgcgctctgtcagcaccgcttcaaggaaggcatcagctccggcaaagtcagccatagtgtaagcaggaagtccggcacgtgtatgtaccatattcagcagttctacagcttccggagtcacagtattaccttcgcgaacaatcgcctcagccaacaaagtaagcacatcggcataacggtatacaatccagtcaacctgactttcttcgccggtagcatcaggatcttcaccatacttaacaggcattgcgccttttatcaatacagaaccgggattttcttcattatagtgagttccgtcttctgcaacaaagtcgcctaccaatacttccaaacgcttgtcagccgaatcgaaagtatgataaaaatcccaaagaacacgatagccgccccatttctggatatttggatttttagtcgggtactcgctggaaataacatgagccagccacatctgctgattcacactgcgactgcaaacacatgcccaaattgtttcagcattgccttcattctccaatgtaaaaatatccttatagttatccatcaacctataaccatattccggcttcatcaattcacgaccacattctacagcttttgcccaattctgttcatgcatataaagtttcatcaatacagtataggccaaccctttggtaaagcggccataattcgtatccgatactttataagttgccggaagaacagcaatggcagccttcaaatcatcttcaatgaatttcaccatttcctcccgcgatacacgaggagctacttcatcagacaatggattattcaacaaatccaaagaagcaatctgaataggaccatacatatcataaaggatataagccaaccatccacgtccacaatgcaattctgcatccaaacgtgctttcacttcctcattcatgggaacattgacaatacgctccatagttaaagtcattttacttatatcgcggatataagtactgtaagtagtagtcagcccaccggaattggctgtaaaattcatctgaatcatatccggccaaactgcatcatcccactgacaatcaccgatatcagtactcatatcactgatgacatgaatacctccctgcgaagaagcatacaatccactataccagttcgaacggaaaggagcataagcggcagaagtcaccaaagccttcgcatcttcttcatttttaggaaatataccgggattaatcacattatacatttcagactccagattagtgcaagaaggacaaaatgcagtcgcagccaatactacggaaaatattgataatatctttttcatttcaatcttatcttttataggttattaaaatgtaatatccaatcctaagctaaagcttcgtacgttaggatatgcccaaacagaattatctgtctcaaggtcgagaccgtcatacggagtaatagtaaacggattattgatatctgcataaacacgaatgctcgacaatgcctttttaaccgggatagtataacccacagttatattacggcaacgtacaaaccagcttttttgcagataatagtcaccaattccccaagtactcttgttctggaaataaccgggacgagaagcagactgattatcatgtgtccatacttccgctgcactggtaggcatattgtaaccacgatacatatttacaatacctgtcataccgtcagcacctgtcaaccaaaggtctttataagaaccggcattcaagacattgaattgtccatagaaataaatattaaaatcaaagttcttataacggatagtgttattcaatcccatcaaataacccgggtccgaacttccgtatattactttgtcggcatcatccaatttaccatcaggtttaccggacttcaaaggaataccgtgtttatctacctgaacagaaccatcctcattatatacataaccattaatatctttaatctttacctgtcccggcagtgaacccggcatatagtctactgtttctccgggctgaatcaaaccgtctgaaagatatccgtacatataacggataggagcattatactgtgaataagcagcaggcttccagcttgcatcacgagtattccatttatcacgatagaatgagaaagtaaagtctgtattccaactaaaatcctttgagttaaagttagtagtgtttattgtcaattcaaatccctgactttgggttttacctatattggcggcaattttatctgcctcattaaaagtgagcaaactacgttcagccagcaaatcggaaactaccttacggaaatattcagcagttacattcaagcggttattgaagaatcccaaatcaagaccaacattccattctgtagtagtttcccacttcaaatcaggattacccatctgactcaaatacacgccaatagactctgtgccaccgaattcattgttattaccggtctgatagtaactgatagcacggttaccgatattagagttaccggtctgaccgaaactgacacgtaatttaccattagaaagaacagaagtcatcggtttcataaactcttcttcggtaaatctccagcccaaagctaccgacgggaaatacccccaacgattattttctgcaaagttggaagctccatcggcacgcaacgtagcagtcagcaaataacgatctttatatgaataatttacacgaccaaagaaagatgccatttcatcttttgaggccgaagagcccacagaaggtttcggataagctccggctcccaaattattatataagaaaccgtcaatcaagaactggctgttgccggcatacaatgactcatctgtaaaacgttggaatgaataacctgccaaaacactgaaattatgatctcccaatctcttggtataattagcagtaagttccatcaaataatccgatttgtcatattgcgcaatatcggcttgtccgcctttcttctgaccatacaaagtagtcttgggcatataaacactacgcttctggtagttacggtcaataccgaaattagccttcaaagtcaaatcctgaataggcttcacttcaacaaacgcagtagcaagcaatctctctttcattgttttgtctgtgatttccagcaatgataccggattaggcaagaaagcagcctgagagttcaatgtgtaatccccgttttcatctttgatcggtaacagcggattaaactgtgcagcagccaccataatacttgcattctcattctgtcccgaacctaaaggcacgttattggtttgatttctggacaaagtcatgttaacacctaaattaacatacttactaaccttctgttccaaattaatacgacccgtatagcgttccatatcattattcttcactacaccgttctgcttgaagaagtttcctgaaaccagatatttggttgattcagtaccgcctgtaacagatatattatgttgagtctgaaaacccgtacgggtaatttcgtcaaaccaatctgtattatgggcaggagcattgatttgagcatctgtataataaggcttataagcagtagaagcctcaccttcggtttttccaccatatacaccgataccgttcgctctcatccattcttccttggcatagcgattggattgtatcataaagtcttgagcacccaacatatcataatcacttgccagtgtctgaacagtagccgtaccggaataagtcactttcggagcacctgttttaccctttttagtagtgatgatgattacaccattaccggcacgtgcaccataaatagctgtagagctggcatccttcaagacctcgatagactcaatatcattcgggttgatagaagccaaaatattatccgaactacccgcatcatatttacccgttttaatagcatcgtccgaagtcggatttaccggaaaaccatcgataatcaccaacggatcgttaccggcattgacagaagcagcaccacggatgcggaagttagaaccactacccggctgtgcacttaccatatttacttgcaaaccggctgccttacctgccaaagcgtgactgatagtagataccgtacccacaggagcatcgtccatcttcacagatgcaacagcaccggttaagtcttttttcttcattgtaccataaccgacaacaataacttcatccaacatttccgtatcttcactcatagtaacagacaatggcttgccggcctgagatttcaaagtctgtgtcttataaccaatataagaaacttccaattccgctttagccgaacttacagtcaaagtaaatttaccatccatatcggtaacagtaccgtttgttgtacctttttctactacactggcaccgataataggttcacctgtcgcatccagtaccgtaccacttaccactgtagaagcctgtttaacagctttagttccttctgtagaaagaattatttttttatctaaaacagaataagtaacattcgttccggcaaataccttctccagaacttcaaacacatttccttgattagccgaaacagacacacgacgattcaagtctacatgtttattattgaaaaagaaatcaaaaccggtttttgccttaatctgattcaatactgtttcaactgtttgattactagcatcaatgctgatttttgttttttgcgcatacgtttctgctgcatgagtcaagctcaatgagcaggcaagaaatagaacacatagtctcataaacaaagggattttgttaaatgatagccataacgactttatcatccagaatacttggatgctaaaaggattttgcataattttgtaaagactgaggttaataaaaatgttatcttagcttgtcgccaaacaagctttaaaaagttttcatttttccatgcggtagatacgccaatatcttccgcatgttttttgttttaaggcgctcttttctgtttcataatattttctaaaaggttaataaggttttatttaatatatctctatccgctgtttcttatcggaaatttcatcactgtccaaataacgccaatttatttgggacgagattttaaaatattccaagatacgttccaaacgctgtgtagagaatgttcctgtaaacgaatactccttaatacgattactcttcacaacaaagtctacattataacgtttgcctaacatatggagaatatcctccatagaggtatttttaaatactattttaccatctttccaagcaatctccgattcgcaagaagtagcaaacattttcgtctcacccgattccggagtatacaccagcttatgataaggtttcaactttatcattttagcttctcctgctttatctttaaagaaaaagccgacactgccttccaccagtgtagtcgatatccgaccatcggcagcataagcttccacattaaaaccggttccgtatacttctatttgtgactgatgtgcagtagaaaccacaaaacgtctttcctcatccttcgtcacatcaaaataagcctcaccaatcaattccacctcacggctttcgcccacaaatcgggaaggataacgcaatgaagactcagaattcaaataaacaacagtgttatcgggcaatacaaccgaagtagtcattcccggatttgtctttatttcaaccatttgagccacctcctgctgctcatccttatcctgatacatccacaaaacagcaatcaatagcgggatggacaacatcgcagctattcgttgtgtccattcccaccaagagattctttttttgttcatcctaccttttaccttccttaatgccttttccgtatctacacttttcatcacatgcaatgtatcggtggccagataaagcgcatgaatctgattcattattttacgatgagattcatcttgttctatccattcttccaccaaccgactttctgccgctgttgtcattccttcacagaaacgaggcaacagctcctctatgttgttatatgtattatctgtatctgtcatttttgagagctcatttattattaagacaaaccccgaagaaagattcctaaacaaaaaatggtatttttttgaaaaaagatgttttagtattaaaagcataaatgaaaaacttatctttgcagacgagttaacgaggaataatcaagatgaaaacagacagaaatatggaagatatggctctattgagttccctccgaaagggggaacaacaagcattcgacagtctgttcaggaagtattatccgatgttatgcgcttatgcccgccgctttgttgagctggaagatgcggaagaaattgttcaggaaatcatgctttggatatgggaaaaacattcggagctaataatcgaatcttcccttagccaatatctttttaaaatgacctaccatcgggcattgaatctgatagccaagaaagaaatcatcaaccgggcagaagcagttttctataccaagaatcaggaaatgccggaagatgtgaattactatcaaataaaagaactgaccaaaagaattgaaaaggcaatagctgcattacccgaatcctatcaaacggcattcattatgcatcgctttaaaggcatgagctataaagatatcgccgttacttataatgtatcccccaagacaatagactaccgcattcagcaggctctgaaattattgagagaagacctaaaagattatttgccactgacggtattgctggcattgcatatcggctgattcagacttataatctttcctatattgcctcggttaaaaacagcctcaacaagattagttgaaagtaggtttcacacatatcatgaagtcaacctgttgctacacaaaacgttagcgtgaaaggaaataagtaagatacaaaaatacgaggaacaagtgaaataaataggtcgaaacgtcttagaaaaaagaccaaggtctttttctaaaacacttaagtctttctcagaaactctttggtctttttttaaaacctcaaggtcttttcattacgatacgttgacatctgttaagattctcaagttggatataaaacgaagacaatgtttccgccttttctttaattaatgaaagtaaaatttccgttaaccaagaccgaggttaagcaatcgcaatatgcttttcgagatgagctatcactctttgaaaaagctttaaatccttctcaaaaacaattaagtcttttcaaaaaatgcccgagtgctcttgaaaaaattgttttgcactttttaatactcaagagatagggaataaatacgtatcaaacgggtagtaataacctgataatgtgaaatatatattttcatgagaaaagaagaaatcggtagatctcttagtaagagatacacagtgctatgttaataagatgaaaaccaatagattaagtctcattaaaaaagccatataattcatgactaaagatatttttgcatttgtcttatgaattttcttctcaaaaagttttaattatcaaaactttgtgtaaatttgcagcgaaaagtgtatctcttactaagagatctaccgattttaactctttagaaaagggtgaaaatatgcgtatttctctcgtaatgaggtgataaaaatagaatacaatggactatctgtttctacaccgcgacaagcgcacctttacttccgaaaggcagaaaaatctgcttttcaaaacagctcatctttattgggagcaaaaattcgcaaatcagggagtagaaaaagtaagaagagtcgattgtgagatatataaatatgtattgtactatttggaagtgcgccaggtattcctcgacccaaagctctctttgaaaaaattgagcgagatgattgaaacgaaccaaacttatctatccaacgtgataaaccgctatttcggttgccacttgaaagatttggtgaacacatatcgggtggaatatgccaaggaactgcttcgctcgggcaagtgtccgctggaggaattgcctcaacgttgcggattcctgtcgcgaagtgccttttatgcctcattcagtaagttggcaggcgtacctcccaaacgttatcttttgcatgagaagagagagtacatctctcataaccaatagattatgtataaccaattttagtttttaaatttataaatttaaagtttttattatgaacaaaaagtttttaagtgcaatcctgttcggagccttaatggtttcgtcaacaggaacatttgtgtcttgtaaagactacgatgatgacatcgataacttgcagggacaaattgacaagctggcaaccaaagaagatatggaagccaaattagctcagatgcaagctgccattgacgctgctaaagcaacagccgaagaagctttgaaaaaagcagaagcaggtggaaacgctgatgaaatcgctgacctgacaaaacgtatcgaagcattggaaaaagctactatcgatgttgaagcattgaaaaaagaattgaaagatgctgtaaacgaagacatcgataaattccgtggcgagatggaagagttaatcggcgaagtagaaggtcttgttggcaaaattgcagatttggtaaccagcgtagaattagttaaatcttatgctattgatcaggaaagtggttttgctcctatcatgctgagtacagctatcgaacaagaaaatgtattcagcgaaggcattagcaacaagattacctttacaaaagatgctgaagttcaaactccgggacaattcttggttcgtgtttctcctaccaacgctgttctgacacctgacatgatttctttggtaaacagccagggtgaaaatttggacggaatcttggaagtagtaaaagttgaaaagtctgaggtactgttgagccgcgctgccaacgaaagcggtttgtggaacgtaactgttcaattaaagaactacggtgacggaaaagctttcgatgcagctaccagcaatgagggtaaaaaaatcttgttcgccgcacaagtaaacaatactttaagcacttcagaaacaagatatgtaacttcttcttacgatctgactttaggttggaaagaatttgaaggagctaataaattgaactattttgttgatactaagaatgtagctgaaatcaacaaccgttttagtaatactagtttgagtttgaaagaacaaacagctactattaattataacgaattagaatggataaatgaagcagctgtaaaaccaacagaaaaaaatacaaaaaaaggcgatgaccgttctcgcaaattattataccctgcagtgcaaggacaagctttaaaaattgctctgtcttcttctaacgatgaagtagttgctcctacaaacatcagagctatctatgttgtattggataagcaaaatgctgttgaatcagctccgtcagaattgaacgcatggaacagctatacttatacaggtttgaataccgtagttgaaggaacttctacagaaattactattgacagtgaaaaagccattgatgatattatcggtttccgcgtttatgctgtaaacttcgatggtactttggttgatcccgatggtaaagcattctatgttaagataggagataaagcaacagcttgggatgcagtcaacacaaccatcattccgtcttctgatgcttctattctcgtagacatgactcaatcagcaaaagaaactattaagttgagtgcattaaccaaaccattctctgcaacatggactactgacaagcttgaagcattaggtgaatcacctatatttaacgcatacttcgaagacgcagaaggtcatgtaatttatgacaccaatggtatgttgaacgctactctcgataaagttgatttcagcaagattgccaaaatatatactagaccgactgcaacaaaatggtctatgtacgaagatgagaagacttattccggtactttgactattaagaatgaagatggtttcgtattagctacattgaatgtatcaatgactaaagagttaccaaaagaactgcctgcaggattctcattcaaagataaacaagtaattgatggtgtttacaattgctatctgattgctaataactggaaagctgaacaggcggtcaatggtactatgcctatcgaaaactttatcaacttcggtgatggtgttcagtctcaatatcaagtagtattggcagaatctcagagaaatgctaataatgcactcgaatcacagactaaaaaaggtaatgaatcgattgatgtacaaaccgaattcatcgacaacaaaacagagcatgctactgtagtttcttataactatggagaaatatcttctaagaaagatgaaaatggtaattatattcctgtagtcattaaagcagctgaaatcaaaacagtttattgctgcttctacaagaaggaagtgcatacttggaattgggctactaacgaccaagtaggtactattgatggaactaattacgcagagaaagacggtaagggtaattacatacacgaattgccttctactactctggtttacggtagcaattctgaaatagcatacaacaactttatctttggtcagaatgctattgacggaacattctctaaactgttgagcaaaccttacgaagaaagtttggttattaagagtgctaaattagtttctgatgcaactcagaaagaagactacttctcagtaagcactgacttgaagttcacagcaatcaagacagaccttggttctaatccgaaggaaaatgttccttctacattaactgtgacttgtgttgattcttacggacacgaagttgtcatctcattgaagatgactgttgctccccgtaagtaattgaaacaacagtcaattcaaactctagaataagttctccctcatgcatgagggagcttatataatagaaaaactttaaaaactaaaatccccggcttgtgataagtcggggattttttactcttccactatccacttctctatattcctcgtctccgcactgaagttaactcctactttaaacagtttacggctgtcaagttcaaaaggtggtgcataacgcttttcattgatctgtcgcaatgcttcttctgccgttccatccagttcaaactccattacataaataaaacggtgtgtctgtaacactaaatccacacgccccctcacggtgtgatattccacttttacataaaagcctaccagcttgaagataataaaaagaatgttttgacaatgaagttccaattcacgcaccatcttataaggagtatctgcaaagcaactctgcaaacgacggaaaaaagaatcataatcaccaacttctacctcacggtttggaaaacctaaacggtaaatgccaaaacgctcgtcataccctttaatagtcaaatatccgctttgataaatcaccggaataggattggtcgattctgaatcaagtcaatatgcagaataggatataacttgttgcccataactcattgttttaacagataacacacaaagataaacaattccttctcacattcaagcctttatagtcataaaagctctcttctcaccggataattccctctgaactgttcaaactcttccggccgttgcttcagccaatcactatcccgctgcggattataaacctgtaagaaagcttcctctttatcagccgacaaagccataggcggcatgtctggaggaacaatcttaaatgaagcatctatatggaaaaagcgacaaactgcttccaaagccatgcgggtggcattcgccttcccgtcggcagaataaccggctatgtgaggcgtccccaaaaagacggcttgcaacaactcacggtctatatcgggctcatgctcccaagtatcgattatcgcatcgcttatctgccctgttttcaaggcactcagcagtgccggagtgtcaatgacctctccgcgacaagtatttattatcacagggcgacgttgcaaagaggcaaaaaacgaagcatccgccaaatggaaagtcttatacatccccgtgcgatataaaggagtatggaaagtgataatatcacatttgcgcatcaaagtctgcaaatcggtgaagccctgctcaccgttgtcctcacggggagggtcgttcagcaacacattcattcccagagcctcagccattcgccggatgcggctacctacatggcctactcccacaatgcccatacacgtatcttccggtttcattccgcgcaggcgcttgagcagcagaagtgcagcgtgcacatattgctccactccgccggcattgcatccgggacaattgctccatgcgatacccgcctcacggcaataatccacatcgatatggtcaaaaccaatcgttgccgtcgcaataaatttcacagaactgccctccagcaattcgcggttacaacaggtacgtgtacggataattaaagcatcggcatctttcacgtcccgaggggtaaaagcagcacccggcaaatataccacctcatcggctatctgccctacagcttctttaatataggggattttattgtctacaattactttcatcttctaaaaaaactaggattagggcaaaggtaggcacttttaccgaataataattggttgattagaaaagtttgcatagatttgtctttccaataattttaaaacgaacaaggtatgagttttacagaactatgcaagcccatttttgtgcagtctatcaatgactatcacaagacagataatgttgatactcccatcaacaatccatacgaagtgaaaagcatcgagtattatctttatctgaaaaactggattgacacagtacaatggcactttgaagacattattcgcgacccgcagattgacccggtggaagcattggcactgaaacgccgtatcgacaagtccaatcaagaccgtactgatttggtggaactgattgacagctatttccttgacaaatataaagatgtaaaaatacagcccgatgcaacgattaacaccgaaagtcctgcatgggccatcgaccggctttctatccttgcactgaaaatctatcacatgcgtcaggaagtggaacgcaccgacgtgtctcccgagcatcacgcacaatgtgaaaagaaactgaacatcctgcttgaacagcaaaaagatctctcatctgccattgaccaattgatagccgatatcgaagcgggacgcaaatatatgaaagtatataagcagatgaagatgtataacgatccggcattgaatcccgttttgtacggaaagaaataaattatctcctcatggctaagattctggtaatccgtttttctgcaatcggcgatgtggcgatgaccattccggtgatttattcgtttgccgttcagtatcctcaacaccaaattacagtgttgagccgcaatacgcttgcacctttgtttgacggattacctcccaatatcactttccatggagtggatttaaagggagagcatgcaggaatcatgggattggaatggatatacaaggatctgaagaaagagcatttcgacgccatagcggatttccatgatgtattgcgcagtaaatatctgcgaataagattcagactggccggcgtgaaggtagcgcatctggacaagggacgcagtggaaaaaggaaattggtacgtgccagaaacaaagtaatggaatggcaaaagtcgtcattccaacgatatgccgaggtattccggaatataggttatccggtaaaattaaatttccaatcgcttttcggcaagggcaagggaaatatctcgtgcatgcagccgctgacgggcgacaaaggcacggacaaatggattggcattgctccgtttgccgcccatgtaggcaagatttatcccttatccaagcaagagcaggtaatcagcttgctgtctgaacgcaagaatacgaaaatcctgctgttcggaggaggagccaaagagattgaagtactggcaaaatgggaacgtcaatatcccaacgttatatccacggcaggtaaactgacactgaactcggaactggcacttatgagccatctggacgttatgttgtctatggactccgccaatatgcatctggcatcattggtaaacattccggtggtctccatttggggtgccacacatccatacgccggattcatgggatggaaacaattgcccgacaacgccgtacaggtggatttaccatgccgcccctgttccattttcgggaataaaccctgttggcgcaaggactatgcatgtctgcaaggaatcactcccgaaatggtagtgcaccgtattgaacaggttatcgtttaaaaaaagaataaaccatactctatgaaaattgtaattcatcccgattttatgcagactgccgattttatcaagcagctaccccaacatttcgcacaagaaggagagctgctgtatgaaggtagaaacgaagtcagacgttatcgggtgaagaacgaatggttggtagtaaaaaaatataagcaacctaatatcattcaacggattgtttacacttttttcaagaaaagcaaaacggaacgggcttacctttttgccggcatgctgcgcaagagaggatttgacaccccgcacgaagtggcttatattgaaaagaaaagaggaggattgtttctggacggatattttatctctacccaatgcgacttccctcccctgtccaaagtgctgtggcaacgccggttcgacaaacatgccgcaaacgagttggctgcgttcatggtgcaattgcacgaaaaaggagtattacatggcgacttaaacctgaccaacatactttattgcacagacaacgacggtcattatcatttcactttaattgataccaaccgttccaagtttaaatgtgctctcacccgaaaagagtgtctggagaacttgaagcgtctcacacacagcaaagcactcctgcgatatgtggtaatgcaatatgccaatttaagaggatggcctcccagaaaatgtgctttggaagtatttcaattccttctccagtttgaacagaaacgacgaagaaaacgcaggcttcaggcattaatcggaataaaaaagtaacagacaatgaaggtagtatattatattgtatttttcttttggtacttgctttcgcttttaccattacgcttcttatatattttttccgatgtactctactatccgctctattactgtattcgctatcgacgtaaggtggttcggcaaaacctcaccggctctttccccgataagaatgaaaaagaacttatccgtatcgagaagcaatattatcacttcttttgcgattatatgatagagacaattaagttgttttctatctcgaaaaaacaattaaagcgaaggatgactttcggaggaatagacgagatagtaaagaaactggaagaagagaataagaacttctgctttatttatttgggacattattgtaactgggaatggattgcctctctgccctattgggtaccggaagatatactgtgcggacaaatataccacccgctatacaacaaagccttcgaccggctcttccttcgcctgcgcaaccagttcggcggcgaatgcatctcgatgaaggagacgctccgccgaatcatcgaattgaaacgcgccaagcagaaaacaatcatcggctttatctccgaccaagctccgaagtggaacagcatccaccattggacagacttcttccatcgtgaaactccggtattcatcggaacggagaaaataggtaaacaggtagatgccttgatttattatgccgatgtgaaacggataaagagaggatattaccattgcgagttcaaacaactgaccgataacgccaaagctgtgcccgatttccaactgacagatatgtatattcataacttggaacgtatgataagcgcagtgcctcaatattggttatggagccacaaacgctggaaacgtaccaaagaagagtggataagaagacaacaagaagaaaaagaaaagaagtgacaatgaaggagtatgattatttaatagtaggcgccggattgttcggagccgtattcgcacacgaagcccgatgtgccggcaagcgttgccttgtcattgacaagcgcggccaacgcggaggcaacttatactgcgaagacgtggaaggcatacatgtacacaaatacggcgcgcacattttccacacagacaataaagaagtatgggattatgtgaacagctttgtggagttcaaccgatacaccaattctcctttggctcgtttcggagataaattatacaatcttcctttcaatatgaatactttctatcagctatggggagtaaaaaccccggcagaagcgaaggagaagatagaagagcaacgccgggagtttgcctatatcaccgagcctgccaatctggaagaacaggctttgaaactgtgcggaaaagacatttaccgctgtctgataaaagggtatacagagaaacaatggggcagggcggccaccgaattacctgcattcatcatcagacgtatccctttccgctttgtatatgataataattatttcaacgatgcttatcagggcatccccaaaggcggatacaatgtattgattgatgccctgctggaaggtattgacgtgcgcccgggcacaaactacttcgagcatcgcgaagagttaaatgcattggcagacaaagtgctcttcaccggatgtatcgacgagtattttgatttctgttgcggtcgtctggagtacagaagcctgcgtttcgaccatcaactgttggacacggaagacttccaaggcaatgcggtggtgaattataccgaatgcgaagttccctacacacgcatcatcgaacataagcattttgaatacggcacacagcccgtcactgtcatcacttatgagtatcctgacgatttccaaccgggcaaagagccttattatcccgtcaatgacaaacgaaacactgaaatatatcagaagtataaagagctggcccaacaactccctaacgttctgttcggcggacggttggcgcaatacgcatacgctgacatggacgatacggtcaatgcagcacttacattatggagaaaacaaacaaggaactaaaactttaacttatgaacaaagcaaaaaggaagaatattttaatcgatctatccgacttaaagcatcctaattgcggattcggacaaatagctattaattactcaaaacgatttgcaaacttaccaatagaagggctgcattttttttatttgctgcccaactgttgcccaaaaatccatagcaaaaatgtaacatccgtactggtaagaaacagaaaaatcaggaaatggtttccattcactcttcccaaagtagatatatggcattctgtaaaccaatataataaattatatcgacagagtccaaaatttatatttaccatacatgatttaaacttcttatttgaacaagaaggacagaagagacaagaatttcttcaaagaatacaacagaagatagataaagcaactatcataacaactatttctcattatgttgcagatgaaataaaaaaatacactaacttaaatggaaaagaaatccgtgttatctataatggagtagaaagaatagatcaacaagaaggcaaacaaccgaaatttgcaacaggtcgtccttttttcttcactatcggagaaatacgtaccaaaaagaacttccacttgttggtagatgttatgaagtttttacccgaatatgatctctatatctgtggaaaagacagtttccaatatgcagacgagataagaacacaaatcaaagagaaagcagtcggaaatgtgtttgtaacaggtatgatagagcaaacagaaaaaatatggctgtatcgtaattgccaagccttcttattccccagtagaggtgaaggattcgggttgccggtcatcgaagccatgcaattcggaaaagctgtatttatatcaaactacacatgtctcccggaaatcagtaacggttttgcttttatttgggaaaagttggaaccggaagcaatggcaaaaagcattcggaagaacctacccttattttatgaacaaaaagaaaaaattgaccaaatgaaagaacatgcatactctttcagttacgaaaaacatataaaagcatacatagatttataccatgaattactgtcagcagaataattctgtgtatttactgatattctttaaagaaatcgtcgtaaatacaaaaaatctctgtaattttgttcaaataaactttcagagaattaaacgaaaggataaatatagatgaactgctacctgtcacgcaattacaaaggactgtccagtgccggaaataaggcaaagacagatattgaacagattatgaaagacctgtctttcaaaaatgtaggacttaagcagacaacttacagaaacaaggtgctttcattcctcttcactttagccggagtcttgaaagcccctttctgcctacacagaggagactatctggtgcttcaatatccgttaaagaaatatttcacctttgtctgcaacatggcccatcaaagaggagctaaagtcattgtgattattcatgacttgggcagtttccgccgtaaagcattgacggtagaacaagagataagccgattgaaccatgccgactacatcatagcacacaacgagaagatgaaaaaatggctggaggacaacggatgcaaggccaaactcggtgttttgggaatcttcgattatctgtcggagacatcggctgctcccaaacagaatacagaaaaaccatacagcgtattatatgccggagcgttgagcccccgtaaaaatgcatttctttacgaagtgggagcgtttgtgcattctttcagcctgaatttgtatggcaacggctttgaaataaatcaggcaaaagggaaagaacatttcaactatatgggatttgtgaagtctgatgatttgatagccacagcccagggagattttggcttggtatgggacggcacttctgtctctacctgcaccggagactttggagaatatctgcaatacaacaatcctcataaaacatccttgtatatccggtgccaattgcctgtcatcatttggaataaagctgcattagcagattttgtacgcgagaacggcatcggaatatgtgtggattctctagaagagctggagaagattttaaatacattaagtgaagaggaatatgcagaaatgaaaaaaaggacggcaaagataggagaacggttaagtcaaggctattttgtacgaaaagccttacaggaagctattaagcgtctttaatatgttcctaaagaaataactaataaaacaatatctcatgatacctaaaattatccatttatgctggttcagcaatgaccctttcccggtagaaataaaagtttgcctggatacatggaaacgcatactacctgattttcaggtaaaacattggacgtatcaagatgccaaagccataggttgccgttttataaacgaagcattagaggccagaaaatgggcttttgccgccgatgccgtacgtttttatgctatatacaatgaaggggggatctatatggatagtgatatctttatcttgaaacgcttcgaccatcttataccggagcatggctttgtcacctttcaggaaaatgagatgacacagttgcaagcggctttcttcatgggagagaaaggaaacgcattctgcaaggaagtctttgagtattacaattcaaacccctttttaaatcccgacggcacttataataccattatatctcccatcacaatgtacgatgttgccaagagaagaggttatctgcccgaagacaaggagcaacatctgcccgatgatatcattatttacccggcgcattatgtaatcccgcgacacaaatatcccactacccccgatacgttcgccgagcaccggattttcggtagctggagaaaacgtaagccgggtagaaagattgaactctttatcaaacatgcaatagctaccgtcagatatgcagtattcagacggtaatacacctaaaaatgtattacacgtctgttgccaattaaagatattgatcgattccttcagggcacttaatgagggacatttattaaatattacaaaat

SEQ ID NO: 6682 - DNA, 372 bp, Unknown
  gut microbiota DNA sequence
cctgtagccgaagcgaaagcgagtctgaacagggcgtatagtcggtagtggtagacgcgaaaccaagtgatctacccttgagcaggttgaagtccgggtaacaccggatggaggaccgaaccaataagcgttgaaaagcttctggatgacttgagggtaggggtgaaaggctaatcaaacttggagatagctcgtactccccgaaatgcatttaggtgcagccttgaccattactaatgtgaggtagagcgactgataagatgcgagggcttcaccgcctatcaagtcttgataaactccgaatgcgcattagtttgaggtcaggagtgagggcatgggtgctaaggtccgtgcccgagaggagaagaatcc

SEQ ID NO: 6683 - DNA, 4127 bp, Unknown
  gut microbiota DNA sequence
tgattttgtaatatttaataaatgtccctttctattctttatattgttgcctttttattttttatgagcgtcaggtttattgggctgatgcataatcttcagcaagtcacgatgaaacttgatctccgctcgttgcagtttgaatagtttcttgggagagagaatctttttgaaacgatttaaatattcgatgtccagtttgtcagactccaaacgggcatgagcgatttcatccacaatttcttcgtattcagcatcggtggtattggggttttttcctttacgtgctttttgccaggctttgtcattgatagcttttttacgatcttgcaattcaaaataaatagggaagaacttaccggcttcttctgctgtcagttctgccttttgagtgaggtatgcctcttgtttggctctaaattcttctttagaaaatcccggtttcttttgtgcctgcacagatagggtgaggcataaaataaatagtagagtagtcagtttttgtatcatttcgactaaagttttaattgtatgtttcagtatcggcctctgtcagatattgataaagtgtgtagtcatccatcatagaatgctccatgatagtttctatatattcgtcagaaaactcggccgcttccgctgctgtaaatataggtgtatcttgtttaggtcgtccgacaaaaactctgacgctcaacatgagtccgcagaacatggctgtcatatatatccatggtttcacacgttgccatgtagtgatgacaggttcggaaagggagatttccttttccggcagtttttccattagttctttagagaagttttcgaaataaccttcgggtactgtaaacggattcttggtcccgcacttcctcagcaattcatcttcttctttcataattcactctcctttctgtcttttagatgcttttaatttgaaaaggtttaaaagcattcttttaaaaaactctctatttttttcactgcatggtgataggaagctttcagagctcctacacttgtacccaatatctcggaaatttcttcatacttcatttcctgaaagtatttcaggttgaagactattcgttgtttgtcgggtagtgtatgcaatgctttttggaatagtctttgggtttcgtctccactgaaataactgtctccttccagtttattcaccatttcggcatcggcttcatcgatggataactggttatttgcacgttgtttgttcaggaaggtaaggcattcatttaaggcgatgcgatagagccacgtagacattttagcttcggcacggaagtagtcaatatttatccaggctttgataaatgtattctgtaacaggtcattggcatcatcgtgcgaaagcaccatacggcgaatctgccagtatagctgctcgctatactgtttcacgatgcattcgaatgcttccctttgtcgtttgggatcttgcaataatgctattatttctttttcattataggtatccatgaaccggttttgtgttttctttatagtgtaaccttcaggttctctttagcaagaagtgtattgggaaatacactccttgcttcctgcaatagaatgttttcatcttcataacgggcggaaaaatgtccgatgagtaactgttttacatctgcgtcgcgagctatttcaccggcttgcatggcagtagtgtgaaatgtctctttggcgcgttgggcatcacattgtgcaaaggttgcttcgtgaaaaagtaaattcacctcttttatttgctctatgatagggcgatggaaaatagtatccgaacaataggcatagctgcggggcggagcaggcggagtagtcagacggttgttagggataacagtaccgtccggcaacacataatcttctccgtttttgatacggttaagttcgaatacgggaactttataaaaatcaatcatatccctgatgatatggttgggtgtcggtttttccgcaaaaaggaatccgcaggtaggaatgcgatgacgcagcgggatactgctgaccgttacggaacggtcttcataaacgacttcggcttttgtggggttaatcagatggaattccacgttgtatgccattcctttgcagaaatattccagttgaggcgtgagtatccgttcgaggtcggcatggcaatgtatatgcagtgtagccgtgcgccccaccagtccgaacgtagagataagtcccatcagtccgaagcaatggtcaccgtgcagatgagatataaatatatggttgagacgcgtaaacttcaatttagagcgacgtaattgtaactgtgctccttctccgcaatctatcataaataacttttcacggatattcacgacttgcgaagaagcaaagtgtcttgttgttggtaatgccgaaccacagcctaatatatgtacttcaaatttttccatcactgcaaagatactatctttttggatgaaaaatataaaaaggttgtaaaaacatatacagctgtcggggttatttcttgtgtttgatttctacggcattcattcctcgtggtccgcgttccagtttgaaagtcactaaatttccgtctgttacctcgtcttgcagaccgcttacatggaaaaagtacttctctgcatttttcaggtttttgatgaagccatatcctttggaagtattgaagaattctactcttccttcatattcggttatcacaggttcatctgttttacgtggagtggaaacttcgatagtgctgatatctatttcctgaggcttttcatttgtagtaggaggagtgtcggttattacaccgttttcgtctacgtatgctatcatatcttcgaaagatgatgtgccgctattcttcctttcttctttcttttgttgttttgctaaacgtttttcttgttttttcttttctaaatctcttttggtaaatgaaattggtttcgccatttgattctttttaaattagtatatacgcggtattatatatgaatactgcattgaattaataaataggtaataagaagacggggagaagtcgttgtgaaatgctagctcgaaattttattacttcataaagatacggttttttatcggatattccataaaagagtttactttttaaggaataatggcataaaaaaaaggatgcaccgattgaggtacatccttttctgcgttattttaaagtaatctgattacttctttttgttttccaactgttctttcaaagcagccaaagcatcgatatcgcccaaagttgtagaagcagcctggttctggatagcaggagtttcttctctcttagtagctttctttgcgttagaagctgctttcttttcagctctttcttctgcttttgcagcatcttcgaaaatacggctgtgagaaaggataattctcttagcatccttattgaattcaattactttgaatgacagtttttcgtccaactgagcctgagaaccgtcttcttttactaagtgtttcggagttgcaaaaccttctacaccgtaaggaagagctactacagcacccttgtccaacatttcgatgatagtaccttcgtgtacagaacctacagtgaatactgtttcgaatacatcccaaggattttcttcgagttgtttgtgaccaaggctcaaacgacggttttctttgtcgatttccaatacctgaacttcgatgtctgcaccgatctgagtgaattcagaaggatgtttcactttcttagtccaagacaagtcagagatgtggatcaatccgtctacaccttcttcgatttctacgaatacaccgaagttagtgaagttacgaacttttgctgtgtgcttagaacctacaggatacttttcttcgatagtttcccatggatcttgtttcaactgtttgatacccaaagacatcttacgttcgtcacggtcaagagtcaggataacagcttctacttcgtcacctaccttcatgaagtcctgagcagaacgcaagtgctgtgaccaagacatttcagatacgtgaatcaaaccttctacgcccggagcgatttcgatgaatgcaccgtagtcagccataacgactactttacctttcaccttgtcacctacctgcaggttagcatccaaagcatc

SEQ ID NO: 6684 - DNA, 47983 bp, Unknown
  gut microbiota DNA sequence
tttattataatgttatatttgcaaatatataatagagaaccattatgttataccattaaatttaaaatactatgaatgatagctcgtaataaatatttgttacctaattgataaatatgttatattatttatgaatttatttagacttaatacttatgaaacacaataggcttttaaatcaattcaattattataaatgcatttataaaaagatagctttgtttacctttgcatttatttcaatcatcgatatttacgcaaaagaaggcgataggctaattactcacactgtcaatcaggcagacaatatagaacaggtagctaaaaaaattaccctaaaaggtaaaattatagatgcaaatacccaagaagcaataataggcgccaatattcaggtcaaaggtagtaatgccggacaaatcagcgatattgacggtaatttcatccttaatgatattgatgccaattcaacattaattgtttcttatatcggatatttacaccaagagattcctattaaaggtaaaaactctcttattattcaattgaaagaggatacacaaactttaaatgatgttgtggtagtcggatttgccaaacagaagaaagcaaatatgacaggtgctgtaagcagtgtaaagatggatgatattattggagttcgtcccattgcaacaacaggaagtttgttacaaggagtagctccagggcttcaagtaacccaagataccggtgaaccaggtggtggtagctcgttcaatattagaggtactaccagtattaatggaggctctccacttattttggtagataacgtttattataatggaccactaaatatgttgaatcctaatgatatagagtctgttacagtgttaaaggatgcttcctcggcttctatttatggtgctcgctctgcttttggtgttatattaattacgaccaaaggtgctcagaagggccaaaaagtacaactaacatataataataattttactttttctcgtccgagttctcttccggaaaaagcttctccacttcaaaccgtacaagcttataaagatatgggctatattacctattactcgggtcaaaccgtagatacatggttggatttactgcacgattatcaagcaaatccaaaagcttattccaacggatatgctgaagttgacggaatgagatatcaacttgctgaaagtgatgttttaggagattttatgtccgaaacaggttttcaacagaagcatgatttgacagccagtggtggctctgacgatatatcttatcggatgtcattgggatatgtatctaatgatggtattatggttacagatagggataactataaacgatataatgggcgtgccttcatcagtgggaaaatcactgattggttaactgcacaagtagattttacttttagcaaacaagataagaacatgcctagtggagcaaactatcaaaaagcagtacagcaggcttcgtatgctccaaccggtatgattaatattaatggtgaagatatgatttcaggagtagctgccaatttggtaaaagctggaggtgacaataagaccggttatacagattcacgtatttttgccaaattaattgctactccattaaaaggactgactttaaatgctgaatttacttatgaccacctgaattataatgttaccaattttaccaagcgggttgtatacgccaatgccgataagttctcagaagattccacaggagacaattctacatattataggaataaagagatgacaaattatacggctttgaacatctatggaacatataataaagtattttcagaaaagcataattttacagtaatgttgggatataatctggagaacagctataaagaagggctttctgtaacggctagtgaaatgattaacgatgaattaccctctatttcccagtctgttggagaaaaaaaaccggatgatagtttcaatgagttttctattcttggtttttttggacgtctgaactatacttataaggagcgttatcttttagaacttagtggtcgtgcagatgcctcctctaaatttccgagaggaagccgttgggggttctttccttcagcatctgttggttggagaattatggaagaaccttttatggaatcattaagagaatatattccagagttcaaaattagagcatcctatggtgaagtcggcaatcaaaatattagtgcatatgcatttatacccagtatggggtcttacaggtcttcttggttacatgataatcaacaacctattacactttattctcccgatattgtcagtaacagttttacttgggagcgtgtacaaagtttcaatataggatttgacctttcattgctgaataaccgattaagtgctaactttgattatttctgtcgatacactaaagacatgttgactgatggtgtggaattgcccaatgttttaggtacaggcgctcccctacaaaatgtggcaaatttaaaatccaaaggttttgaattggaaatgaattggagggatcgtattggagatattgcttacagcatcggctttaatctttacgattacaagtcattcattaccaaatttgacaatgaggcagggctgatcagcagccattataagggtgaacgcttaggctccatttggggatatgttacagaccgttattatacagttgatgactttattgaaggttcgcttgatgcagatcttaaaaacggcaagctaaaagaggggattcctcatgtagaaggaattaaacctaatcctggtgatatcttatataaagatcttgatgggaatggtattattaatgccgggaagagtactttagatgatcctggagatcgtactataatcggtaataatcagttgcgtttacaatatggagtgaatggtagtataaattggaaaggaatagggttttcttttatgcttcaaggagtaggcaaaaccgataaatatttatcccatgatttagcctttccctattattatgaatttggaactatctataagcatcaattggactattggacacctcaaaacacaaactgcgagtttccaagactttatcaaacaggtacacgtaattcaaattattctgcaaacatccgtacgcagaccaaatatctgacaaatggcgcttatatgagagtaaagaacttgacattagcatatacattttctaacgagttaattaaacattttggaattagcaacctgcgtatttatgcaacaggtgagaatctatttacttttgatcatttgcctaaaggtttagatcccactttatccaataagggaggtggtatgggatatccatttatgaaatcttactcttttggtcttagtataaccttataatttttaaagaattgagattatgaaaattagtaaacatattgtatcagcttcactggttatcttgtttagcacaactggctgtaatgacttccttgataaggctcctcttgatgagttgacggaaagcaccgctttcattacttatgacaattttaaaacttattcttggaaactgtatgaaacctttagcggctttccaacagatggtggttacactccctccaacatttccagcgaatataattcggataacatgattaatgcacaaaccggtggagaatcagattatgcctatcaactgaaatctgtaccatccactagtagttcatggaatttctcttatattcgtaatgttaatattatgttgcagaatattgataaatcctcaatgaatgatacggaaaaaaggcattggcgaagtgttggatatttttttcgtgctttaagatattttgatatgatagtggcttatggggatgttccttggatagataaagttctttctgatactgatttggaagctttacaggctccacggactccacgagctcaagtagcccaaaatatgctggaagacttaaaatatgcagaagaaaatattaagcctgatggtgatggaaataatacaattaatgtacatgtagtaagagcgctaatttcacgttttgggctttatgaaggaacatggcgaaaatatcataatcaagaagatgcagaaacttatcttcgtgtttctgcggaagcttcagccaagttagtgaaagattttcctactttgatcagcaattatgatgaaatatttaattcggaagaacttgtgggacaacccggtatcatattagccaaacaatatgcaacagacttggttactcatagtatcactcgtgttatccgttcatctgcttggtatgctgatgttacaaaagatgcagtagacagttacttgtgtacagacggacgtcctattagtacaagcaaagtatatgaaggagataaagacatttatgctcaattccgtaatcgcgatcgtcgtttgtattatactgtaacacctccttataaagtgaaaataaccggaagtgccggtacttcgtttacttgggattatacagacaattccaaagatcgcgaatatattgatttgatgaaaactatatcttcagaaaaagctaagtaccttcctatatctaattatgtaggctataccgtacatgcaattccacattttcgtaattaccctaatggtcaaggattttgtgtatcgcaattaggattctatttttggaagtactataaccgtcatgtagacaatatgggactacgcacttctaccgttgattatccgcttttccgcatgggagaaatacttgtgaattatgctgaagctgcatacgaattaggagaattcagccaaaacatagcggatgctactatcaataggcttcgtaaacgtgctaacttacctgatatgatagttgcagaaataaccgatagctttgatcctgctcgtgatcaatcggttcctgcaatattatgggaaatacggagagagcgtcgagtagaattaatgggagatggttttcgtttccgagatctaaaacgatggaaaaaaggagaatatctcaataaacagcctcttggagtatgggcaaaaaatagtgattacaaaaataaacttaaaattcatggaggaggtaacgaaggttatgttgagtttttcaatgaacctgatggatggttggaatattattatttggaaccgctacctactcaagagttggctttgaatcctaacctggtccaaaatccgggatgggaaaataatggtaaaaatagataaacattaagagcctgtttaaattttcctcaataataatcttatagtggctagtttaaccattttctctgccgaatcgaatgttagttcatagtttcggcagagtcttctattgtagggacatttactggatatccctaatgaatattcctaattatacctatcaattgagtacgtttatttgcgactgttcttatggaagtggtcttttgtcttttacggttttattgaatagataagttttgtagtcctttattagcctccaattgatatcctcaaaactgattggccatttacctatatcttttagaaattcttggaaggactccaattgtcctatgtatatttctttggtggaggttccttgcagtttccactatcctttattgttttgtcttttgctatggcatcgcgtaacccaaatacagcatttatttttttacttttttcatataacgttcattatatatacttctttaataacttccagcagttttcaatctcgtcaagattatcacaaagatacgatttaagctccttaaactgttttcaagttcggatattttttcattaactatggtattattctgattatccagttctgtcagacgacaacttatatatgctttttgttttctgatgttccattgatcggtcgggatctacttttactccggtagccggttgtacctgtttcttgttcatgtgtaccaccatataaatgttagttgatttttcactttggggttgacgaaggttaaaacaggctttcatcaattcatgaataaacacttgttctttgggagtaaaacattgtctatacgccttttggaaagctttctatagatatctctagaaacgtttggtatactgttgcaaaatcattaaatttgcaattaaaatgacgagaattatggatgcagagacccgtttgaaaatagaagaaagaataatagcgatgttgaagaccgtatacgaccccgaaattccggtgaatatatacgatttaggattaatttataagattgacctgcaagacgatggagatgtaagtattgatatgacgcttaccgctcccaattgtcccgctgccgattttattatggaagatgtgcgtcaaaaggtggattcggtagaaggggtaaattcttctgttattaatttggtattcgaacccgaatgggataaagacatgatgagtgaagaagcaaaacttgaattaggattcctttaagattatgaagaatatatatttcctttcagatgcacatttgggatcgcgtgcaatagcgcatggacggacacaggaacgtcgattggtgaattttttggatagtatcaagcataatgccgcagcagtgtatctattgggagatatgttcgatttttggtatgaatttaagttagtagtaccgaaaggttatactcgcttcttgggaaaaatttccgaactgactgatatgggggtggaagttcacttttttattggaaatcatgatatctggtgtggcgattatctggaaaaagaatgtggtgtgaccattcatcgtcagccgcttacttgcgaaatttatggtaaagagttctttcttgcccatggtgatgggttgggggatggtgaccgtaagtttaagttgttacgctctatgttccatagcaccactttacaacgtttgttttctactttacatcctcgttggagtgtggaactgggactggagtgggcgaaacatagtcgtatgaaacgtgaaggaggtaaggaacctgaatatatgggagagaacaaagagcctttagtgctttttaccaaagaatatcttaggagtcatcctgatattaattattttatttatggtcatcgccatatcatgtttgatttgatgttgagtcgcacttcgcgtatgcttatcttaggagactggatacaggatttctcttatgccgtttttgacggtgaaaacatgttccttgaacagtttatagaaggagaaagtcagtattcttgatttctgtggaatattctacacaattatgaatcaaatgtatgaggaattggggtagcttatgcttatctttgtactatcatcattgaatggtgaccttgattgaatattataaaacctttttaatttataccatgaagaaaatctttctattactaattgtattctttacttgttttcaagtgagtgcagaagaccggaaaacaattcgtgtgtcgaccgataatacggatttaatcttgaaagtagctcccaacggacgtttgtatcagtcttatttaggcagtaaactgctgaatgaacaagatattgtcagtcttccgtctgcttctggcggggatgcttcggccaatggctgggaagtatatgccggttcgggagctgaagattattttgaacctgccgttgccattactcacaatgacggaaatccatgtactatattgcgttatgtttcttctgaaagtaaggcagtagatggaggcacagagacaataattcgcttgcgtgatgaccagtatcctgtagatgtaaccttatattatatagcttaccctaaggaagatgtcataaagacttggagtgagatcagtcatcaggaaaaaaagccggtgatgctttcacgttattcgtctactatgttatatttctcggcggaaaagtatttcttgacagagttcagtagtgattgggccaaagaggtacagatgagtacacaagagttgcaattcgggaaaaagattctggatactaagttgggtagccgcgctgctatgtttgttcagcctttctttgagttgggctttgaccgacctgctaatgagcatcagggagatgtgctgttgggaactatcggttggaccggaaatttccgctttacgtttgaagtcgataacgaaggtaatttgagggtgattcctgccatcaatccttatgcttcttattatgaattggctccgaaggatgttttcaaaactccggaattcatcttcacactgagcaaggaaggaacaggaaaggcgagccggaacattcatgcatgggcgcgtaattatcagttgaaagatggtaagggcgatcgtatgacactgctcaataactgggaaaataccggtttcaagtttgatgagaaagtattggtggaactgatgaaggaagccaaacatttgggtgtggatatgttcttgctggatgacggttggtttgccaataagtatcctcgtaacaatgaccacaccggtttgggagattgggaggctacaaaaagcaagttgcctaatggagtgcctgcattggtggctgccgctaaagaagccggtgtgaagtttggaatttggattgagccggaaatgataagtccgaagagtgagctctttgagaagcatcccgaatgggctatccatctgcctaatcgtgaaacgtactattaccgtaatcaactggtgcttgatttaagcaatccgaaagtgcaggattttgtatttggtgtagtggataatatcatgacagagaatccggatgtggctttctttaagtgggattgcaacagccctattacaaatgtttattctccttatttgaaagagaaacaaagtcagctttatatcaaccatgtgcgtggcgtttataatgtcttggaaagagtgaaggccaagtatcctaatgtgccgatgatgctgtgctcgggtggtggtgcacgctgcgactatgaggcactaaaatatttcactgaattttggtgtagtgataataccgaccctatcgaacgtttgtatatccaatggggattctcacaattcttcccggctaaggcaatgtgtgctcatgtcactagctggaatagtaaaaccagtgtgaagttccgtactgatgtggcttctatgtgtaaactcggtttcgatatgggcttgaaagaattgagtgaagatgaactggcctactgccagaatgcagttgccaattttaaccgtttgaagcctgttattctggatggagagctttatcgcttgatttctccatacgaaggcaatcacatgtctgtgatgtatgtgggtgaagggcagaaaaaggcagtgctttatgcttatgatattcatcctcgttttggcgagaaactgttgcctgtaaaattgcagggattggatccgatgaagatgtataaggtggaagagattaatttgatgcccggaaagaaatcaagactggaggcaaatggtaagactttctcaggagattatctgatgaaggtcggactgaatgtattcaccggcggacaggcacaaagtcgtgtagttgagcttgttgctcaataaaggatattgggaaaaaaggaaggccgttacgcatctcgcgcagcggccttcgatatttatttaaccaaacaataaaattacttattcaaaatagcttgtgtatcgctggcaatcatcaattcctcatctgtcgggataattactaccttgacttttgattcgggggtagagatgatagcttcgtcaccatgaatcttgttgttcatttctttatccaattctacaccgatgaattgtaaaccgtcacatacggcttcacggcattgtgattggttctcacctacaccgccggtaaataagataacatctacaccacccatggcagcagcataagctccgatatacttcttgatgcgataataatacatcttttctgccagcagagcacgcggatttccttctttgcaagctgcatccaattcacgcatatcgctggatacgcctgatatgccaagtactccactcttcttgttcagtaaattagaaacacctgtcggagtcaaaccttctttttccataatgaaagtaacggcgcctgcatcaatgtcaccgctgcgggttcccattacaagaccttcaagcggagtaagtcccatgctggtatctacacatttaccatccttgacagctgagatagaaccaccgttaccaatgtggcaagtgatgattttagaaccttcgggattgattcccaagaaatcgcatacgcgctttgaaacatagcgatgagaggttccgtggaagccgtaacgacgtacaccgtatttttcatacagttcgtatgggatggcatacatatatgcatagtcaggcattgtttgatggaacgctgtatcgaatacacctacctgaggtatattgggtaaaatagcagaaacagcattgacacctttcaagttagccgggttatggagtggagcaaggtcgttgcaagcggcaaatgcatccaatacttctttatccagttttactgattcgctgaaacgttccccaccgtgtaccatgcggtgacctactgcattgatttcttccagagacttgattgcgccatattcagggctaaccaatgtgttcaggataaattcgatacctgcagtatgttcagggatatctttttccagaatcttcttttcgccattaggcaaagtcagcttcaggaaagaacctactaatccgattttttcaataccaccctgtgccaggatttctttggtagtcatatcaaataacttgtatttgatggaagaactaccgcaattaagcactaatattttcataatgttgtttcttctttattatattaattgtttgctttggcagcaatagcctgattagcagtaattgcaatcattttataaacatcatcgatagagcatccgcgagacaagtcgttcaccggacgggcgataccttgcagaatcggaccgatagctgtagcgtgtcccaggcgttctaccagtttataagaaatgttacctacttccaaacaaggaactaccagaacattggcttttcccgcaatttccgaacccggagctttgcttgcgccaatatgtggaaccagggctgcatcagcttgcagttcaccgtcgattttcaaatcgggggccatttctttggcaatactcaaggcttcaactactttgtctactacttcatgtttggcagaacctttggttgagaaactcagcagggcaacacgcggatcaatacctgcaactgctttggcggtttgggcggtacaaacagcaatctgtgctaattggttggcatccggcatcggggttactgcaacgtcacccatcaccaaaacgccattatttccgtattcgggagcgtgagtcaacagcagcatggcacctgatacacaggtaatgcccggtacagtcttgataatctgtaatgcagggcgaagtacgttaccggtggtgttgcgggcacctgccaattgtccatcggcatctccggctttaattatcaaacatcccaaatacaatgggtcgactaccagtttacgggcttcttcgatagtcataccttttttcttacgaagttcgcacagcagttgtgcgtattcttctttcttagggtgattttcggggtcgatgatagtggctttaccgatgtttcccaaaccccattctttagccaggctcatgatttcatcgggattacccaataaaataaggtcggcaacaccgtctgtcaatatttggttggcagcttttaatgtacgttcttctgttccttcagggagaacaatgcgctgtttgtttgctttcgcgcgctctacgatttcagatattaaatccatgatatatattaattatgtacgttctaaagacgagtgttgtttttcacggtgcaaaattaggtaattttgcaatatctacattgcaaaatctatattatttttggtttaaagtatgcaaaaaacgtatgttattgaacaccaaacaggatgtttccttaactttgcgcagttttcaataagttttcattaaattcataaggtatgatacgtcaatgcgccatccttttcggatgtttggctttgggtgaactgattgtttttctgacaggcattaagttgccttccagtatcatagggatgctgcttctcaccctttttttgaagttgggttggataaagctgcaatgggtgcagggattgtccgactttttagttgctaatcttggcttcttttttgtgccacccggtgtggcgctgatgctttattttgatgtgattgcggcacagttttggccgattgtgattgctaccttagtcagtacagttctggtgcttgtagtcaccggatgggttcatcaattagttcgtaaatcaaatggaatatttagaaaataagttcttcttgttggcggttactttcggagtattctttctgtcacgtatcgttcagaagaagacaggctgggttattttgaaccctatattgcttaccattgccgtgcttattctgtttttgaaatttgcaggcatcagttatgaaacttataatgaaggcggacagcttatcgaattttggctgaagccggcggtagtggcattgggcgttcctttatatttgcagttggagatgataaagaagcagttgttgccaattatcatttcgcagttggcaggatgtttggtaggattggtgactgtggtcgtcattgccaagctgttgggagctacacctgatatcatctgttcgttggctccgaagtcggttactactcctattgcaatggaggtgtcgaaagctaccggaggaattccttcattgacggcggctgtcgttgtggttgtgggattatttggagcggtgttcggctttaaggtgttgcgtgtgggacatgtaggaagtcccattgctcaaggtttgtccatgggaacggctactcatgcagtgggaacatctacggcaatggaaatcagtggaaaatatggagcttatgccagtctgggattgacattgaacgggataatgacagccgttttcactccaacaatccttaaattattgggtgtaatttaacaaaaatgcctctatctttgttattaaagaaacaaacattttatgatagaattcaaagacattactttagcggataaagagctgatacagtcgtttacacttaacagccaacgtcgcaattgcgacttgtcgtttgccaacctttgtagttggacattcttataccagaccaagtatgccgttttggacggttatctgttgcttcgcttttatgccggtgaagagctagcctacatgatgccggtaggaacaggagacgtaaaaccggtgctggaggcactgattgaggatgcagaagcgttgggggcaaagttccgtatgctgggggtatgtgtagggatgaaagcagaccttgaagcagtgatgccggggcgtttcacctttaccgaagatcgtgactatttcgactatctttatctgcgcactgacctggctgccttgaaaggtaaaaagtatcagtctaaacgtaatcatattaacaagttcaagaagcagtatcccgattatgagtacaggcttctgactcccgagcttgttcccgaatgcctgaaaatggaagaagaatggtgtcgtgccaataattgcgatgaacaaatggctttgggggccgaacggcggtccatgacctttgcccttcatcacatggaagagttgggcttgaccggaggagtgttacatgtgaatggaaagatagccgcatttacatatggggcccccatcaactatcagacatgggacacttgtgtggagaaagcgaataccgatatcgaaggttcttatgccatgataaactatgagtatgccaatcatatcggtgaacagtatatgtatatcaatcgcgaggaggatcttggactggaggggctgcgtaaggcgaagctttcttatcagccgactatcttgctcgaaaaatgtatagccgaactcaatgaccacaaaggatgaagtaaaagcattgtggaaactctgtttcacggatagtgatgagtttaccgacttgtatttcgacctgagatataaagatgatatcaatatggctgtgcgtgaagatggaaaaatcatttctgctttacaaatgatttcctacccgatgactttttgcggggagacgattgctacttcttacgtttccggtgcgtgcacccatcccgattacaggtcgcatggagccatgcggcgattgttgaggctgacgcatcgtcgcatgtatgatgacggcattctgctcagcactcttataccggcagagaaatggttgtttggctattatgcaaagtcgggatatactccgcgattcggttatgtgatggaaagggtaaacgtagaaaaacttatcccttccggttcttatagggtggaagaggaggatgaggcttcagccgaactgtatcagtatttcgacaatcgtatgcgcgagcgtgcctgctgtatgttgcatagttatgaggattttctggttatcatggcggacttacgactgggagggggtaaggtgcttgtggcacgccgggcggatcggatggcagggatggcttttgtggtaatggatgccggaagcttatatattaaggagttattggcagatggtattcccggacagacaggttttgaggcggtcaaagataccttgttgtcggcagctgcaaccctataccccggagctgtcatcgagtatattcatccttcttccggggattcgtccacgttgggaatggcgcgtttgattcatgtggaaaagatgctgtccatacttgcaaggaaacacccggtgctgagtctgtccattcaaatagaagacgatgatgctattcctgagaataatggttactatattgtggaaaacggtaattgttatcgtgaatatcgggaaggaagagaatatcatctttatacgatagaaagcctgacagccaagtcttttgaaacggaacatccttatatgagtttgatgctcaactgaagaaatgcgaataaaaatttcaaagttactatatgagactgtccaagaagattattgtattatcttttgttctgtcattcagaatgtagtgaagaacagcatattaatgaatgtattcagatttcttattttgtccggaaggagaaaataagaaattagctgaacattttggacagtctcatatacagtgaataatttttatttaggtatatcctcctgatatagtatatgaactactttaaagcaactcttgcagtggggcgagtttcatgctgttcgaaccctttatgagaatatagaatcctttcggcttagactttttcaggacttctgataattgacgggcatcctgataatgttcgtaagaggaggtcgcttgtccgaactcttctccaaccaagattacgcgctcaaatttacattcatctatgtaactgactattttttgatgttcttcatgactactctttcccaattctttcatatcgcctagaatgaccatcttatgcagcacttccatccggcggaaattctccaatgccgccatcatgctggtagggttggcgttgtaggcatccactatcagattattgtcggcagttggggtaagctgcgagcgattgttgtgtggaatatattcttccagtgcttttgaaatatcttcttctgatacattgaaaaaacgtccgatggcgatggcggcaagggcatttttaaggttataagagcctatcaggtgggtgcttaccttatgtcgtctgtcttcgtgcctccactcgaaagtgaggaatggggcacatattcctgccttgccgctaacatagagttccgcttcgttttctgtgccgtaggtgatacaggtcagcccttttgaaatcttattaagatgctcattatccctatcgatgaaaatggtgtgttcacctccgtaacgtaaatgttcgtataactctcctttggtttttatcactccttcaaaagagccgaacccttcaaggtgtgccttgcccacattggtgataataccgtaatcgggctcaacgatggcagagagcgttttgatttcacccggatggtttgctcccatttctatcacggcaagctcgtcatcgggagtgaggcgtagcagtgtgagtggcacgccgatgtggttgttcagattgcccaatgtataaagtatccggtattttttttgaagtacggcggctatcagttctttggtggtggtctttccgttggtaccggtgatgcctataatgcgggtatctaacgtacggcgatggaagttggccaactcctgtaaggttctcaggcagttgtcaaccaaaaggatatgcgggttttcaccggcgtattgttcttcgtccactaccgcatatcggcaacctttctccagcgcttgtgcagcgaaggcgttcccattgaatgtctctcccttcaaggctatgaacatggagccttcaggacagttacggctgtcggtggttactccactgcattccgtaaagcatttatataaagttgaaatatccattataccttctattaatattagttgcggcaaagatagctgaaaaatagttcaggaaataacaaaaactcaagaattgtgcgtacttttgtacgacataaataacacttcgtagagatgatgaacaaagagagtaaatacattaatgtaaaggggcagttgatggatctgtcggagcctcgggtaatggggattctgaatgtaacacccgattccttttacagtgaaagccgtctccagacagtggaaaagattgctgcacgtgtggtggaaatagtaaatgagggtgctgactttattgatatcggtgcatactcctctcgtccgaatgccgaccatgtttcattggaagaagaaatgaatcgcctgcggatgggacttgaagtgattactgatgtgtgtccttcgattcccatttcggtagacactttccgggcagatgcagcacggatgtgtgtggaagaatatggcgcagccctcattaatgatatctcggcaggagagatggattccgagatgttttctactgtggccgggctgggtgttccttacattatcatgcacatgaagggtactccgcaaaccatgcagcaggctccgcattatgataatttgatgaaggaaatattccggtattttgcacggaagatacatcagttatatgagttgggtgtgaaagaccttattcttgatcccggttttggttttggtaagacactggaacacaactacgggctcatgggatgtttggaagattttgctctttttgaccttccggtattggtggggatatcgcgcaagtcgatgatttacaaacttctggacggtactcccgaaaatgcgctgaacggcacgaccgtactcaataccattgcgctcatgaagggcgctgacattttgagggtacacgatgtgaaggaggctgtggaagctgtgcggattgtgcgacagatgaagtcctgtgctatcgactgttaatagtataatcttgaataataatatagcgaaagatgtttatcgactttagtataaaagaccttattgatatcctgctggtggcttacttgctatatcagacttatcggctgatgaaggattcgggttcaatcaacatttttacggggattctggttttcatcggcatttggctgattgtgtcacaagttcttgagatgaagcttttgggctctatctttgataagttggtaagcgtaggtgtgctggctctgattattttatttcaggatgagttgcgccgttttcttgttacgctgggttcgcataagcgcttgggcagttttttccgctttctgacgggaaataagcaggagaagaccgagaaggcggacattatgccgatagtacttgcctgtatgagcatgagtaaaggcaaggtaggggcgttgattgtcatcgaaaagagtatgccgctgaatgatattatccgtacgggtgagattattaatgccaatgtcaatcaaaggttgattgaaaatatatttttcaagaacagtccgttgcacgatggggcaatgattatacgtcacaaacgcattgaggcggccggttgtattcttccggtgtctcatgatttgaatattcccaaagagttgggattacggcatcgtgcagccatgggggtgtcgcaggagacggatgcgctggccataatcgtatccgaagagaccgggggtatttcggtagcttataagggacaattccatctccgacttactgcagaggagttggaacgtattttaacgaaagaagagtagaatttgaccaaacagatttatcatgctttggctgctactgttgagcgaactcatgtgtctgtccaatagcaggaagcagaaaaccatgtttcacatatatcagtgggttaatgctttgctttacaataacttgatgtgaaacgagaacttttcgtttacggtaaatgcctgtttgggggttgtggaaaatgattagctttacatccatgagaaaagaacgtattttgcgttgttggggtattatccttccggttgcattattaatttatatcatgctctgccgcttccttcccggttgcgcacgcggatatgccgattatgtctatccgaatgtatcctttgttttgtcggctgtttcgtccgtaattcctgtttcttgggaggagataatggctgtagttgtggtgtctctgatgatatttattccggtcatggcgcgcaggcgtggagaggggtggctcgttattttccgacgtttgactttgttggtattgtggataatcatctggttttatatggcatggggattgaattacttccgtccgagtctttatgcacgttgtaatttgagacctgtggaatatgaagaagaggtattcatgaaatttttggatgtctacacagagggactgaacgcttcatttacgcatgacaccggtatagaaaaagaggaggtggagactatcgtcaagagaaactatgccggtctttcctcttgttatgggttggcccgtccgcaaccgtggcagcatatcaagcattttggatttaccccgctatattcgagcgtgggcgtattgggtgccatgggaccgttttttgccgaggcacaagtgaatgaagacgtactccccgaacaatatccctttacgatggcacatgagtttgctcatttgctgggagtgggcagtgaggcagaggcaaattattttgctttcctcgtctgtatgcagtcggactccgatgcaatgagatacagcggatacttcagcctgttgccctatgtggcggtcagtgccaggaagttattatccgatgacagatttcaggagtggggaaaaacagtccgtccggaaatatggcaggattatgaggtgaagcaggagtattggagtgagaagtatagtcctctacttggcggaatgcaggattttgcttataatcttttcctgaaagggaaccgtgtctcggaaggaaagaaaaattatggtcgggtggtagagcttctcatcgccgcttcatataatcgggagaaaggagagtttgaggattggggacgtgaagtatctgttgctcttccgtaacggttgcttttcttttttccggctgtcgatgggttggtcgccgggactttacttattggcttaattcccggaaagtaaatttttcagttcttttcaatgatatttcttgtttatatggctgcttttttctatctttatcccatcttgataggatataattttaagattataaacaagatacgtaagtgttatactgatgcttagctgtaaagacagcaatttgtataataaaaattttttgttgatgagaaaaactgattaagccgtctcggatagcgttccggggcggctgaattgtaaaatgaccaatttttattctttaacgaccgggtattagtctttcgttctccgtaaaactcattatatttgtatccgtaaataaaaaacatatctactatgaatagcatgaataagattctttcgactgttatccttctgggattcattttactgtgcggttgtaatacacagccgtctcccatccgttcgggagaattgtggcctgataataatggggaacatatcaatgcccatggcggcggagtgatgtatcatgacggtacttactattggttcggcgagaataaatgcgatactaccagcagtgccatggtaggagtgatgtgttactcatcgcagaatcttaccgattggaaaaatgaaggtgtggcacttgcggtagaagacaatgacagcagtgacattacacgcggctgtatcctcgaacgacctaaagtggtatataatgcaaagaccgggaagtttgtgatgtggtttcatcttgaactgaaaggtaagggctatgaagcggcacgttcgggtgtggcagtgagtgacactcctacaggaccttatcgctttatccgttccggtcgtgtcaatgccggaaaacttccctttgatatggatgaacaggcacaggcaacaatggatacgctgaatgctttgcactatgccaaatggtggactccgcagtgggtggacgccgttggcaagggacttatcttgaaacgcgatttcgaaggtggacagatggcaagagatatgacagtgtatgtggatgatgatggtaaggcttatcatatttttgcttcagaagaaaatctgacactgcacattgccgagttgagtgacgactacctttcgcataccggaaaatatgtgcgtgtggcgcctgccggacagaatgaggctcctgctatctttaaaaaggacggtatgtactggatgataacttccggttgcaccggctgggcgcccaatgaagcgcgaatgttctctgctccatccatttggggaccgtggacacagcatcccaatccctgtgtgggaccgaacagagagattactttcggtggccaaagcacgtatattctgaaagtcgagggacgaaaggattgctttatctttatgggagacatttggcgtcccgaacatccgagtgatgcccgatatatttggttgcctattcagtttaaggatggtgtaccggtggtggaatggaaggacagttggacattggattgaaagagttttctatttgaccgaatccggttctttgtcatgatgagagtggaaaaaacattaaaaagaataattgttatatgaagaaattactgactttgttattggcggtgctcctgttggcaggatgtgccggcaataagcccggcacatttgaagccggaaagaatactttcctgttgaacggcaaaccttttattgttaaggctgccgaggttcattatccgcgtattccgcgtgaatattgggagcaccgcattgaaatgtgtaaggcattgggcatgaatacactttgtctttatgtcttttggaacttgcatgaagagacacccggaaattatgattttacgggcaataaagatattgctgctttttgtaagctggcgcagaagcatggtatgtatgtcatcgtccgccccggtccgtatgtgtgtgccgaatgggaaatgggcggtcttccctggtggttgttgaagaacgacagtgtggagttgcgcactctagatccgtattatatggaacgtgtcggtatgtttatgcatgaagtgggcaagcagttggaagacttgcaaatcactcggggcggaaatattatcatggtacaggtggaaaacgaatacggctcttatgcaacagataaaccttatgtatctgctatccgcgatacagtccgtgcggccggattcactgaagtccctcttttccagtgcgattggagttctaattttctcaataatggtcttgatgacctgatttggactgtcaacttcggaaccggagccaacatcgacaaacaatttgccaagttgcgtgaagtgcgtcccgaaactccgttgatgtgcagtgagttttggagtggatggttcgaccattggggacgcaagcatgagacccgtcccggagaagtgatggtggaaggtttgaaagaaatgcttgataagggtatttcgttcagtttgtatatgactcatggcggtactactttcggctggtggggtggtgccaataatccggcatattcggccatgtgcagcagctatgactatgatgctcccatcagtgaagcaggttggacgaccgacaaatactttgctcttcgcgatatgctgaagaattatttgcaagagggtgaaaaactgcccgatgtgcctcaagcacttcctgttatggaggtacctgccatcaagtttacacagattgctccgttaatcaacaatctcccgacaccgaaacagaccgaagatatcaaaccgatggagaaattcgatcagggctggggaaccattctttaccgcactagcctgccggaggaagtgaaagcgggaacaatattgagaattacggaacagcatgactggacacaagtctttgccgacggtaaattgctggcgcgtctcgaccgccgtgccggtgagcaggaagtggttctgcccgctctgaaagcaggcacacagcttgacctgctggtagaagcgatgggacgtgtgaatttcgataagtctatccacgaccgtaagggtattaccgaaaaggtggaactcgtcaatggcaaagatatagaagcactgaagaactggactgtctataacttcccggtaaactatgactttgtggctgacaagaattatcaggatatgaattcttctgctttctgcgggatagagaaaaacgacgagtctgtgcctgcctattaccgtgctacctttaccttggacaaggtggcggatactttcttcaatatggaatcgtggggaaaaggtatggtatgggtaaacggtcatgcgatgggacgtttttgggaaatcggtccccaacagacactctatatgccgggatgctggcttaagaagggagtgaatgagattattgttcttgatttgaaaggaccacgggaggcaacggttaccggtttggataaaccgattttggatatgcttcgggtaacggttcccgagactcatcggaaagaaggacaaaacctgaaattgacgaatgagacacctgtagcttccggcagctttaatcaaggtaacggttggcaagaggtaaaaatacccgctgctcaaggacgttatttctgtctggaaggtttgtcttctttcgacggaacaaatgtagcggcagtagctgaatttgatgtcttggatgaaaaggggcagaagattccgcgcgaaaactggaagattgtatatgccgacagcgaggaaactcgtagcggtaaccgtacagccgataaaatttatgatttgcaggaaagtactttctggcaaacggtagataatgtggcctatcctcatcaggtggtgattgacttgggcaaggaatataaggtaaccggcttccgtattcttccgcgtgcagaacagggagctccgggtatgattaaagattataaagtttatgtgaaaaccgggaatttcagttattaaattagtttttatattgaatgaaaatcctacataccgctgactggcatttaggtcagactttttatgaatacagccgttatgatgagcatgttcgtttccttgactggttacgcaggcaaatcaaagaacgtaagattgatgtactcctcgttgccggagatatatttgacgggccgaacccttccgcagaatctcaacggctgtattactcttttctccgccgggtgacagccgagtgtccggcactgcaaattattatcattgccggcaatcatgattcggcagcccgcctggaagcgccgaacccgttgctggaggagatgaacatcaccgttagaggggtggtgaagcgggatgcggacggcgacatagacttggcacatctcattataccgatttataagcccggtgccggacgttcgcaagcagatataaatataaatgatatagctgcattctgccttgccgttccttatttgcggcaaggagattatccgcctgccgaaaactatgcgcaaggtgttcagactctctatcggcaactttttgcagaactgagggatgaaggcaaacctgttattgccatgggacatctgcaggcgacaggctcggaaatatccgatgatgaccgttccgaacgtaccgttatcggcggtgtggagggtatttcgcccgatgcttttgatgcgcagattatttatacggctttggggcatcttcatcgtccgcaacgagtgtccgggcgagagaatgtacgttattcgggagctcctattcctatgtctttctccgaaaaaggttacagaagcagtgtggtgatgctggagtatgaagaagataaaacgcagatacatcaaattgatgtgccgccttatgtccgcttattaagcatccccgaccgacctgcggtgttggaggaagtcttggaagcgattcatgaattgcctgatggggaaataaatgcgcgttcgccttatctggaagtgaaaatacagatgacggagcccgatacttcttataaatacaaaatagaatcggctctgcagggtaaatcggtgaggttggcgcgtgtggtggcggtaatgcctgtccaaaaggagagtggtctccgggcggtaagttatgaagagctgcggggaattcgtccgctggacgtggcactcgactattataaaaggaaatatgacgagcaggagatgcccgcagcaatgaaagagttattgcaggaagtcatcagtgaggccggtaaagagtaattaagacaacagttcattatgaagatattagcaatacgcggaaagaatcttgcttctttggcaggagagtttgaggtcgattttacagtcgaaccgttgaaaaatgccggcatctttgccattacaggcagtaccggttccggtaagtctactttgctggatgctttgtgtcttgcgctgttcgattctactccgcgtatgaccaaagcaagagaatcgaaagtggaactggccgatgtccgcaataagacgattgctcaaagtgacagtcgttctgttttgcgtcgaggaacagccgaggggtatgccgaagtggacttcatagctttgacaggagagacatatcgttctacttggacagcctgtcgtgccggaggaaagccttcgggtattttgcgcagtgtcggttttcgcttgatgaatctttccaaaaatactgaagagcagggcacgaggaaggaacttcttgctaaggtatccaagctcatcggtctgtctttcgaacaattcaatcggtctgttttgttggcgcagggtgactttgctgtttttctgaaagctaaacaggcggataaagccgagattttggaaaagttgacggggacagagatttattctcgtgtttcttcgtccatttatgccaagaccaagagtgcggatatggagtttcgtcttttgcaggagcgtatgaaaggaatagagctgttgtccgatgatgcattggctgcattggatggagagaagcttctgctttccggctctcttgccgctttgaagagcgaggaagataaactctccgcctgtttgaagtgggtggaagaggaacgttcgctcactcgtaacaaagagcaggctgagaatgagttgaaggaaatacggattgagatggagaagtctgctgcacgttatgcattattggcgcgtgtggaacaggcgcaggaaatccgtgatgtctttatgcaggcagtcgctacttcgggacaactgaatgcaaacaggaaaatgctggcggaacgtcaggaacaagtcaggcaaactgctgtacttttctctaaaacacaacaggaactggaagctgcaaagaaggcacaaacggcttggcaggaatatcttgccgaactgactccccaactgaacaaagcgaaagagctggatgtgcagataaccgagaagcaaaaacaatggttggacgcacaggcggaagaaaagaaggaactcagccggaaagaaaaactggaaagagaactggccggattgcgccaacagataaagctgcttcaggtgacttggaaggagatagaggattggtttgggcactacatggtttatgcggatttgataccggctgtctcattggtgcttactcttcttgccgaccgggagacggctgagactcagattgtatcgaaccggaaaatgctgaaggaagtttcagctttgcaggagatggagcaaaaaaggttgaaagccatgcaggaagaagcggaacgtttgaaccggctgctgcctgccgaagtggtattgctgcgttcgcagttgcggacaggagagccttgtccggtgtgtggcagtctgcatcatccggctgctactcttaccgaggtgcaatccttgcaggaggcagagctgaatcgggcaaaagaaaaggtgacacaagagatagaacgtcttaccgtttctcttactgacaggacaatggaaatcaatacgcttgataccattgtcaagaattacgttcatcgttccgaggaatgtctgtctaaagtgaaagagcatgtttctattcttccgggttggcaggatttgctggataaaggacagttgaagggggcgttacggaactttgacaagcaatggaaagagcgtttgcaacaacagaccgatacgaaggaggcattgtcacggcagcaggccgaactggatgccaggcagcatgagcaggagacgcatgttgtgcagataaaggataaacagtcaaagactattgctttggagacggatttgagtgctcttcgttcgcaacgtgcgttgctattggaaggacgtcccactcacgaggtggagaatcagaacaggaggaggcaggaagagctacagcagcattgggatatagtcatgaggcaatatcaggatttatcgggtgcattggaatcttacaaagggcagtctgttcagttggaaaaagaagtggaacgtctggaggtgttgtcgcaagaagagaactgtcgcataaccgaatggttgtccggtcgggaggagattacgactcgtgccgagctggaagagttgttgtcgaaagatattgtctggattaatcgtgagaagaaagagctgactgcgttgaaagagcgattcactaccgtgcaggctgtgctggcggaacgttgtcaattgttggctaaacacggagaaggttcgcataaaccgtcggaaggagaaactgaagagtctttgttgtttaaactgtctgcttgtcagtcatcaaaagaacagcaaaccacacgtttgactcaaatcgggctgatgctggatgggcaggaaaaaaacaggcaggcattggcaggtattcggaaagagttggacgaaaagcaattgaattatgagaactggtcaaaactgaatgaactcttcgggtcgcagagtggggtgaagtttaaagaaatagctcagggatatacattggatgtacttttgctttatgccaacaagcatttacaggatcttgccccgcgttatgagttacaacgtatctcggatacgcttgctttgcaaattgttgatctcgacatgatgggagaggtgcgcactgtccattccctttcgggcggtgagtcttttttggtgtcgctggcattggcgctcggcctgtcttcactttcttccaaccggatgaatgtggagtcgttgtttatagatgaaggtttcggttctcttgatcctgagacattccgcatagcgatggatgcgcttgagcgtttgcagatgcagggacgtaaaatcggggtgatttcacacgtggcggaaatgacggaacggatatcggcacagatacagatagtgaaaaccggcaatggccggagcagggtgcaggtagcggggcaaaagtgagaatgcctctgcacataaatgcccgtagatagagaaaacggctgaaggatttcctcccggaaacccttcagtctgatgtagaagtttcagctttttatcataagtctgaaattgtttgtagaatttgcttttataaatattttcagtgtgttttcattctgttgcagtatccgtttcctgttccggttcgggtagtttctcttttccgtagaatcccggcatcggttcataaataggattgtgcggaatagatatgttacacagttttttctcctttgccagccgggtaatgtagcgtccggctgtggcgcgtgtcagcgtgaacaactgttcgaaatcacggcgtgtcagcacgctgtgtgtcaggaagtattctgtcagtcctttgtctatctcctcgttcgtcaccggaatggaatgtggcttgtactttgagcgttccgtcttcacatccgccagttgtttcttcagatatttgtccgcacggaatgttaccgacttgaattttacattgttggcgcgtgtggagtgtggagtcggtgtctcgggacaggtcaaggatatatggaaatagcctatcccctcaatgtgtactcgtgctccgtccttcaaatgataggccaatttctcgctgagcgcgataatggttgccttgatgtctgccacggtgagcgaagagctatggtgtatctcctgtgccaagtggtcggtgctgattcgctccctgttcactacacgggcgtgataccgcttcttgcgtgtacctatcgtattgggtgactcgtaaaattcaaatttgacagccattcgcgttccttgtttttttattcggttatataattcattgtcatgcggaagtgtttctgttctcttccttttaagtaaaccatttcacactagtgagcaaactatatcactcaagtgcgtattttatatcatattagtgataaaatttcatcactattgtgaaatgattaattcgacggtacaaaaatacattattctgataatataaactattattttaccggatttttttgattaattgctgttttggggggaatatggggaggcaagtgcttgtttcggttgtctttatacatgaatgctagtgagtgaaacaggaagagtcttcctggggctgacacttctgaaaggcttttaggagaagatggtaattatataaaaataacttgtgtccaatatacttgtaccttgatttacaatggaaaacttgactcttttctcttgtcgttgattagtattaatgtttttgcaaagctagatgacttaggttagaaatgttttctaagtcttgttggaataatttatttcaggaataagtaattcattataaaccagttccaacaaaagtcaacggaaatgggtgaacttgcattcggtatgaggcaactcatgcccgagacatgccaataaaagaagaagctatctatgtgccctattttttataattttcattgggatacacatattcaaaacctgatgtgggcggaattattatgcatatatagtctgtttaatgcgttccctcacttgattaaatgttttctactcctcttaaaggaggttccatatcagattgatttcattatcctctgccatcggctccccacatcattttgttgcgcagggtattaaagaagatatggttttgtcgttttactacctttattttataatcagctttacggattgtgagtttgctgccttcacggcaggtttcactccgtccgtcgatggcaatcaggaaattgtggctgcggctttctacgtcaagtgttatttcccagtcatcgttaattacaataggacgtacattcagactgtgaggcgcaaccggggtgatggcgatggtgttgctatgcggaacaataaccggaccgccgatgcttagtgaatatgcggtcgaaccggtaggggtggcaatgacaaggccatccgcctgataagtggtgagataggcaccattgatggctgtatgaatggaaatcatggacgagctgtcgcgttttaacacagcgatttcgttcagaccgaaaggatatcctttcagctcttgttctttacaggatacttggagtacactgcggtcttctatccggtaattattactgtaaatatcattgaaagtatcttccatttcttcgggcgaaacatcagccaagaagcccaaacgtccggtattaatgcctaatatggggatattacgcgatcccacccggctggctgctttcagaaaagtaccatcgccaccgatgcttagcaccatatcggcttcaaaatcatttccctcgaaaacaccggcttgacgaatttgcaatttcaagtcgtccgtcaggaactgataaaactcccggcagatataaacttcggcgcggtgcctgtccaggatagaaagcaaacgctctacgtgtgtggatttcttggcctgataggtgtttccaaaaatggcgaatttcatgggacgcatattcattagttaattttataaatcttttgtttggcaaaatggattaggttttgataaaacctgctaactttgcacatcagaactgcaaagataataatatattgctaagatgacaaagttaagtgtaaatataaacaaggtagctaccttgcgtaatgctcgtggcgggaataacccggacgtgataaaagttgctttagattgtgaggcgtttggtgctgaaggcattactgttcatcctcgccccgatgaacgccatatccgtcgtagcgatgtgtatgcactgcgtcctttgcttaccactgagtttaatattgagggctatcccagtcccgagtttattgatttggtgttgaaggtgaaaccgcatcaggtaactcttgtaccggatgctcccgaccagattacttccaatgcgggatgggataccaaagcgaatctgtcttttttgacggaactgatggatacattcggtcacgcaggaatccgtacttctatttttgtgaatacggagcgtgaaatgatagaatatgcggctaaagccggggccgatcgtgtggagctctataccgaaccctacgcgactctttatcctcggaatcccgaagcggctgtcgctccttttgtagaggctgccaaagtgacccgcagtttggggatgggcttgaatgccggacatgacttgagcctggtgaacttgaaatatatgcatgacaatattccttggctggacgaagtttccatcggtcatgctttgataagcgatgctctttatctggggctgaaacaaacaattgaagaatataaaaattgtctccgttaatgatgaacttgactttactggctgcgcaaacagccattggggataccctggcagggggtaatcctgttttgacgcctgtttcgggagaggcgcagatgaacctttgggacatggcgctgaaaggcggatggattatggctgtactggctgtactgtctgtggtgtgtttctatattttctttgaacgactggcggttatccgcaaagccggcaaagacgatcccatgtttatggagcgtatccgtgactatatccgcaccggcgaaataaagtcggccattaactattgtcgcataaccaatacgccttcggcacgtatgattgaaaagggaattacccgtatggggcgtcctgtggccgatgtgcaggctgctattgaaaatacaggtaatattgaagttgccaaactggaaaacggattgcctattgttgcaaccatttccggcggtgcacctatgattggtttcttgggaactgttaccggtatggtgcaggctttttgggaaatggcaaatgccggaaataatatcgatatcactctgctttcgggaggtatttatgaagctatgattactacggtgggtggtttgatagtgggtattgcagctatgtttgcctataattatctggtgactcgtgtagataaggtggtgagccggatggaagcacgcaccatggcatttatggatttgctgaacgaacctgttcaaaagtaaaagcgtatggcactgaaaagaagacataaaatatcgcccaacttcagtatggcgtctatgacggacatcatattcctgttgctgatattttttatgattacctccaccatggtgtcgcccaatgccatcaaggtgttgcttccgcaaggtaagcagcagacttcggcaaagccgctcacgcgggtaatcattgataagaacctgaatttctatactgctttcggcaatcaggacgaaatgccgattgagttggaggaattgcctgcttttttgcaagagtgcgctcagaaagagcccgatatgtatgtggcgctctatgcggatgaggcagtgccttatcgtgaaatagtaagggtgctgaacattgctaatgaaaatcacttcaaaatggtgctggccacgcgtccgcctgagaagaaacgataagctgattcttcgttattgtcattctgaatgaaatgaagaatctgtaaacatgagaataaaagcatgaaaaaaaataagataacaggactgattgctacgattgtactacatgccgttctccttattctgttgctggtgatagctattcgccgtccgcagatgcaggaggaaggaggtgtgcctgttatgttgggaaatacggaactgtcgcaaggcaatgccgacccttatacgttgacggatgtggatataatgaatgagccggaagcccctgcacctgatatttccgaaccggagccggttcctgccgttgatgtaaaagaggaagtaatcactcagacagaagaggaaatagtggcagtgcccaagaaagagccgaaaaaggaaactaaaaaagagactcccaagaaggaaactcccaagaaggaaactcccaaaaaggaagttccaaagaaagatactgtaaaaccgaaagagaagactgaagccgagaaacgtgccgaggctgagaaagctgctgcggaaaagaaggcggctgcagaaaaagcggcggcagaggcagcggcaaagaagattgccggtgcttttggcaagggtactcagatgggaaacaaagggaccggtacggcagggagtggtcttgaaggtagcccgacaggtaatgcggcggaaggaaaatcgacaggtacaggtggttatggaacatttgaccttaatggacgttctttgggcagcggcggtctgccgatgcctgtttataatgttcaggatgagggccgtgtggtggtaaccatcactgtaaatccggcagggcaggtgataagtacaagtatcaacaaacgtaccaatacggtaaatgctgcgttgcggaaggctgcggaagaggcggcgcgtaaagcccgctttaaccaagtagacggagtaaataaccagacgggtactattacatattactttaaactgaagtagcttatgaaaacaatttatgtatttttggcagaaggcttcgaggaagtggaagcgctgaccccggtggatgtgttgagacgtgcaggtttgcctgtgaagacagtctctgtaaccggtgtgctgaccgtaaatggtgcacacggagttccggttatagccgatatggtgtttgaagaagtgaaagaagcggatacggaaatgattgtgttgccgggtggtctgcccggagcgacaaatctggatgcacacaaaggattgagtgatttgattatggcctttgcagaagccggtaaaccgttgtctgctatttgtgcggctccgttggtatatggcaaacgtggtttgttgaaaggaaagaaggcaacttgctatccgggctttgataaatatctggatggtgctgactatacagctgctttggtacagaatgacggcaattttattacgggaaagggccccggtgctgcaatggacttttcatttgcaatcgcagaaaaatatgtcggtgcagataaggtgaaggaactgaaacaagcgatgatgattgctgaatgaagaaacatgttatcatagtagccggtggtaaaggtttgcgtatgggtggagatattccgaaacagtttctgccgataggcggcaaacctgtgctgatgcgtactattgaggccttttattcctacgatccttctatacatataatattggtgcttccattggctcaacaggcttattggaagcatctgtgtgagacatatcattttgtattgtctcatgatattgccgatgggggcgaaactcgttttcactctgtaaagaatggtttggcgcttgtcgggggggaggggctggtaggtgttcatgatggtgtccgtccttttgtgtcccgacaggtaattgccggatgctatgatacggcccggcagcggcacgccgttattcctgtgatagatgtggtagagacagtgcggcatctgacaggggtgggaagtgaaacggttccacgcaataactataaactggttcagactccacaggtatttgatgtacaattgctgaaagatgcttatcggcaagaatatacggatgcttttaccgatgatgcttccgtagtggaagcaatgggtaaggaggtatggttggtagaaggaaacagggaaaacattaaattaacaactccattcgatttgaaaatagcggaagtcttaatttgaaatgttcgatatcactacgcgtgacataaaatatttgcaaggggtggggccccaacgtgcaacagtcttgaacaaggagctgaatattttttccttgcgtgatttgttgtactatttcccttataaatatgtagaccggagccgtctttactatattcatgaaatagacggtaatatgccttacattcagttgaaaggtgaaatcctcagttttgagacttttggcgaaggaagacaacgcaggcttgtcggtcatttctcggatggaacgggggttattgatcttgtttggtttcaaggaatcaaatatctgttggaacattataagacccggacagaatacatagtcttcggcaaaccgaccgtattcaacggccgtatcaatgtggcgcatcccgacatggatccctcgggcgaacttaccctttctgcaatggggctgcaaccctattataacacgacggagaggatgaaacgcggtttcctcaattcgcatggattggagaagctgatgaagaatgcacttgctttattgcaggaacctcttgcggagacgttaagtccgcaaattatagaagaacatcacttgatgtcgttggatgacgccatccgtaatattcattttcctcagaaccctgaattacttcgtaaggcacaatatcgcctgaagtttgaagaactgttttatgtgcagctcaacattctgcgttatagcaaagacaggcaacgtaaatatcgcggcctgtattttgataaggtaggggagatattcaataccttctattcccaaaaccttccttttgaattgaccggagcgcagaaacgggtaataaaggaaataagaaaagatatggggagcgggcgacaaatgaaccgcctgttgcaaggagatgtgggaagcggaaaaacattggttgctttaatgtcgatgctgatagcattggataatggctttcaggcttgcatgatggctcctactgaaatacttgcggcgcagcattatgagacgattcggaaatttctattcggcatgaatgttcgggtggagttgttgatgggttctgtgaaaggaaagaagcgagaaaagattttgaaggatttgcttaccggagatattcagatattgattggaacacatgccgtactcgaagatacggtgggcttttcttctttgggaatggtggtgattgatgagcaacatcgttttggagtagctcagcgtgccaaattgtggatgaaaaacacttgtccgcctcatgtgcttgtaatgacggctactcctattccacgaacattggccatgacactttatggtgacttggatgtatcagtgattgatgaactgccccccggacgtaagcctattcaaactgttcatcagtttgacaatcgtcgtgccggtctttatgcttctatccgtaaacagatagaagaaggacgtcagatatacatcgtttatcctttgataaaggaaagtgaaaagatggatattaaaaacttggaagagggttatgaacatatatgtgcagagtttcccgattgccgggtgagcaaggtacatggaaaaatgaaacccgccgagaaagatgcggagatgcaacggtttgtttccggtgaaacgcaaataatggtggctactactgtgattgaggttggtgtaaatgttcctaatgcttcggtgatggttatagaaaatgcagaacgtttcggactctctcagttgcaccagcttcgagggcgtgtcggccgtggcgccgaccagtcttattgtattttagtgaccacttataaactcacggaggaaacccgaaagcgtttggaaattatggtgcagacaaatgatggttttgaaatagccgaggcagacttgaagcttcgtggtccaggtgatttggagggaactcagcaaagtggtgtggcttttgatttgaagatagcagatatcgcccgtgacggacagctgcttcagtatgtacgtgaagtagcaagtagggttgtggatgaagaccctacatgtattcgtcccgagaatgccgtgttgtggcagcagcttcaggctttgcgtaaaacaaatataaattgggcagcaatatcttagcttactctgtattactgttaaaacagaggatatatgttgcaaaacataaaaggtctctatcttccctgcccacaatggttttcgttcgttttatcacgctattgtgtatattctacataaaaaaagagttaaagatagagctgccatttcgaagaaaaattctatctttgggggaatttttgaatagaagtatcttgataaccttaaaagaaccaatgttatgatggaaaaaacgttagtcattttgaaaccgtgtactcttcagagggcactggtcggtgagataacaagtagatttgaacgcaaaggattacgtttggccggaatgaaaatggttcaattgacagatgaggtacttagcgaacattacgctcatttaagctcaaagccgttctttcagcgtgtaaaggattcaatgatggcttgtcctgctattgtttgttgctttgaaggtgtagatgctattcaggtggtgagaacattaaccggtcctactaacggtcgcttggctgcacccggaactattcgtggagattacagtatgagttttcaggaaaacatagttcatgcatccgattcacctgaagctgccgaagtagaactaaaaagattttttaaaccagaagagatattcgagtacgagcaagctgtgtttggctttctttatgctaatgacgaatattaaaagaaaaacaaaagaaacggatgattttgaaatgtattaaagtagtcgcagcggcagcttttgccttagtcagcctgaatgtgtcaggacaggacttgttggcacgccaggcgccaatcgacagaaagttgaaggcagtagattcagttgcattaattcgtcagattaaagcggagaaagctgcttatcctgcatataccctttatcctaattggagcaacgagcgtgtacacgcttacggtaataccgttactatccctgatactttccgtattgatatgaccggtttccacatgccgactgaacatacaaagattacttcaaaattcggacctcgccgtcgccgtatgcacaatggattggatattaaagtctacattggtgatacgattcgtgctgctttcagtggaaaagtgcgtatggtgaaatacgaacgtcgcggttatggaaaatacgtggtaatccgtcatgagaatggtttggaaactgtctatggacacttgtccaagcagattgtaaatgaagaccaatatgtggaagcaggcgagcccatcggattgggcggtaacacggggcgttctacggggtctcaccttcacttcgaaacccgtttcttggggcaagccattaacccggcacttttatttgattttgaaaagcaggatattgtagccgattcttatttgtttagaaaaggcaataacagatatagacgcaatgacaccagcagtaagaatgtcagcctgatggcttcttcggatggaactatccgttatcataaagtgcgcagtggtgatacgttaagccggattgcgcaaaaaacaggtacttctattgatgcgctgtgtaaattgaaccatattacccgtagaacgatacttcgtccgggacaagtgttaagatgttcttaagtaatagttaattaagaaatataaaatagggcggaaaggagtattcttttccgcctttttgtttacgcttaagcagaaaaatgtgtaactttgtcgcctattcatagagaatgatgaaagatactaaacaacaatttgaacatgtgatagctatttgccgtgatttgtttgcgaagaaactgcatgattacggtgctgcatggcgtatcatgcgcccttcatctgttaccgaccagatttttattaaagccaaccgcattcgaagcattgaaaccaaaggggtaacaatggtggacgaaggtatccgttcggagtttatggctatcgttaattatggaattatcggtttaatccagctggaattggggtatgccgagacggatgacatgacagaggcgcgtgcgttggaattatacgatcagtatgcaaaacaggcattggagttaatgcttgccaagaaccatgactatgatgaagcatggcgtagcatgcgtataagttcttataccgatttgattttgatgaagatttaccgcaccaagcaaatcgagggtcatgatggggctaccttggtatccgagggaattgatgccaattatatggatatgattaattattcggtatttggattgataaaattggaatttggagagtaagcgtttacatagcattattggactttggacgaatgcatgccgtttctttttggcaattgtatttatattttccggctttgtcaaggcggtagatcctctaggtactcaatataaaattcaggattatctggaggccttcggttggacttcgttggttccggcattttttccgttcttggcatcggtattgcaggcaatgattgagttctgtttgggcgtatacctgttatttggcattcgcaggcggacgacacctttgttcatgctgcttattatgggagtaatgactccgcttactttgtggttggcaatcgataacccgatatctgattgcggctgtttcggagatgcggtggtgttgaccaactggcagactttttggaagaactgtttcttattactggctgcggtgtctgtattcaaatggcggaattgtattactccgttgattactaaacgttttgattggctcgttgcgctttatacattcctttatatattaggaatgactttatattgttatcgtgaattgccggttttcgatttcagaccttaccatatcggcgctgatattcgtaaaggaatggaaattccggaaggtgctcagcccactgtttatgaaactcgctttatcttgaagaaggatggtgtggagaaagagttttcacttgaaaactatcctgacagcacatggaccttcgtggattctaaaacggttgttaagaagcagggatatgaaccgcctattcatgatttttccattattcgccaagaagacggtgaggatatcactgaagaagtgttgaatgatgaggattatactttcttgttggtggctcatcagctgaatcaggctgatgacagtacgatcgacttgataaatgagctttatgattacagtgtggaaaatgattataagttttactgccttacttcgtctaccgatgaagatattgaagattggcaagaacgtaccggagctgaatatccgttctgtttgatggataatattaccctgaaaaccatgattcggtctaatcccggattaatgttattaaagaatggtgtggtaattaataaatggagtgtgaacagtctccctgacgaatatatgctgacagaccgtttggaaaagcttccgttggcacagataaataccaagacattcagccacaaagtaattctggtatttgcctggtttatattcccattgctgttcttcagtatggtagatgctgtttgggagcaatatcataagagaaagagaataaaattgaatgagaatcaaacaaaataatttcattaaccctttaacaaaaaaacaaaatgagaaagaacattgttgcaggaaactggaaaatgaacaagaaccttcaagaaggtattgctcttgcaaaagaattgaacgaagcattggctgctgacaaacctaattgtgatgtagtaatctgtactccttttattcacttggcttctgttactcctatcgttgacaaagcggtgattggtgttggtgcagaaaactgtgctgataaagtgtctggtgcatatacaggtgaagtttctgcagagatggtagcttctacaggtgcagaatacgtaatcttgggtcactctgaacgtcgtgcttactatcacgaaacagtagaaatcttggaagaaaaggtaaaattggctttggctaataacctgaaacctatcttctgtatcggtgaagttttggaagaacgcgaagctaacaaacaaaacgaagtggttgctgctcagttggcatccgtattctctttgtcagcagaagactttagtaagattatcttggcatacgaaccggtttgggctattggtacaggtaagactgctacagctgaacaggctcaggaaatccatgcatttatccgttctttgattgctgaaaaatatggcaaagaagttgcagacaacacttctatcctttatggtggtagctgcaagccttctaatgcaaaagaactgtttgctaatcctgatgtagacggtggtttgattggtggtgctgctttgaaggttgctgacttcaaaggtattatcgatgcattcaaataattagttttcagaatatctcaaaacaaaatagctactattttgtcattctgaacgtgagtgaagaatctgtgtatattcattttgtgttgacggactctccactttgttcagaatgacaatgttaatgctgttagagtgatgattattccttgattttcctaaattcataaaacgacatgagatacatttttatcatcttcttcttaacttttggcatttccgcttttgcgcagcagaacattgtagaaagtctgcaacgtaatcgtgccggagagggtgcagtgaccatccatcaagacccgaagataacgggactgataggtacaattcataccggaagtgctgccggtggtgaacaaaaaacgctgaaagccagaggttatcgggttcaggtgtatgccggaaacaattctcgtgtggctcgcaacgaagccaacaatatggccaataaggtaaaagaggaatttccggaactccccgtttatgcttatttccagcctccccgttggttatgccgtgtaggtgatttccgcagtatagaagaagctgacgcaactatgcgccgtttgaaagctaccggtgtttttaaagaagtatctattgttcgtgaacaaattaatattcccttagactaacatggaagaactattgcaccccgaatggtctgcagagaagattgagcagttgaaaggccattatgagagtatcttatcgctgttgggcgaagatgtagagagagaaggattgttgaaaactcccgaacgtgtggcaaaagctatgctgacgctgacacgcggttatgaacaggacccccatgctattttgttgggagctaagtttaaagaagaatatagccagatggttattgtaaaagatattgatttcttctctttatgtgagcatcatatgttgccgttttatggcaaagcgcatgtggcttatatccctaacggttatattacgggtttgagcaaaatagcccgtgtggttgatgtcttttcacaccgtcttcaggtgcaggaacgtatgacgttgcaaattaaagaatgtattcaggaaacattaaacccattgggtgtaatggtggtagtggaagcaaagcatatgtgtatgcaaatgcgtggggtggaaaaacaaaatgccattactactacttctgattttaccggggcgtttaatcaggcaaagacgcgggaggaatttatgaaccttattcgtcatcaacgctaacatatataatagctctatcaggtgtggaagtgtgtcagaacctaaaagtaactgttgcattgttattgtagggaggcaaaaccaaaataacttattattttgtcatccgaaacgaagtgaaggatctattggtatcttgcagatccttcgtaaagctcggaatgacagataaaaatagcattgtcaacctcttgacactactttcctatgataaattttatgctttcagcactacccggtcacccgcacgtttggccatttctttcaatagttcactcaactctttgtagtgagccatgatttccaggcatttgttggcgtcttgagttacttcgggtttgcttaatgcttgcagtgtatgcttcatttcttcttccagtatggccagcttaaagtcgatgatttgatgtggaaccagttcgtgtaagcgttcttcatccgttactatcttttgggatttagaatgatatttgcttagttggtaacggtcgtttatcatctctgccgccaatttgctgatggtaggatcaggatgtgccagaaaataacgttctgccgtgaagttctgatcatgcagatgactctccgcttccgccaatattcttctgtgcagcgggttgtgaaactgtaattcatcctgttttaagtccatggaaatatattctatcactgtaagtggtgtttctgcattctcttctgtctctacataacacataattctttctccataacggattaaagtctttatcagcagttgttctttggcatagaatacatacttttctcttccctcttcgggaatgtaggactgatattgtgcttctagttcctcgggagggaaaggaggaggtggaacgttatcttctgttcctatgggaggcgggaccatatcagcggaaggagaaagcgtattggttgtatccttctctttcttgatttgttccaaatagttgtcatcacgctgtagcaggtgcttctttatctcattcaggatgatttgttcatttacattcagaatggtagcacactcctttacacaagcatagcgaatcacatcattaggaatcagcccgatacttcttgccatatcagctatcagaccggctcgcttgacaggatctttttgggcgtctttcagcaatagatttgtcttaaagcgaatgaaattctcttcgtgttcggcaatatattgcttaaactctgtggcgttgtgctttcgggagaagctatccgggtcgtctccgtcggggaggagcagaactttgatattcatcccttctgcaagcagcatgtctatgcctcggatactggcttttatgccggcctcgtcaccatcatataacaaggtgatatttggagtaaaacgatggagcaggcggatttgctgttcactcaaggcggttcccgaattagccaccacattctctaatccacattggtgcatggctatcacgtcggtatatccttctaccatgtaaacgcaatctgctttcacgatggctgcttttgcctgaaagatgccatatagctcttttcgtttgctgaatatttccgattcgggtgaattgacgtatttttgattgactcctttggtgcggctgtctaatacacgtccgccgaaacctaatacttttccgctgatattgaaccatggaaaaatgacgcgtccccaaaaacggtcgcgcagactgccgtcttctttttcgtaacagagaccggtttttatcaggaactcttttttatatcctttgcgcaaggcttcttgtgccagagcatcgtgtgccgtggtgctgtagcctaattggaattttctcacaatgtcgtcacgaataccacgctggcggaaataagtcataccgatggctttgccatcagcatggttatagaggatattctggaaataatcacgtgcaaattcatttacgacgaagagactttcacgtatattttgtacttctttctcttcatcggtgagctctcgttcttttatttctatgttgtatttttttgccagccaacgtagtgcttcaggataagtcatttgttcgtgttccatcacaaagtgaaccacgtttcctccttttccacaggcaaaacatttacatagccccttggccggcgatacgtagaacgatggggttttgtcgtcatgaaacgggcaaagccctacaaagttcacacctcgcttgcgtagggtgacaaattcggataccacatctactatctgtgcggcatccaatatccggtctatggtgggttggtctatcattgcgaatgcgaagataataaaaaaacgccgtcggaggtgagttcgatggcgtttttaacggaataatataatcaatggttatttgatattgggattcagtttgttccattcggcaacaggaggaagaacgcccattgcaatgacttcatcgcgcaatgcacagaggtgttcataacttttttccagtgcggcttcttcttcaggagtgcctttcacatctttcaagtggcaaccatctttggtgatggaagtttcccaagccatcatgatgtggtcgaatttgccattggatacataagtgcctgccggccagcggaatggatttccacccatggcggcagcaatcatttcgatggaaacgtatgacggactttggaaagaagaacgtccgcgcaggttgatgatatttgcaccgcctttggttactttttgttgaatttcagcccattgctctttagtcagttcgggagtgccgataatgtcaagcaaagcttttccgtttacttttgcggtggaagcgtagactgccatctgctcgccgtgaccgccatacgtgcggcagttttctactttgtccatagcaataccgaaatgtttggatagttcgctacgtaaacgggtggagtcaagggcagcaagagtagtgacctgagagggttttaagccggaatataataaggtaatgagaccggtgatatcggccgggttaaagatgactacgatatgctttacatccgggcaataagcttttacatttttaccgaattcttcggcgatggcagcattaccttttagtaaatcttcacgagtcatgcctgctttgcgggcagcacctcccgagtttacaatatatttggcatcggtcagggcttctttgatatcggaagtgaatgtgatgttcatgccttcaaaaccacagtggaacagttcttctgctacaccttccaggcccggagcgtaaggatcgtataaacaaatattaggagtaaggcccatcataatagcagtttgagccatgttggagccgatcatgccggcagcgcctacgattgtcagtttttcgtttgttacaaattccataattcttttctatttaaagtttgtataatataaacgttttcgcaggagagtatgtttcctttttccggatacaaaggtataaaagctttcgatagggtgtttattctaaaatattatatcggataacagaaggttatattggaactctttattcttatcttttcatttggtgttctgatagtttcatacagggagggtgctggcagggcgtgtggagataaaatgtgctgccaccacctctgtatcttcctgttgatggagattttaaaggagaagtggtagcagtggtagcacatttgctaaactctaggaagagtaatgtaacttttcagtgcgtctacatattcctcaaaggcttcaagacctttcggggtaattttgcagattgtacaaggcattttgcctttgaaggttttaatgacttccacgtattctgccttgttcagcttgtctatctgtacactcagatttcctgccgttgctcctgtctgttgtttcagataactgaattcggcttcttccaccgaaaccagtatcgacatgatggcaagtcgaagctcggagtgtagcaatggatttaattctttgaacataggcgcaaagttataattttttttgtttacgggcagcatggttcagcacatgtcccgggataatcatcataaaaataaaaacaggagcgaatatcaatacctggttgaaaccttcatagaaaaggcatccgatggaacttaatgctcccagtgtgccacaaatggtcactgttttataatttatcaccagtcctgttaaagtggtacccatacccatcagtagaagaataatgaataggatgggaagtttccagaaaaacatagcgagtagagatatcaaaaatccggctgttccgaataccagccaaatgtagctgatgactttgtctaaatgacttttgacagtcggctgttggttgcgtgcagagaggtaggttccggttcctcctataatgggaagcataaaccatagatattgccagttattattctgtgtgtatgttaccagaagccatactaacagactggtaaatacagtagtgtatccccataacaggaaaggcataccgcaatttgtctccattctatttttcgtgttttgaatcatttgagcgatgagttctaaactctctttctcattcaattttctttcttccataatgtttttctctttagtttgtgattggttaatatttgatacttttctctatggctgttatcagcaggctgattccccaacctgctataacccataatacccaccagtaatgtggacttgtaaaccagtttacagctactaaaaacaggtttattaccacataatagactaatgaccaagtaagccaattccaaaaataacgggctctttgttggcattccgctttaatttgttcctcggttggaacgaatttttcattgttctgatttactttcatggcttttattttcctttcccttttttgtctttgtgtaatgtgtaattttcgttttcatcgtgataaacataaatagtgtgttttcctgatgtcacttctttaatttgtgctgtggctcttgaacctgttgttttttattatctcttctttcatagattgtggagtgtgtaaatctcctacatctatcataagatttcctttgtccgtcttaataccttttcccggagctgctagtgtggcgcatgaggttgtgtcaaaacgtggataatgctgtcgtttgattcgtggggacgaggttcgctcgtccgaaaacagttggctttgtgtcttcgggcaggcaatccctgcccctacagctgacgatgggataggccggtttagttttgacacattcccaagtttttgttgaaatgttgtgcttgctttcattgtttttattgtttgtgtattgaatgccaaaagtttatctttaatgattactttgcaaatataatctagtttataatataaaccaaataatcagggaactttttttcttgatattcactttgtatatagatatttgtttgttaatggtttttggtttgttcggccgcttgtaaaacctttatagatagtaggctttagttgccctcttttgtatgtagtttgtgcggtttacgtgcgcatgcgatataattaggtgtattccatttcctttctgtttggttgtttcccaaaagtatttgtgatgttatgttacaacatttttactcacatgtcaccacccggtacacatttatgcacttgttcgaacaactgggtggcggaaaggctctgcacctcctgaggttctcaactgcttaatactttcttatggtatcctgacacaatgacatatatacgtataggt

SEQ ID NO: 6685 - DNA, 1037 bp, Unknown
  gut microbiota DNA sequence
gtgatgcaggacggattcatattttccgataccatcgcgaacaacattgccgtaggcaccgaacagccggacatcgaacggctgaggcatgccgtgagcgtggcgaacataagggaattcatcgactcgctcccgctgggctacaacaccagaatcggcatggaggggaacgggctcagccaggggcagaaacagaggctgctgatagcaagggccgtttacaagaatcccgaatacctcttctttgacgaggcgaccaacgccctggatgccaacaacgagaaggagataatggaacacctgcacgagttctaccggggaaagaccgtagtggtggtggcgcaccggctcagcacggtgcgcgacgcggacaagattgtggtgctggacaaggggaaggtggccgaagagggcacgcacagggaactgacggagaaacggggactgtactaccggctggtgaagaaccagctggaactgggaaactgaggaaaggaggaaggcatggaagaggaacggacgcacagggagattgaactgcgcagcgaggaggtgcaggaggtgatgggcaggattccgcccgccatcctccgctatgggattgtcgtgctgctgggcattatagccgtcgtccttgcaggaagcgcctgcttcagctatcccgacacggtggagacggagttcacactcaccacgcagaacccgcccgcctacatcatggcgcagagcgcgggaaggatagaacagctgtataccgccaactcccagcctgtcggaaagggcgacatgctgggagtgatagagaacgtggcacgcaccgaagacctgttcgtgctgcgggaacggatgaaggaatggaagcagggcggaagccgcaccgagcaggtgggtacgctctttttccagcggatagcggagctgggaagcgtgcaggcggcgtattcgtcctgcctgctggcctggaacaactaccttcagcacatgcaggaaagcaggacgtatgagacagaggtggccaacaccgtggcgggtctgct

SEQ ID NO: 6686 - DNA, 561 bp, Unknown
  gut microbiota DNA sequence
gtgcaggcggcgtattcgtcctgcctgctggcctggaacaactaccttcagcacatgcaggaaagcaggacgtatgagacagaggtggccaacaccgtggcgggtctgctcaacgccgtggccgaatgggagaagaactatctgctgacagcccccgcggatgggacggtggcgttcatgcagctgtggaaaaggaaccagtacgtggaggcgggagagaccatgtttgtcattgtcccccacgacgcagcccttccggtgggcaaggccctgctgcccatggagggaatagggaaagtccggacggggcaacgggtcatcatccggttgccggcgtttcccgaacaggagttcggaaccatagagggaagggtggagtccgtctcccccgtgcccgacgaacagggaaggtttgtactggaaatagcactgccgcagggactgaccacccgctatggcaaagaactgcctttgataaagaccatgacgggaacggcatccatcgtcacgaaggaaaaaagcctgctcagcaggttgctgaatttaaaataagagtttatg

SEQ ID NO: 6687 - DNA, 1149 bp, Unknown
  gut microbiota DNA sequence
aagatattcggccaggaggtcagcaaggatttgctcatagacttcctgaacgacctgctggtgggtgagaggtccataaaggacatcacttttctggataaagaattgttgcccgaatacatgggtgaccggggtgttatttatgacatctattgcaccacggaggcgggggagcatatcatcgtggagatgcagaaccggcagcagacgaactttaaggagcgtgcgttgttctatctttcgcataccattacgcgtcagggtgagaagggagcccgctgggagtttgacctgaaggccgtttacggtgtcttcttcatgaacttccgtctggaggacactccccacaagctccgcacggacattgtcctttcggaccgtgatacgcacgaagtgttttcggacaagctgcggtttatttttatcgagcttccttctttcaacaaggaggaagaggaatgcgagacggattttgaacgttggatatatatactcaagaatatggaaacgctgaacagacttcctttcaaagcgcgcaaagccgtctttgaaaaactggagaagattgtggatatcgcttccctgagtaaagaggagcgtatgaagtatgatgagagcatcaaagtatacagggataatctggcaacgatttcttttgccgagaataaaggactcaagaggggaagagaggaagggttgaaggaaggaatcgaaaaaggattgaaagaagggcgcaaagaaggcattctttccgtagcccgcaatttaaggtccggtggaatgtccgttgaagccattgctgctgcaaccggattaagcatcgaagaaatagaacagttggattgaccggatatatccttttatttaacataacaaggcggaagagaagcatgaagctttcttccgccttgttttatttcccgccataaaatcaaatttttgtcaagattgcttctgccataatctataaccaagattatgaatgcttatatggaatctatacaaaataagggataaatcccgaattacctctctttctcaaataccattgataatcaacgtaatatcctcttgttgcaaccggcacgaatactacctacctgtcaaatgtcgtcaatcattactttaaatgcaactttaaacatctat

SEQ ID NO: 6688 - DNA, 5307 bp, Unknown
  gut microbiota DNA sequence
tgcaaaactcttattagacaagggtaagtataccccggaagagcttgtcaagctctgtggatttacatccagaagtgtcttctattctgcttttactaaagaagttggcatggtcccttcacggtaccccgataaatcattcaaaattcctttgaaatacgattgagtcctttgattaataataaacaattgagtttttaaatttataaatttaaagtttttctattatgaacaaaaaatttttaagtgcaatcctgttcggaaccttaatggttacctcggcaggaacatttgtatcttgtaaggattacgatgacgacatcgataacctgcagggacaaattgatgctaacaaagcaggcatcgaagaactgaaaaagttaatcggtgaaggtgactatgttaccaatgtaaccaaagatggcgataatattgttgtctctttcaaaaacgccggaaataaaactatcgagctgaaagatgaagtaggctcaatttgcaaagtagaaaacggtgaactttacattgatggcaaagcaacaggcattaaaatatctgcagatgctcctgttactgaattcaagccggctgtaaaagtagaagatggcaaatgggctgtacttcaagctgatggtacttataaaacaacaggtattcctgcaacaggagtaactgtatctggctctcagacagaaggctttattttgacttttgttaatgctgaaggcgaagaaactgtaattgaattgcctactgctgcttctagaattactagcttgagcgtaaataaaggtgaagaaacaactgtaaagttgaacaaatatacttttgatattactgctgaagagaaaaaggcatgggaaaaagctaccggaaaaactgtgacttctgctaaattcatcgtagcagataatgcagaaaacaaagtttctgtaagagtgaatcctgtagacgttgacgcaacggctattgaatttgtagctattaacggtaaaaatgaagtgcttcctaatgtgactttcgttgctaacgaagataagaactacgcaacagaagttagagctgcttatggaaacggactttaccacatgactgttaaacagtttactttggcagatgacaaggcaagcaatgcgttaggtgaagcaatggcagtaggtaagggttattatgctttgactgccaataaggtttatcgtgcagaatataatatgaaattcagtatcgaagatgctgctgccgcaatcggtggcattcttgttgacgataaggaggtaaaagccgcagcagttactgtagatgccggaaaagcacattctgtaactgttgagaatgaagaagatttgtatgacttatatttgagcgcaagccaagaagatatcaaattgttcggtttggaattcgacaatgaaaaaggcactttcactatcactaagactcctgacgtggtaactgctgctaatttcgatctgacagttcatactttggacaatagtggtgaggttgctgaagaaactatcacagttactttatctgatgtaattattactgatgcagattatgctactagaactttggctattgttgcaaacaatacagaagatgtatcaaaagacaagaacttcttcacagctgatatggcaaccatgactaaggctttgggtaacgaacttgatgcatggaagagaaaagtagctaatgccagcgttgcattctactcagatgcgaaatgcgaaaaggcagtagaaggtgataaaggtgttgtcttgaccttcgttgacgcagaaggcaaagaactcaccgaaaacgctataaaatctgcagttgacatgaaatttgctgtaaccaatgttactgcttctaaggcgttcaaagtaaatactgtatattatgcaaaagtaacattcactacaacaggtgattcagaacttaactcagtagttgttccgttcaagttcactgttccgactttggctagcatgttcgctacagaagccgcagtgttcaagggtgatgttgcttacgcatacatgaatgtagcagatcaaactaacggtgaagctgcttatagcttgaaacgtgcatttgctaaatatccggaagtttctcttgatatggatgatgaaactgcaattgtaggtgactatacatctgctgatttggctgacgtagccgaaacatttgacgaaaacgctaagattacattgaaagctgatgttgatgcagatgaaaagactaacattcctgccggttatgcaaaagaattaatcgtaattgctagcgacaaagactatgaaggatgggcttacggtgaaggtgaaggcgaatatgtattcaaagtgaaagtaatgagcccgatctttgaaggtactgtaacttctattgaatcagcagttgaaattcctgcaacttctgtagacggatacaaactgggtaataaagacatccagggtacaacttacaacaaggtagcttacaaagtattgcaagatgctgttaatgaaaagggggaaggttactggaaacgtcctgaaatcgcaagcgtagaagctgctgtagccagcgaccgtgtcattaagattggtaacgaaggtaaagctgttgacgcagctatgtctactgacggaaaaacagtagttgaaggttacattcaggtattaccgcagaacattgccacaacaactgaagaaactatcaatgtttctgtaacagatacttggggatttgttaaagttaacccgattaaggttaaagttaccgttgaataaaaagtagttgataagaataaggttattctgtaactatcaataaagaaggggctgtccgaaaagtgtgacagcccctttgctttttctcttctcaagaaaaacttccattggggagaaatctaaaagtagaaaaaaagaaggcatccacgggttggatgccttctcttcttatcagtaaagaagcttattacttcttatattcaattgttgcctgagttttgattcctgcgtagtctgtgaaagtaaccaccagttcacctccctgacctgcattcaaaccagtaatttccacaccggtatcacctgtttccaaattagcatccgtacctgcactttctgcagatatagcgaagtcaactttgattgtttcacctgaagtggcatcagctgtagaaacttgatatccgcctagtttattagaggcacttgcagatgcagggatagcagtggcacttactgcaatttcttcatcaccatattgcaatgcaagaccatttttcggtttgtttgcggtttcgtctcctgtgaaaggtgcaataataccgtctgcattaacagcagctactgtacctgcaacaccgttcgtatagtaaaccaacttagctttgttgaaagcaggagcaagtttcatggtaaactctttagatactgagatagtattgtctgctgcagcattacttgcacctgtcaaagcattaactgttacaacttccttgttggcttttactttgtaatcagtagttttaaggaagccatctttaacgacgtctgtgaaagtaattgaagctgcctctttaacctcactattatctgttttcttgtatgtataagtatagcccggctgagcatcagtcataccaataccatcagcctttttgttaatagtatacaagttagttggcattgtaaatgcaggactattacctgagttatcaattacagaacttaatacgccttcattccatcctgcatattgatttgcagtataatagtcatcgaattcaggtttagaaactgttacaggaacaattaccttcttcaattcattaccctgctcatctttcaatgtcaaagtcaaattgaatgtaccgtagatgtttgcaaggtctttggctgctgttgtatacttgctgctagcatagttcagagtaataacagctttggtagcattgcgtgcagcaattgatgcagcactaccatctgctttcttgaatgcaattttatcgttgcctgccacattaaacaatccgttagctgcggttgtgctagtcagagcaaagaagttaccgtctgcagtagttacagttgttttagttgtatctgcattctgagcgatgtttgcatccaagttggtaaagatagtacccaaatcaacagagaacgagttcactgtgctgattttgatgctaaccggagcaacagtttctgtctcagatacagaagcacctgcaatcgtaaggtcaacgtcctttttagctatcttgcctgtgatatcaagaatattaacagtaacgcttaaaccggaagttgcagcagcagtagcaggaacagtaatgttcataccgtctaccgtgatacccttggcttcggctaaagttttacttgcgccttcgaatgttaaataagaatcataagcctgagctgcagtagcggcattaagtgacaaagtagaagttcctaaagccacgtttgcacttgccaacccaatttggtttttattgtaagccgtgttagtcttgctttcgtttacggtctgagtgtcaataacatattcatatcctgtcattacagtaccgttcacagctaaagcatatttcacatttttatctacaccgtttactttcttggtgaaagcagtggcaatattatcagcggttacttcatcggtcattgcaatagccaaattccattttccgctaggtgaagcggcacgatcggttacatagtcgccttctgcagctgtagctgtaacagtaacaggagctgttttgccatcaatatccaccaaagtcaacgtttgtgcacccaaatcataagaagcaggagtaacagtggcagtttcacttcccaattgaccaatcaagagttgccctgcagtcacgttgcctttcttacctgcccaagttacatcggcaccggcttttgaccatgcgatatttttacctgaagtccaattgctcggagttgcattaagtgctgtcagagccgaagaagaagtcggcagggtaatttcctgcatcacgcctgcttcattggggatgtgcagaaccaccgaatcgcctttctgtacagcccacgcgttacctgacgccttatattcagacttcacgaatgccttggttgcatcatcatagaaataccagaagccgtcctttacataaggagcagtgctttctccctggggagtagtgcctgtagtggcgaagaaacctgtaggagtaccgtcgatgctgatttcacctgttgtcttgtcgatgacaaccgtgctgcctgcaggtgtgccggcaatagtcaggttgtaagaagtaccgtcgctgac

SEQ ID NO: 6689 - DNA, 309 bp, Unknown
  gut microbiota DNA sequence
atacccgattattatccacgcccgactcctcgactagtgagctgttacgcactctttaaatgaatggctgcttccaagccaacatcctagctgtcttagcagtcagacttcgttagtttaacttagctgtcatttcgggaccttagcaggtggtccggattcttctcctctcgggcacggaccttagcacccatgccctcactcctgcggtagaactgatgcgcattcggagtttgtcaagacttgataggcggtgaagccctcgcatcttatcagtcgctctacctcacatcagtaacccgcaaggct

SEQ ID NO: 6690 - DNA, 8275 bp, Unknown
  gut microbiota DNA sequence
tgtcaatttacgaatcaagttgacaagcaaccacgatacggtaaatgccaccacagctgcagccggaatctgaatacaaacaggcaccccgatggcacgcatcaaaaggacaccgggaccggtaaagaagaaatgaaccatatataccccgaatccgcaaatcgttaaattggccaatagcttctgaacaagctccgagcgcacattcactttcttagccaacaaaaagaaaggtatcgtcatcatcactacattcaaagagttgtaagtaaaaaacagctcaagcaattcatcactatactcaggtaaagaagttacatgacggaaaccgaagaaagtcaccgcaaaccctaccaaaaacataggaacaccgaaagacaggattctgcccaacgaccagtctttattgcgcaagtagtgtcctaacaataaatatccattgaaaccggcaaaataataaagcataccgaatgagttccatgaacaactaccccataagtaaggcgaaacatattcataataataaggtaacagagtagtaatcccccaagcggccaaaaaccataattgagctttctccgatgctttctccacccatgcagaaaaaatgggtaaataaagatataaccctatcaacaaatagatataccacatgtgtacatctaaaagagaaaagttcaacggaatctctgcaatattcttcaacgagacactcaaagcctgacgagtcgcctcttcacccgaataaggaaaaaagtcgagaatcacttccggtttgaatcccaacaaaccggttatccagggaaacagattataaagcactgaccaaagaagaaacggccaaaatacacggctgatccttttcttgtaaaaaaccgacgtctcccctcgtaccggcaacagtaaagcacctgtaatcataacgaacagggggacacaagggcgaaggaatgctccgtatgccgcgccccaaaactttatttgttcaagctcggcagaaggctcacccgaataaaaattaaaagggtctgcgcaatgacagcaaaccaccgtaaacatggccacaaaacggacaacatccaaccaaactacacggttcttagcaacagatagtacactagtgttattcatagacgaaaattttatttaagttgcaaagatatatcttctttgaagatgttttgttgttttacggcaaaaaataggaggatgttctcacgaacacccccctcgataacctaaattactatctaatgttgtgaagagagccttctattcatcagcggcttcaggatccgtcacagaaaccgaataaaatttaaattcggacattgtccagaaaatactactcgtattagtagcattaactaccattcggatttgactgaatggttgcggtgcatcataaatctcagaagtaaatgtacccgtagaagtaaccggtagtccatctgcatccttagtgaagttacggataaggaaccagttggtaccatccgtgctacccatcaaatcaaaatcagtcggtttattactgccgttattacgaggtgcataatagaacttataggaacctgttatttcttctttcaagttaacctgcatccaatgaggagccggtatattgacactccatgccgtatggaaaaaagtgccggtattgccatccagcagattagcaataggtccttcagtcggctcctgcgcattcgtactcaagtcagcagcagtcaaagctatctgtgtactcacaaaagtaggcaatgccggctccgaaacctttgagatagtttgaaccgcactcttatcacctgtagggcttactgtttgtaccgagaactgatactcgccaaacttcttacgtgtatccggtatttcaatactatctgcataaatgcttgcagtacgcataacatcttttttctgcaatgggtcgtaatagttcacttcaatataacggataccggcatcttcaggagtatcccaacgaagtacaatgcgcccggaagtactttctgctgtcaagtttgtgatttcggccggtgtaatcccatcttcatcactgctgcaactgatgtttgccaaggtaactccaatcaggagcattccggcataatatttaaatgtatttttcatctttatttattttattaataaccaggattttgaaccagattcatgttacggttgacatctgtcaaaggaacaggcattaaatattgagtcggactttcaaacttacgttcaaaagacacttctgtttcttgtgcaaactcatctatagtcttacctgcaatattcatacctttggccttcacgccaaaatattctgctgcctgtttccaacgacgcaagtcccagaaagtctgattttccaaatagaactcaatggtacgttcctgacgaacaatctcacgcagtttggcctgatccaacgtagcaatgccattccatgatgtttctaccgtaggtataccggcgcgagtacgcactttgtccaaataagtttttgctgtatttaaatcattacattccacacaagcctcggcataccccaaataaagctcagccaaacggatgacaggccatggatagaacggtggattgtataaagaagtacgtacattgtaaccgggaactactccctttttattcagataaccggtaggtgaatagttattagtacgcaaactgcttcctgccggctgacgagaagtattaccgcctatcacaaaatcacataccaattttcctcgaccggagtcactgtatttattatagctctcatcgttctgataagctccgttaccgtctgacgcactcatgatttcataaaatcctccctggaaagcaacccatgaataaaaacgaggctcacgatttaagttgaaacggatagtctttgcttccgggtcaccaatagtggcattttcttcacccaaagcagtcacttcataaatactgttacctttcgggaactcaggatcttgatccacaggaagtccgttcttggtataaaaacgtttcaacatggcaagagtaggagacacaccattgtaagcagaaccattacagaatggaagggacttgttctgaacgctgtaagcaccttctgaacggcaatctgcccaaatcacttctgtgttggcgggctcgatgatggtgtaacgcaatctgtgctgcacggggtcggccggttctgcattatcatatccgtccaacatatagtcggtgctggtataaagactgtgtccggctccttctgccgcacgaatagcttcttcataagccaccttagccttctgccatttctcagcactgtatgcttgaggcatcaacgccgttccgtctttattgacaaagctggaatagaattcgctgtttccattaaacaacggagaagcagcatacagtaacattcttgccttcaacgctttggcagccacacttgtagccagtccgtagttctcattgatacgagttgcgggaagttcggcagcagcttcatcaaacatctgacaaacatagtccacacattcatcataaggcgaacgtgccgcatattgatcagcaggagtagtaagcgacggttcctccttaaccaaaataaccggtccatagttacgtaccagcaagaaatgataataagctatcaagaacttggcctgggcaatataatctgccttaatagaagcctccagtgcaggaaccatatcgatattgttcagtaagatatagcattgcttgataccttgaaacaaagaattccaataagagataaccggattagacgcagaataattacctttagggaaagcagcaaatgtttcatgctcaaatgccgttaccacttcatcggaggtaaagaggtccaatgaacctgtaccacttctgggattagggatatatgcatagcacgaataaacaaagcgtttagcagcatccttatcttcaaatgcatctttttctgtcgccttttcgtcaggaacgacatccaagtaactacaagaagacaaaatgcccaaaagcatacaagccgctacaataaatatttgattaaactttttcatatctgttcgtttttggattatttaaatgacaactgtaaaccaagattaaaggtacgctgagtcgggtaactcaaacctttaccaccacccatttcagggtcccaaagatcgaaaggagagaaagtaagcaagttagctccacttatatagaaacgaactttcttccaagtataacctatttctgcatttttcaatttcaggaaagcaccattgcgcaaccaataatccgaagactgagtgttgtgattgttatcattcttggtcaaacgcggataagcggcattaggattctgattacttggtgaccaatagtcatcagcaatccatgacaatacattacggttatactgagtaccgaatggagcaaaccctgacatcatcaacgaagtattggctacaccctggaagaagaaggagaaatcccagtttttataagaaatagatgggccaaaaccataaacaatttcaggaacagtaggataacccatagctacacggtcatcactcgttatttttccatcataaacaccatctctgtcgggttggtccacatacttaatatcacccggagcgatagcaatattacccaatgtagagctcgggctattggcaatatcagcctggtcgatataaagtccgtcggttacataaccgtaaatggtattcagtttcttaccgatattagacaaagagggacgcacaccgggagcctcatcatattccagaatctcattacgtgcaaaagtaaatgttcctttaaactgaatggcaagatctttattgatctgttttccataatcaagagagaggtcaaaaccatagttcttcactttagccaagttaccataaacggcagtgctggccgtacccaggtagttaggaatagaatagcgttgttggaagatatcacgacggatttcgcggaaagcatccaccgtaacattcaaggagttgaacaactgcatatcaaaacctacatttaacttctcacccacttcccatgtcaagtcgttgttctgataacgggtatatacaggaccatttaaagtaatctgctgcttgtcaccggtagtaaatcctgcattttcactctgaagcgtaatatcagacatatagatgaaacggataagaccacccgatgaatcgagcaattggtcattacctaccaaaccgtaagaagcacggagctttaaattagagataacgtctttcagaggttcgaagaagttctcctgacttacattccaacctactgctacagaggggaagaagccccatttatgtcctttggcaaagttttcggaaccattataaccggcattcacttcgaacatataacgattgtcataatcataagaaagacgacccgcaaatcccatcttgcggcggggaagtgaagcgaccaaattaccgggagcattattatcatattggtcaatattccaaagaagcataccgctcacattgtgattaccaaacttattcatataatctacataagattggaaatagatacgacggtcacccgcaacactcgaagttgtactcaacaccggcttactcggattggaggaaccaaacggagatatgttcagactataactaccgtcagcattctgagtataaccggtcaatgtataacggttaatgccctgagaacggctggtagtggttttattatagtttttataagagaataaagccttaaagcgaagccccttcaacagaaaatccaacttttgttcaaagtcaatattagccattaccgtactctcaaaaatatcagtatagccattggtcaagctggccatcggattgactgcaccttggtcattaccacctgcatacgctccccaataaatccaattatttacaccgtctgccggataagcgatagggaaatccaccggattggagttcattacagccgaataaaggttgcctacagaggtgttaggctgtctcaagtcattcaactgcacattcaggtgcaaagaaatggttgatgtcttagacatgtgaaaatcaatattgttctggaaggtatacttcatcaaatcaatattattcttgtaagagaaatacttagatgcttcgtttttcagcataccggtttcgtgattggctcccacattcatgaagtaagtaatcttcttcgtacctccgcggatattgaagttggctttttggttgaacgccaaatctttgaacaaagagccataccagtctacattaggccagatatagggatttaccccattgcgggtattctctatctgttcttgagtataaaggatattacctgttccttcattagttacagcttcattatacagctccatgtaacggtatccgtctacaaagctaggcactttcgtaggttgtgtgatattcgtttccacacgcacgccaataataggcttctcaaggtcggcaccacttttggtcgtaacaatcattacaccattggctccacgcgtaccatacatggcagtggcagtcgcatctttcaaaatagagaatccttctataatttcaggatcaagcgcatccaagtctgccgaactcacttccaccccatccaaaataataagcggagaagtcataccactcaaagtagaaataccacgaatgtaaaaatcagaaccattactgcccggctgtccgctacgctgataggcaataactcccgaaagacgtccggcaaaagagttagaaagattggcagaaggcactttcaagtcattaggacgaaccgtttgaatagaacccacgatagattctttcttttgtccggttccgaaagccgtaaccacaacctctcccaaagtctcgctatcctccttcattttaattctcaaactcttttggtctcccactttcacttcttgagtcttataaccaatataagagaagactaaaatgtctttcgaagacacatcgatagaaaatttaccgtcataatcggtaattgtccccaaagtagaatttcccttaactcggacattaacaccaataaccggttctcctgcttcatctactataatgccctccaccttacgattttgctgcacaatagtagattcatctgtgacaggaataccggatgcaccaatttccgggaaaaaggagcatagcaaagctgccaatagaaacgtctttttcataatactctctaaattttatgttaataaataatcaatgtcatttatttcccataaaacggctaacacatcatttgtcgaatcagtttatactcatattttaactctactttaagctaatattttaacttaaacttgatgttataaccatctttcttagttcctgtagaactaagtatatcttatggcttttgtatactgggtgcaaatatataaattttttaagatataaaaagaaatggagagatatttttataaaaaagaactaattatataaaatagagcgtcaaataggttagttttatacaaataaaacatttttttctctcttccatttaccattattaaactatatctcgatagaatataagtagaatatgggtagaatgaatcaatatatactctctcaatatatcataaatcggtccgtttgcaatatggaatatttacgtttcttagttctacaggaactttatataattacataaacttccccatccgatctggctttaaaccaaccttcaatatataaaatagaaaaagagtagaaatgctaatttatctgtttcccaatatattatgtaaaggaatacatatattagtcacacagatgatgcgtgtcaaccgtgcacgtaaccatataaagttacgattagtgactgaacaaatacagcatcagtgaaaatttcataggcacaaccatcggtatccctgtcctgtctacatacttccaataagtccatcaataaaaagcaagtaatgcccgtccttatagagcaaatacatagcttgatgggaagcaggttgcgattgcttaaccacggacgtggttaagcctgcccacccgggtggttagagttagtcacaggggtggttaacgttagccacgaccgtggctaagagaaaattcactttcatcaataaaggaagaaacaaaagcattgtccggtggaatacttcacggccaaccgaagcttaaatgattatctatgacatcaagtagaagaaaaaacggagaaataccacatttcacaaacaaac

SEQ ID NO: 6691 - DNA, 6305 bp, Unknown
  gut microbiota DNA sequence
ccaagaattacaactgagccatcgttttattttacgttgacccgtggtcagaggtataaaaaacgtccgctaaatcatgatttagcggacgttttgcggaagctgggggattcgaacccccggtacggttacccgtacgtcagtttagcaaactggtggtttcagccactcacccaaacttccttccttttcagaggcgttatctctcaaacgcggtgcaaagataagcggattaatcgagatgtgcaaatcttttgcgcttttttttagatatatttttgtgttggaataataaagtattgatagtaagcgtttaatatttaaaattattttctttcccaaaactctaaatattgtatggctacctttatgggagcatgatgttttttgattttctaataaacatctcaatttttcgtatatatcattgctttcaagacgaacattgatgataggacgaagttttggtttttcctaaaagggtgtattattcttcgggtttctattattcatggcccatgcgctatggtcggggaacaaaagtataatttgatcgaatataacatcatatccgcccattcatctaggttgtagccggtataagggctgtataaattctccttatcgggttgaattattcattagataatcggctgtgtggagcatagagcatcgtttggcaatacatttacgttgtgctccaaatttttcagaattagtgtcagcgtctaattctgttatacgatacatattctcaagcggcttatctatggaatcgcttattttataaacaaaaagataagatttttagtttttgctaaaatgaaaagattgtttgtgctattctttttcagagaaaaataattcatatctttacaacgaatatagatgatggttaactgttttatgataaaataatgataaaatgaagaagatttttgtggtagtatcagccatgatggggttaatgacttcatgcaatcaaacagtggaaaaatctgtgaccggtatcgtttgtgatgccactatgaatggagtaactgtggttacagtagataatgatactgtttttgtaagtacgttagatgcgaaagatgccggttacacgggaaacagctttgcgttgaatgataccttgactgttgattataaggtgatggatggtattaatgtagcggaaagttggcaggtaaaacctgttattgcagaactgataattggtgcgtggactaaggctattagtggtatggatggagaagatggctttttgctggcggcagatggaaaagcagcttcgattaattctgcgacacttgtgtataagagttggaaacgtgaaggagataaattaatcatggatatcgaaagtataggtaatggtcaaacgattgcttctactgacacgatgaatgttttgaaacttgataaagattcattgattttggataatgggggaatgataatgcgttatcacagagtccgggaataatttaatcattgcattcagatgaaattttctgatgcggattacatgggaattgcggtgggtgcaacctattctttatgtaatccgcacttaaacaggaagtttatgaatcttgtgtggctgatagggtgtttatcgctctttttgtaaacgaataatcattactcgcttggtagtatttgttatcctgaagcgattgtcacttctttctcctaccagccagataatcttttcgtctgagcatacaacatattgattctctttttcgaataaagagaatttgcggtcggtgagataatcacttacattcttttttcctgtcatgccaaaaggaacaaatttatctcctttttgccatttgcgaataatgagagggcttattaccttgtctgcatccaggcaagctacatctttttctttaggaataataaaatcatccgataaatccagcgtcttgatgcaaagctgtggagttgggtcggttgtgctttctatggttctggtttgaagcaacagatattctctgtctcgtacagcttcccattcgggagaaataaatctttttcccggctgtcctgataagctgtggaaaatatcttttatttgtaaaggtttaaatcctagtggatacagtatttcaaacagtaatgaggcgggggcaacttctgtcaacaagcgttctacatgaatagcttttaggttgttgccatttctttttataactctgtttttggcctcagccatttctttgttgtaaacgagagaggtttctgccagtcggtttgctgtttctgcaatactctcactgacagatggatttagttctcccaacattggaagaatattcaagcggattttgttccgcatatattcatcttgcagattagtgctgtctgttacgtaatcttgatgtaagtgctcaagatattgtagaatatcctgtcgactcacgttcagtagcggacggacaatatgaccgtttagcggggctattcctttcaggccgttgatgcctgttccccgaattaagtttaataagaatgtttctacactgtcatctctatggtgggctacggcaataacggaagcatcacactcctgccttaatttttcaaaccattcatatcgcatttctcgagctgccatttcgatggaaatgcgatgctttgtggcgtacgtttgagtatcaaaatgtaccacatgtaataaaatatttagttcattacataagcctcgtacaaagttttcgtctcggtctgactccttgccgcgcaagtgaaaattgcaatgggcagcttcgcaggtatatcctaaagctaatagcacacgtaataaagcgacagaatcagcaccgccgcttagtgccactaaaatcttatctttttgaaaaaataaagatttttcttctataaatctattgacgtctaaatgaaacatattacaaagataatgcttctttgagattatagaaagcgaatacctgttttctttcatctgccggtttgcatattgctatttttgtttatgatgaaattctttatttaaaaacagtctaaacaacttgcatacctctaagtaatgaactatatttgcagaaaattttaaagaaaatgcgtttatctgaattgaatacaggagaaaaaggcgtaatagtcaaagtgttaggtcacggaggctttcgtaagcgtatcgtagagatgggctttataaaaggcaaaaccgtggaagtaattttaaacgcccccctgaaagacccgataaaatacagactgctagattacgagatttctcttcgccggcaagaagccgagatgatagaggtagtgagtgaacaagaagcacgtaccactcaaagtccttatcacggctccataacagaagaaataacagtgcccgaagctgaaatggtggcattggccaaaggaaaacgacgtaccataaatgtggcactggtaggtaatcctaattgcggaaaaacttcgctgtttaatattgcatccggtgctcacgagcacgtaggaaattatagtggcgtcacagtggatgccaaagaaggtttttttgattttcagggataccatttccgtattgtggatttgcccggtacttattctttgtcagcctatactcctgaagaaatatatgtgcgcaaacatattattgatgagactcccgatgtgattatcaacgtggtagatgcttcgaatctggagcggaatttttatctcactactcagcttattgatatgaacgtgagaatggttatcgctctgaatatgtatgatgaacttgaggcaagtggcaacaaactggattatctcaagctgagccagttgtttggcgtacctatggtgcctactgtctgtcgtaagggagaaggtgtcgataagcttttccatgtgattatcggcatctatgagggcagtgattttctgactcaaaagaaggcggaaatccgtacggaagtattggaggatttgcgtgattggcatgaaacttatgttcctgatcataaatttggcagtcacagtgaagaagaacacattaggccgcgtggtattttccgtcatattcatataaatcatgggcctgaattggaacgcagcattcaagctgtgaagaaattaatcagtgtcaacgagcaaatccgacacaaatattctactcgtttcctggccattaaattgttggaagacgataaggatatcgaactttttgttgagacacttcccaatggtggtgaaattttagctttgcgtgacaaagaagttcagcgtatttataatgtgatgaatgaagatagtgaacaggccattactgatgccaagtatggtttcataaccggagcgttgaaagaaacatttacagacaatcacatggaaaaggagcagaccactcgtgtgattgatagtattgtgactcatcgtatttggggatatcctatctttttccttttcctttatatcatgttcgaaggaacattcgtattgggggattaccctatgcagggaattgagtggttggtagatcaattgggaaatctgattcgtaataatatggccgaaggtccattgaaggatatgctggtagacggtatcattggcggggtaggcggagttatcgtattcttgcccaatattcttattctatatttcttcatatctgttatggaggattcaggatatatggcacgtgctgcatttattatggataagattatgcaccgaatgggattacacggaaagtcgttcatacctcttatcatgggattcggatgcaatgtgccggctattatggcatcacgtaccattgaagaccgtaagtgcaggcttattacgatgctggtcaatccgctgatgtcatgtagtgctcgtttacctatttatttagtaatggtaggagcttttttcccaaatcaggctagttttgtattattgtgcatttacgccacaggaattatattggcggttctcatggcacgtcttttcagtaagtttctggtgaaaggcgatgatgcgccttttgtgatggaactccctccttatcgtatgccgacaacgaaaagtattttgcgccatacttgggaaaagggggctcaatatctgaagaaaatggggggtattattatgattgcttctatcattatctggttcttgggatattatccgcaacatgatgcttatgaaacagtggcagaacagcaagaaaactcatatattggtcagataggtaaagcagtggagccggtaatcgaacctttgggatttgattggaaacttggcatcggacttatttccggagtcggggcaaaagaactggtggttagcacattgggagttctttatacgaatgaagaggatgtggaaaatgtgaatctttccaatcgtattcctatcacgccacttgctgctttggcttatatgctttttgtgctaatatattttccgtgtatagctactttggctgctataaaacaagaatcgggcagttggaaatgggcattatttgctgcgggctataccacggttttagcgtggtgcattgcttttgttgtttatcaactgggaaatttgattatttagtgaactcatttttattcttattgttttttaagcatggaattacaacaaatcatagttttagtcattgttttcttgtgtatgatatgggctggtcttcgtatctttttgtatttcaagaggataaagaataacgagaatccctgtgaaggatgtacttcggactgttccattaagtccattcgcaccaatcagaagtgtaattgcgaaaaaaatgcaggaaaatgaagaaaaaaacatcaaaatagttgcaggttcaaaaaaaagtcgtacctttgcaaccgcaatcgagaaacaacggttgcaaagaaaaaaaggttccttggatgagtggcttagtcagcggtctgcaaaaccgtgtacggcggttcgaatccgccaggaacctccaaaagcaagaaaggattagaatgaaaatttctaatccttttgtttttcaactatttacgtcctctgtggtggaaggattggaagaagaattttcatagttttcagcttttgttttacaattgttttacagtaaaacggagaaaaattgtaatgaaagctacgattaagattgagttgcgcaaagattacgcaaccaaagaaggcaaacagatggtttgtctgcgttacactgcctaccgccgttctactttaatcagtatgaacatagcggtattacctaagcattggaataaagtatcgaatacggtacgtgcttccgaacctcgttgttactactacaacaaagccat

SEQ ID NO: 6692 - DNA, 14385 bp, Unknown
  gut microbiota DNA sequence
gctatagcacaagggttccacctcttcccattccgaacagagaagttaagccttgtcacgccgatggtactgcgtaacagtgggagagtaggtagccgccgtttttgatggaagcctccgagtcagtcaaatgattcggaggcttttttttgtgtttatactgagtttccgacttggaaggggtgaaaatgctatttgacccaatattgttactccgcttgtttatatcattgttcaatgacctcaaaagaggattccttccggcttgttgtctttcttttctcatttatttattctggctttgagcggacagtgctgagtattgctctgttgattcgtttatatagacttatgtagttaacagatattaaattatctctttccttcttgcttattccaataatattcatacatttgtagtgtactaataaactaatacactaaataattaattaaatacataaacacaatgatgattgaagtgaagaacttatctttcagttatggaaagaggaaacaaaaagtctttaatgatttttcgctgacactggataaaggttcagtttatggtcttttgggtaagaatggtaccggtaaatctactttgctctatttaatgactgggttactccgtccgcaaggaggtaaagtgctctataaaggaataggcgtttcgttgcgttatcctttgacattgcaggatatgtttttggtgcccgaggaatttgcattaccatccgtcagcctgaaacaatatgtaaagctgaatgctcccttttatccggctttcagcaatgaacagctaagagcctgtctccacgactttgacatgaatgaggacattcatttgggggaattgtccatggggcagaagaaaaaggctttcatgtgtttcgcgctggccgccaacacttctttactgctcatggatgagcctagtaacggactggacattccttccaaaagtcagttccgcaaggtgattgcatcgggcatgacagatgacaaatcagtgattatttctacccatcaggtaagggatatcgacagcttgttggaccatgtggtgataatcgacggtactcatgtgctgctgaatgaatcggttaaggatatttgcgcgaaactatattttgccgaacaaggaatgaatgaacccacaggagatgcattgtatgtgcagccttcggttcagggaaacagcgtgattctttctaatgtttataacgaagaaaccaagctgaatctggaagtactgttcaatgctatgttggcagaaagagaaaaaatgcaatcaatatttaacaagtaaagacacagatacattatggatactaatcatttctttagcttttcgcgtattgccatggtcatgaaacgcgagattatagaaaactggaaaaagaacctttatgctttcatcggactttatgcagcctttgcgctggtcgtggtgggtaatatgtggggaatgagtatgaatgctgaaaatgcatttgctagtcctgatatcttctttgttaggtattgtacgaatatactgggggcttttatctttatatgtctgttgggcagtttgatttatgcttccggcattttagataatatgagaaataaagagatgcgcatatctttcttgatgcttcctgcaacaatgttggagaagtatgtggcacgcttcctgatggctacgctgggatttataatagctgccattgttggaatgcttttggcagaggttactcgttatattctgcttcctttgtttgacttgcctgatgtgtttcatagctccgcattgtttaaagtattttctatgcttactatagatggtgagcaggcatttagaggttcctatgcatttaatatggagtatatgccttggttgggtgaggcttgtggatggagctttttgatttggtcacactcactctatgttttaggaggaagtttttggtacaagagagcttttctcaagactttggggacactgattgtgatttctatccttggctctattatcacggtacagattgtggagtggataggagaagaaggcatgatgggtcttcacgactggttggaagaaaacttccagtggatgacgctgaacaaactgcttgcatttggcggtgctttctttagtgccttcacaatgttcaactggtggttgggctataagctctttacccgttcgcaagttattaaacctaaatttcgtttgctatgaaatttaaagaaagtaaatctatttatttgcagatagccgaccggatatgtgacgagattctgcaagggcaatatcccgaagaagagcgaatcccttcggtcagggaatatgccggcacagtggaagtgaatgccaatacagtagtccgcacttatgattatttgcaagggttggaaatcatatacaataaacgaggtattggctattttgtatcgacaggagctaaagagcgaattatcactcttcgcaaagataccttcttgcatgaggacttaccggagtttttcagacaactgaagacattggagatttccatggatgagatagacaagatgtataaaaaatatttggaacaacaatagtaacacaaacacatttttcagtggggtatcaaaactcagatggtctatcaaaccatcaactgtaggggcagggtttgcctgcccgaatacgcaaacaagctatttggggagagcaatctcgcccctactaataaaatgacagcataatcaacgtttagaaacagttcaattatttattttgattgatagtataatgtatataaaaagactacagcgataatccatattatcagcatggctataaaacatatttttatccattggtaaaatttccttaaactgctttcatgggaagtcttctttttatatttctgccatgctgtaatattatgcctaaaatagggcacatgaatgtaagtagaatagccagaagtaatatagtctttatatgtttatttatgtggctttagaatgcgcaactaatagcgcttgttagtgcacccgtaaccgtacaagctccaaagaatagatcaccgacatcacataatataggatgattgttcttataataatctttgtgtaaaattagcttgcttctgtatttgaatgttattagaaccaaacttactttacgtgattaaggatggggttagttagtatgctatgtgattcgatatctatgatttaagagcataggacttttatgctctgaagaagcgtatcaaaatgaatatgcggctgtggataggagttcattaatctttgttgatattattaggtacggaaagtgattttatcaaaaccttttgttgaatgattgtctgaatctctttatttcttgatataagtcaaacagttaccatccgaaaactcagtaactttgcaccttaaaaaaacagggtaacaagtgaatgaaataaaagaaccgagaagtgtacgccggaatttgtctaaactggtcgtacctatctttatagaaactttattgattatgatgctgggggcagttgacactatcatgctgagccagtattcagacaatgcagttgccgccgtcggagtggtgaaccagttgattatgtttgcctttcttatctttgaggtgataaacctgggtacctctgtactttgttcgcaatatttgggggcaaagaaacagaagaatgtggttcaggtggtaggcgtggctattctgctcaatcttgtgctcggattagtggtaagtgctattttgcattatggtgcgccgttgttattgacactgatgggactgcgtcctgaattgatggtctatggagtggggtatatggagatagtgggggcgttcgccttctttcaggcactttcactgacggtttctgcgtctttgcgtagtgctaacaaggctgtctatcctatgatggtcattgtggtggtgaatatcctgaatatcataggtaattactccttaatcttcggtaagttcggcatgccggcgttgggggtggaaggagcggctatttcgacggcttttgccagaggagtgtcgatgattatcctttttattattctgtttcgtaaatatatacccaagttcccgattgactacttccgaccttttccctttgtggaactgaagaatctgttgaaaatcggtcttccgtcggcaggggagaacatgtcttatagcttatcgcaggtgttactgacttattttatcaatatgcttggaaatgaagctcttactacgcgaacatacgtggttaatatggtgatgtttgtctatctgtttgcgatagccatggcacaaggcggggctatctgcatcgggcatttggtgggagagaagaaaataagagctgcctatttgttgggcaagtatgtaatgcgtatttctattttagtgtcgctggtactttcctgtatttgggctttgatggggcacacgctctttagttggttgacagacaacgcggagattgtccgtttgggtactgtcatcctttttgtcgatgtgatacttgaagtggggcgtgccattaacatttatgccaccaatgcccttcgtgcaaccggagatgtgaactatcctttttatgtaggggtagttgtacaatggagcatagcagtaggctgcggctatctgttcgggctctattgggggtggggactggtcggtatgtggtgtgctttcttgctggacgagaacattcgcggcatcatttttgtgcggcgttggaatagtatgaagtgggcaaagaaaggatttgtgaaataataaatgtgattttcgcaaactttatagtgattgaggcggttaaactcaataaaaagaattaattttgcaatctgataattatctaaaatacattatggagctcgatttactcacggcaatatcacctattgacggtcgatacagaggaaaagcgggagctttggcctcttatttttctgaatttgcactcattaagtaccgtgtgcaggtagaaatagaatatttcatcactttatgtgagctaccgttaccgcagctgacaagctttgatcaagcacgttttgcatcgcttcgtgctatctaccaaaacttctcggaagccgatgccggacgcattaaggaaatagagagtgttacaaaccacgacgttaaagctgtagaatatttcattaaggaacaatttgacaagttgggcggaatggaagaatacaaggagtttatccacttcggccttacttctcaggacattaataatacgtcagtgcctttgtctgtcaaagaagcgctggaacaagtatattatccgcagattgaagaactgattgcgcagctgactgcttacgcagaagaatgggcgaatatcccgatgttggcaaagactcacggacagcctgcgtctcccactcgtttgggcaaggaaatcatggtgttcgtttatcgccttaaccgtcagttggctgtgctgaaggcttgtcccattactgctaaatttggtggagccacaggtaattataatgcgcatcatgtggcatatccgcaatatgactggaaagcattcggcaataagtttgtggcagagaaactcggtctggaacgcgaggaatataccactcagatttcaaactatgacaatctgggagctatctttgatgccatgaaacgcattaataccataatgattgacatgaaccgcgatttctggcagtatatctctatggaatattttaagcagaaaatcaaggcgggtgaagtcggttcgagtgccatgccgcacaaagtgaaccctatcgactttgaaaatgcggaaggaaacttgggaatggccaatgctatattggagcacctttcttctaaactgccggtttcgcgcttgcagcgtgacttaacagattctacagtgttgcgcaatgtaggtgtacctttcggacatatcatcattgccattcaaagttcattgaagggattgcgtaagctgctgctgaatgaacataagatttatgaggatttggataactgctggagtgtggtggcagaagctattcaaaccattcttcgccgggaggcttatccgcacccgtatgaggcactgaaagcgttaacacgtactaatcaggctattaccgaatcgtctatcaaagaatttatcgagacattaaatgtcggtgaagaaataaaaaaagagctgcgtgagattacgccgcacaactatacaggcatttaaaacgttatttatttaaagtaaaaaaagaaacagagcccgagagggcgttatacattaatttaattaaagagaaatcatgagtacagaaaatgaaaacagacaagaaggttctgtaaacgaagaaaaccagaatgtcagccgtgatggtggttataagtcttataacagagacaataattacaacagatacaacaacgacggcgaacagcgtcagtatcgtccccgcactaactataaccgtgagggaggagaacgcccttatcgctcttcatataataatggtgagcgtccttcttacaatcgttataataatggcgaacgtccgcagcgtccccgtttcaattctaacagtgaagaaggtggtgaacgccagtatcgtcctcgtactaattataatcgtgaagggggagaacagcgtcagtatcgtcctcgtaccaactataaccgcgaaggtggtgagcagcgtccttactctccgcgtccgcgtaccaattataatcgtgaaagtggtgaacagcgtccgtatactccgcgtccccgtttcaatagcggtgaaggtggtgaacagcgtccttactctccgcgtcctcgcgtaggaggttataatcaaggaggtggatataaccgtgagggcggcgaccgtccttatcgtccgcgtaccggggggtataaccaaggtggaggatacaaccgtccttaccgtccgcgtaccagtgattataatccgaatgctaaatatagcttgaaaaagcagatagaatataaggatatactgactgatccgaacgaaccgattcgtttgaataaattcctggcaaatgcaggtgtttgttctcgtcgcgaagctgatgaattcatcactgcgggagtggtaagcgtaaatggtgtaatagtaacagaattgggtactaaaatcaagcgtacagacgaagtgaagttccacgatgaaccggtgagcattgaacgtaaagcttatgttttgctgaacaaaccgaaagattgcgtgactacttccgatgatcctcaggaacgtaagacagtgatggattttgtgaagggtgcttgcaaggagcgtatctatcctgtaggtcgtctggaccgtaacactaccggtgttctgctattgaccaatgacggtgatttggcttcaaaactgactcatccgaaatacttgaagaagaagatttatcatgtatattgtgataagaatgtagctaaggcagatctcgatcaaattgcagccggtattactttggatgacggtgatattcatgcagatgccatcagttatgcatcggatacagacaagtcgcaggtaggtattgaaatccactccggaaagaaccgtatcgtgcgccgtatttttgaatcactgggttataaggttgtgaaactggaccgtgtatattttgcgggtctaaccaagaaagggcttcgtcgcggtgactggcgttacctgacagaacaggaagtgaatatgcttcgtatgggctcattcgaataatcaagtaaaataataattaagagacaaaacaatggaaaaaattagtagaacaaaggtagttgacctgttgaagcgtcgtgattttggcgcaatggtcaatgtaaaaggttgggttcgtacccgccgtggtagcaaacaggtaaattttatcgccctgaatgacggttctacaataaataatgtgcagatagtagttgatttgtcaaatttcgatgaagaaatattgaaactcatcactacaggtgcatgtatcagtgtgaatggtgaactgaccgaatctatcggttccggtcaggctgccgagattcaggcacgtgaaatagaggtgctgggtgcttgcgataacacctatccgttgcagaaaaaaggtcatacgatggaattccttcgtgagattgctcacttgcgtccgcgtaccaatactttcggcgcagtgttccgcattcgtcacaatatggcaattgctatccataagttttttcatgaacgtggctttttctacttccatactcctattattacagcatcagactgtgaaggagccggtcagatgttccaggttactaccaagaatctctatgacttgaagaaggatgaaaacggctctattatttatgatgatgatttctttggcaaacaggcaagtctgactgtttccggtcagttggaaggtgagctggctgccacggcattgggcgctatttataccttcggtccgactttccgtgctgaaaattcgaatactccgcgtcacttggcagagttctggatgattgagccggaagttgctttcaatgatatcatcgacaacatggatttggctgaagatttcattaaatactgtgttcggtgggcattggataattgctatgacgatgtgaagttcttgaatgatatgttcgataagggcttgatagagcgtttgcagggcgtattgaaagaaactttcgttcgtttgccttatacagaaggtatcaagatcttggaagaagcggtagcgaaagggcataagtttgaattcccggtttattggggggtagacttggcgtcagagcacgaacgcttcttggtggaagaacacttcaaacgtccggttattctgactgactatccgaaagaaatcaaggcattctatatgaagcagaatgaagatggaaagaccgttcgcgccatggatgtattgttcccgaagattggtgaaatcattggtggttccgaacgtgaagcagactatgataaactgatgacccgcattcaggaattgaacattccgatgaaagatatgtggtggtatctggatacgcgtaagtttggttcatgtcctcactccggtttcggactcggattcgagcgtctgctattgtttgtaacaggcatgaccaatatccgcgacgtgattccgttcccgcgtactccgcgcaatgctgaattctaaaagatataaataatgatggaaatcctgccctataacatagagcaggattttttttgcatttacctgtaaaaaagttatttaaaaacgtggatatatgaaaattatttctaattttgtgtatccacattacgcaatttgttaactaaatattatacgactatgaaacgacattctttatttttactgctgatagcatttatgctgatcggtacttctcgtgtaatgggacaaaataaatctgctgttgcccctgctgatttaaaaggtatttggcagatgtgtttttatgtatccggcgttccgaatactcccggagagttaaagccgagtaattcattcaaaatcttgtctgatgatggaaagtttaccaatatgacggtaattcctaaccatggagctattattattggtgcgggtacctataaacagaccgcagagaatgcatatacagagcatgtagagaagaatctgcatttacctcaattggtgggctcagacaatatcttggagttcgagatgaaaggtggtgatgtaatggtattgaagttctttgtgaaaacagataaggacggcaatgatatcaattcatggtattatgaaacttggaaacgggtgaagatgccggctgcttatccaaaagatttggtaagataataagtagttggaaaaatacaatataaggcgggcgagagcccgccttatattgtattttgcacaattcttcaaaaaatgtgctattcttcatcacttttatggctttggaagaacaaagattagaaataatcgttaactttgtcaccaataacataaaatagaaaaggagattaatgtctaagctttatataatagcaggttgcaatggggccggaaaaacgacggcatcctacacagtgcttcccgaaatattggactgtcgcgagtttgtcaatgccgacgaaatcgcaaaaggtctttctccttttaatccctcaagtgtagccattgaagccggtcggctaatgcttaagcgcattggcgaattgctttctgccggagtcagcttttctgttgaaacaacgctctctacccgttcttatattaatctcattcatcaggcgcaaagtcagggctatagtgtcagtctgatttatttttggttgaactcacctgaattggctattgaacgggtaaagcaacgtgttgccaatggagggcatgatgtgccggcgcctatcattcgtcgtcgttaccgtgcgggattggataacttcttccatatttatatgtcatgtgtggactattggatgctggcagacaatagctctacaccgcgtgttattgtggctgatgcttttcgtttgcgggaagagccacatatttataatcatgaactctttaataaaatcagaagttatgtcaactgaagaagaatataaggaactgagcgagaaattgcgttatggtttggaactggccgaacagcgattaatagaagaaacagctcgtcgtgaagggacgttgtgttatggtcgtcctgatggaaaagtggtgcgggtatctgcaacggaacttttgaagcttcgccagtctgccggatatgcttgtccggttggtgaatccgaatcgggctggagacattaaaagaatattttaaataaaaataaattggggagatggattaatcttcccttttttgctgccgtatgtaagctctctccctgaaaatcaaccaaaaaaatgcttaatttgtttgccagttcgaagaaaagccgtacctttgcaagccgattattatcaaaagtttataaagaattaattcttagcgtattaatagttctttgtccgggaacggttagagacgctgggaagaaattgttttttagtagttaacatttaaaaagattttaagagtggacactttaagttacaagaccatttctgcaaacaaagaaacagctcaaaaagaatgggttgttatcgacgctaccgatcaggtcgtaggccgtctcggttcgaaagttgcgaaactgttgagaggaaagtacaaagctagctttacccctcatgttgactgtggtgataatgtgattatcattaacgcagacaaagttaaatttaccggaaacaagtggaacgataaagtttacttgagctatacaggttatcccggtggtcagagagaaattactcctgccgcattgatgaagaaacctaacggtgaagaaaaactgttgaagagagtagtaaaaggtatgcttcccaaaaaccgtctgggagctaaattgctgggcaacttgtatgtttacgccggaagcgaacacaagcatgaagctcagagcccgaaaacaattgatataaattcacttaaataataaagaatggaagtagtaaatgcattaggcagacgtaaacgcgcaatcgcacgcgtattcgtaagcgaaggtactggaaagattactattaacaagagagaccttgcagagtactttccatcaactattcttcagtatgttgtaaaacagcctctgactaaggtcgaagctgctgaaaaatatgatattaaagtaaatctttgtggtggtggtttcaccggtcagtcacaggctctgcgtttagctatcgctcgtgctttggtgaaaatcaatcctgaagataagaaagcgctccgtgcagaaggcttcatgacacgtgatccccgttctgttgaacgtaagaaaccgggtcaaccgaaagcacgtcgcagattccagttcagtaaacgttaatatccggttttacttagaactggttaagaagcgtttagtatctaaactgccgggactctactttgtagcggactacccgatggttggttgagataaacaaaaaagaaagtaaacgattttaaagaataacaaaatgtctagaactaatttcgatacattattggaagccggttgccacttcggacaccttaagagaaagtggaatcctgcaatggctccttatattttcatggaacgcaatggtattcatatcattgacctccacaaaacagttgctaaagtagatgaagctgctgatgcactgaagcaaattgcaaaatcaggaaagaaagtcctgttcgttgctactaagaaacaagctaagcaggtagtggctgagaaagctgcttctgtaaatatgccttatgtaatcgagcgctggccgggtggtatgttgaccaacttcccgactatccgtaaggctgtgaagaaaatggctactatcgataagttgactaacgatggtacctattcaaatctttcaaagagagaagttttgcagatttcgcgtcagcgtgctaaactggaaaagaacttaggttctatttctgatcttactcgtctgccgtctgcattgttcgttatcgatgttttgaaagaaaatattgcaatccgcgaagctaaccgtttgggtattcctgtatttgctatcgttgatacaaactcagatccttcaaatgtagatttcgtaatccctgctaatgatgatgctactaagtctatcgaagttatcttggatgcttgttgcgctgctatggcagaaggattggaagaaagaaaagcagaaaaggtagatatggaagctgccggtgaaaacgctcctaagggtggtgccggtaagaagaaagctactaaagctcgcatggacaaagccgaagaagaagctatcaacgctgctaaggctgccgctttcatgaaagacgaagaagaagcttaatatactatagttgagagttgagagttgaaagttgagagttacgatatgcaattctcaactctctgttctcaactctcaactgcttttaaagatattattaacaaattaaaataaaggaatattatggctgtaactatggctgaaattaccaagcttcgtaaaattagtggagctggtatgatggactgcaaaaacgctttgactgaagctaatggcgatatcgataaagcaatggaaattatccgtaaaaaaggacaggctgttgctgcaaaacgttctgaccgtgaagcatcagaaggttgtgtattggctaaatcaacaggtcaattcgctgcaatcattgcattgaagtgcgaaacagactttgttgccaagaatgctgatttcgttgctttgactcaggctattctggacgctgctgtggctaacaaatgtaagactttggatgaagtaaaggcattgccgttgggcaacggtactgtacaggatgctgtaactgaccgtagcggtattaccggtgaaaagatggagttggacggctacaatgtagttgaaggagcttatacttctatctataaccaccaaggaaacaaccagctttgtactatcgtggctatgaataaggaagcagaagctgctgctcacggagtagctatgcagattgcagctatgaaccctattgcaattgacgaagcaggtgttcccgaatcagtgaaggaagctgaaattcaggttgccatcgataagactaagaaagaacaagtggacaaggctgttgaagctgctttgaagaaagccggtatcaaccctgcgcatgtagacagtgaagaacacatggaaagcaataaggctaagggatggattaccgatgaagacattgctaaggctaaggaaatcattgccactgtttctgcagagaaatctgctaacttacccgaagctatgattcagaacattgctaaaggtcgtttgggcaagttcttgaaagaagtttgcttgttgaaccaggaagacattatggacggcaagaaaactgtaagagaagtgctgaaagaaatcgatcctgaattgcagatcgttgctttcaaacgtttcactttgcgtgctgaataatattcatgagaaagcccttggcgcagttctctgttacgagggttatatggtaggaaagagggtgcgcaccctctttccttttttattttgtctgtgtatatccttctgctttcagcagctcgataatccgctgtttgaactctccttgaatgatgatttctccatctttcacagaacctcccacaccacatttggtcttgagcaacttgcccaattctttcaggtcattttcagtccctataaatccattgacaagggtaacagttttgcctccccggcctttcttctcgatgctgacacgcaatttctgctgcttcttatccggagtggctgtctcttcttcttcaccgtgctcatagttgaaatcaggatttgttgaatac

SEQ ID NO: 6693 - DNA, 9746 bp, Unknown
  gut microbiota DNA sequence
taggcggtttcaacctgactgccaaacatatcatctgatttttcttacacttttttgaaacttgtttgtaacatgctgatttacaacaggacatcacaagtactttttgaaaacaacagaacaggaagaaaatggagcacacataattatattgcgggcgcgcatgtatgcgcacgtagaagagtagacaagaaggttcctaacagcactaggcagacttagcgcctccacctgtttctcgccagccttgtttttaaactaccaaataaatagaaactacatttcacgtacagaaggcaactaatcgtctatatcacaactgcttaacatttaaaataacattacatatttcgagttagttacatacgtacgtgtaaaccgatgcgtatatatgtgtagcccgatggcaccgtatgtatagtccgatacgtacgtatgtataaccagatgcgtacgtacacattttaaatcacgatgcatgttgcagaaagaccttgatattttaaaaaaacatcaaagtctttttcaaaaacatcaaagtctttttagaaaagctcggcatgttttttatgtaagagcagattacacctctccccaccaagtcggtcattacttctttcccgttcatccttacatttttatcaaaacatgcggataatcagccggttaataatgaaaggacctcccctcatcctcccttcagccgtgcttcccaagtcccttcacaatctgccttcagcctttgtctgtcggaagaagttttacgaatgaaaggaggctgaaagagtgagaacaagacatccattcattagcggagcctcatcaacagggcgttttaacgaataatgaaaggagaaaggaaggtacgaaacgaagcaatccgcataagaattgaagcagtgccaagagtggttagcaataacacactgtctgaagataagagttttattgaaatgggagtgtatcaaaactaaaccggcctatccaatctcagctgtaggggcaggggttgcctgcccgaagacacaaagtaaactgttttcggacgagcaaacctcgtccctacaaactaaacgacagcattatccacgttttgacacactcccaaagaaaatatcaaaaggcaattacccagccatacaacttaccagtctaactgcgactaacctgcaatcctttgtcagacaatgtcatatcaacaaaacgagcacaactgttaggcggattttgagtcaatattgctctgattttaacagcagcttcggggtctttggctaccatataaagataacctcctccacctgctccaggcaacttataacctaaacagtaatcatcaatctgacgaatgatagcctcaaccgacgcaggattagttcccgaatcaagagcctgattctgcttccaacttttacccaccaaacgccccatttcatcgaagtttccacgttggatagcttcatataaatcaaatgcatgactcttcatgcttcccaacagtgcaagatgttctgtagagttaaggaacatactacgtacaatctcagccaaaattcccttagcagtgcgagtgataccggtataatacaacagatgacacttctgatattcactacccgtaaacaaataatcaggcaaccaacgaaccaacggactttgctccataccggcatgagtttgaagaagcttaacaccacgaaggacacctccatattggtcttgccaaccacctcccgtagtaagcaattgttccaaaatcagagtacggttgcatatttcattcttatcccacttcaagccacagaaatcggataccgcgccaagcaccgtagaagctaaaatagaactagtacccaaaccggaacctgcaggaatagccgacaataacgtgatttcaatacctgagccaaacgccttgagctgctcctccaatgtaacataaacatctgccgagaattccggctggaaaccggccagcaccaaagccgctttaggaatagaaaaaggagaaccaacttgcataaagtcactcagttcttcataggtagtaacagtttctattgctcccaagtctatagaacgtaaaataatcttatattctttacaaggctttacataaacctgcaaaggaggctgtccattcagttcaatagcaatattcactacatttccgccttcattcaaacaataaggaggagtatctgtccatccgcctgccaaatcaatacgaaccggactccttccccatactatctgatcggaataaaccgataaatgaggctgctgtttttttgccaatgcagttgccgtcaaaccttcacgcatcaacccaaaggcccttctttcatactccgtataggttttaccactgaactgctgcaccctggcccgaaacatattgtcgcttatccgggtcatcaatggcgcagaaagcggcaatgcatccggcaattccaaatgatgaatggcaaattcatgagcagcatcatccaaattcaactgataaaaaacactacgttcataattacgagccaacacaggccagttcataacccgaaaggaatcacgctgggcagccaaacgacgaagattggcataagcggaaatctcatcggccgacaaccggcgagaacgtttccatatttccttaccttcctgaagttcgggttcggaaatcatccaacgcattaccagccccagctcttctattgtagagcaaacaggaaacaaacgggcagcctgcaaatcgtgagcaccgtctatctcttcaactgctactttgcgacaagaaagccattcacgcaccgaaattccctgataaatagtcctttcctctgtcaatgctcctttaaaggtatcattaaatccataggggcgagctacgtactcagcctctcccaaaggtaccacatcaatacatacccccgacggcacattgagtttccagtcattagtcggaacccctgttataattgtctgttgacgaatgttccactccttgcccacacagctgttttctatccagatttcagaattgtcagcagtaagacgatatgcgacatcagcattctgcacaaacatagccggatgaggtttcaccttacgatgcatgatttcacgctggtcgttcaccaaattctgaacagccaacgtggaagagattaattccctgcttgttccataatgataaaactcacctccgggcaacggcaggatagccacactcaacccattcaattcttcatctgcaatacgcggatgttcacccaaggtcagtccgaactcggaatacatatcgtaatatgagagttcacctccttttttagaacgttttatcaacaaatcaacagcccgatcactcagcaaccaaataccgatatccatcaggaacaagtgagtttgcatcagttttcccaactcctcgaccgaaggtttctgaagcataaagtccaatttatcgggattgctacgcgaagaaacaaacaccccgtgattctttgccaaattggggtccacccaaagcccatagcacacaacatcaacatcaggaatatcctgaagaggttgacccgcacgtatatacacatctccgctggctatcaatgtgcgcagagaagccggagccttctccattatttgttcatataaaggaagctgaagtgagagcagattttgttccaagcgctgccccctcgcccatctaaagacaggaataggcgttaatattttacctgacggagcatatccgggcaaacgtcgactctgtccgccggcatgcaacaatattcttttttcttccctcagccattccaaaaagtctttatcgggcgcaatatgttgtttgcatgcctcaagcagccaagccgttcctcctcccgaccccaatttactaccaataggatcggaagtacaaaaccattcatcacgatcagccttttctatatcataaaaaaattccaccaaattaggaggaagcgataaaagttttttcataatgcatctttgtatttataatacgcaaagatgctgattttcccctaacgagccaagcagaataagaaaaatttagtcgttaaaagcaaatacacgctcatccaaaggcatcacttctttcgatccgggccgggtcacaggaactccgaaaggcatctgtgctattaacttccaatgcaaaggcaaattccatgctgcacgcacttcatcatctaccaacggattataatgttgcagagaagctcccattccggcatcctctaacatagtccaaatgacaaattgatgcatagcatcggcctgctccgcccaaacagggaaattatctttataagtgggaaactgttcctgcaaagcatgaacaacagacatatcctcaaaatatagaatcgttccatatccacaagagaaactaccatctattttctgttccgttttagcaaaagcttccgcagaaatccgcttacgcaaagtattttttacgatattccacaacttttgatgagcttcacctattaataaaacaacacgtgtggtttgtgaattgaatgctgaagggacatattcgacagcaaaacgaatcaaatccaacaattctttttcagacaacgtggatttattgtctatctgataaaaagtacggcggctctttatggcatccttgaatttctttgtcatatttagcatatttattatgagttattttacctatataaacaagcatacagcaaaagaagttcactttctttgcttttttcaatacaatcaactatttttgttagctaattattaacattataaacaacacattcaatgaaagattttcttaaatttacattggctagtttgataggcgtcattttagcaggtatagtgctcaccatactgggccttatcacagtagtaggcatggtagcctcatcagactctgaaaccatagtaaaagacaactcggtcttcgttcttgacttgaaaggcaacttatcagaacgtgtacaggaaaacccatttcaacagataatgggagacggcaatggttcttatggactaaatgacattttatcctccatcaaaaaagccaaagaaaacgacaagattaaaggcatctatatccaaccatcttatctggctacttcttttgcatcattggaagaaatacgcaacgcacttcaagacttcaaggaaagcggtaaatttatcgtagcatacgcagaccaatatacacaaggtatgtattatctggcaagtgttgcagataaggtaatcatcaatcctcaaggaaacatttcatggcacgggctggcatcccaacctgtcttctttaaagatttactggataaactgggcattgatgtacaggttttcaaggtaggcacttataaatcggctgtagaaccatttatcgctaccgaaatgagccccgccaaccgtgagcaagtcaccgtattcttaaactctatatggaatcaattattagatgatgtttcagtgtcacgcaacatttctaaagactcacttaatgcttatgcagaccaatgcatggatctctgtcaggcagaagaatatatcaaatgcggactggctgactcagtgttatataaagacgaaatgatcgcttatttgaaacaactgaccggacggaaagaagaccagagcttaaacagccttttccttgaagatatgataaatgtaaaaaagaatgtcccaaaggataaaagtggaaacgttgttgccgtatattatgcatcaggagagattttagatgctgcttcctccaattctaccgaagaagtcattgacggtcagaagatgacacgggacttacgcaggttgcgcgatgacaacaatgtaaaagcagttgttctgcgcgtaaactctccgggcggaagtgcttatgcttccgaacagatatggcgcgaagtagtacgcctgaaagaaaagaaaccggttatcgtctctatgggggattatgcagcatcaggcggttattacatctcttgcgccgcagattctatctttgcagatccgacaactctaaccggctccatcggcatcttcggaatgattccttcgggagagaagttattcaaagacaaactagggctggatttcgatgtagtaaaaactaataaaatggccgatatgggagccggtttcggtccactcgcaacgcgtccgttcaacaacgccgaacaggaagcacttcaaaattatatcaacaacgggtataagttattcgtaaaccgttgtgccgaaggaagaaatatgtcagcagcagatattgaaaaaatagctgaaggacgagtgtggacgggcgaaatggccgtcggcttggggttagtagataaattgggaggcatagatgacgcattagcagcagccgcaaaacgagcaaacgtagagaactacactattatcagttatcctgaaaaagaaagtctcttcatgaatctactgaacagccagcgcaagcactatgtcaacagtcagatgaaagaatatatgggcagtttctacagctatttcgaaatattacaaaacctgaaagaaatcaatcctgtacaggcacgtatgccattcgaattgaatattaaataacttttaatggagaataactttatcaaaatacataagtggctatacccggtttcgtggctttacggagccggcgtatggatacgtaacagactatttgattggggaatatacaaagaaaagagctttgatattccggtaatctcggtaggcaacattaccgtaggaggtaccggaaagacgcctcataccgaatatctgataaagttattgaaacccaattataaagtggcagtcctaagccgggggtataaacgaaaatcaaaaggcttcgtattggcccaaccgaatactcccgtaaatatcataggtgatgagccatttcaaatgaaacagaaatttcccgatatctatatggcagtagaccgtgaccgttgtcacggtatcgaggagctatgcaacggatataccgcccccggaaccgaagtcgtaatattggatgatgcttttcagcatcgctatgtgaaaccgggaatgaatattcttctagtggactatcaccgacctatctgcgaagatgctttattaccggcaggacgaatgcgcgaacccgaaaaaggcaagaaccgtgctcatatcgtgataataaccaaatgtcccaaggatataactcccatggatgtgcgggtgttgcgtaaacagatgggattatatccttatcaacaactttacttcacaaccctgaattatggcaaattataccctatcacccgacagggaaaagagtatccaatcgccaacattcataaagatgcacatatattgctcgttaccggaattgcatccccggctaagttaatccatgacttaagcccttataacgaacatatcaatccattgacatttagtgaccaccatgacttcacaccccaagacatggaaatcataaaaagccgtttcagacaactgccggaaggcaaacgaatgattatcaccacagaaaaggatgcggtgagactgtcatcccatccattgctggacgaaagcatcaaaccatttatctatgtactcccgatagaggtgagctttttacatgaccaacaagaattattcaacttaaatataaccgaatatgttagaaaaaatccaagaaaccgcagcctttctgaaagaaaagatgcatactaatcccgagacagcaattattttgggcacaggtctaggaagtttggtacacgaaattaccgataaatatgaaataagttataaagacattcctaattttcccgtatcaacagtagaaggtcacagtggcaaactaatctttggcaaattgggagacaaagacatcatggccatgcagggacgtttccatttctatgaaggatattcaatgaaagaagttactttcccggtacgtgtaatgcgcgaattaggtatcaaaacactatttgtatccaacgctgccggcggaactaatcctgcttttgaaatcggtgacctaatgattatcagagatcatatcaacttcttccccgaacatccgttgcacggaaagaatatcgaatatggtccccgtttcccggacatgagcgaagcctactctaaagagcttatcaacaaagcattggaaatagccaaagaaaagggcatcaaagtgcagcaaggagtatatatcggtacacaaggaccgacttttgaaactccggcagaatataaaatgttccatatcctgggagctgatgctgtgggcatgtctactgtccccgaagttattgttgcaaaccattgcggcattaaagtgtttggagtttcagttatcaccgacctcggcgtggaaggcaaaatagtggaggtttcccacgaagaagttcagaaggcggcagatgaagcacagccacggatgacaaccattatgcgcgaactcattaacagagcttaaaaaaagaatatgcaagaaacaaatagaacagaaattgcaaccttgggggagttcggcctcatcaaacatctgactcagaatattgaactaaagaatcccgaaaccaaatacggtgtgggagacgatgcagccgtcctcgaatttaaggacaaagaagtattggttactaccgatcttctgatggaaggagtacactttgacctgatttatacaccattaaagcatcttggatataaatcagccattgtaaacttctcagacatttatgccatgaatggaactcccaagcagataacagtatcgctagctgtatccaaacgcttctgcatagaagatttagagcagttctatgatggtttgaagctggcctgccaactacacaatgtagatattgtgggaggagataccacatcatcagtcacaggattggcaatcagtatcacctgcattggcgaggctgacaaagacaaagtggtttaccgcaatggagcgcatgacacagatttgatttgcgtcagtggtgatttaggggccgcctacatgggtctgcaactgctggaacgcgaaaaagcggtgttccaggaccaaaaagaagccaatcccgatttctccggcaaggagtacatattagagcgccaacttaaaccggaggcgcgtaaagatatcattgaagaacttgcccaagcaggagtaaaaccgactgccatgatggatatttcggacggactttcttccgagctgttgcatatttgctcacaaagcgataccggctgccgcgtttatgaggagcgtattcccattgactatcagacggctgtaatggcagaagaactcaatatgaatgtcactacctgtgcattaaatggtggcgaagattatgaactcctcttcactgttcccttgactgatcacgaaaaggtttcgaccatgaaaggcgtaaaagtcattgggcacatcaccaaaccggagttgggttgcgccctcgtcactcgcgacggacaagaatttgagttaaaagcacaaggttggaatccattaaaagaaaaataattcctactacaaaatgctgataataagcattttatttattatcagcattttttctttatataatatttgcaagattagaaaactttatctatctttgcaaccgcaaacaagaaacaatggtgccatagctcagttggtagagcaaaggactgaaaatccttgtgtccccggttcgattcctggtggcaccactcgaaagaacttttcactcttgaccccctgaaat

SEQ ID NO: 6694 - DNA, 8305 bp, Unknown
  gut microbiota DNA sequence
cggagtatatccgtggattgtccgtgaccaagacgccgaccttgaataaaacagtctcaaaatagaaaaacaatgagtaaaactgctactatcctcttcgccctatgtactcttttctgtagtgcatgctcctgggtagacgatgaccggtctgattgtcccacaggctgttggctaaagttatcctatacctacaatatgctgaatgtagatgccgtgaccactcaggtaaaagatgtcacgctatttattctcgaccaggaaggcaactatatagcccgggaggaagtagacagtcttacattccatcaaaatgaatgtacaatccaagtcccctccctgcctcagggagattacacctttctggtctgggcaggattggcggactcactttaccggcacactcccacctcactgacattattgcgcaatgaggcgggagaacagtccggacggctttcatctctattccacgggcggctggacaatgtgcatatcagtggcgaatatcagtttctggctctctctcttaccaaaaacacaaatgttctgagctgcatattgcaaagtcagtcggccgctccgctggaaaaagatgattttcgcctggagctgacagcccgcaacggatgcatggatcaccggaacactccgacagactccgttttcacctgttatctccccttcatgcaagagagcgccaacttggaagacatacaggtagtgcatgccggaatgaatacattacgactgatggaaaatgatgacacccgcttacgtttgatttatcagcctagcggagaaacgttgttcaacattccactgacacagtacttacttttatcaagcaatgtagaggcagcagccatgctcccacaagagtatctggacagacaagaccgatataatctgatatttttccttgagcctacaaataatccgtcaaagccttacatgtgcttgcagatgcaagtaaacggctggataatacgcataaacaatgcagaattagacaaataatttttctaattcaaacatttcgatttatattcgattccgttatgagaattacttattttgtaaaatctataaaaaaacggaatctttatgagaaagaagaaaaaattcaacgagtttataaacaaaactattgaagaactgaaagaagagaagcgttacagcacggcacacatctatcaaagtgccttaaacgctttctgcgaattctgcggatgcaaggttgtttacttccaccaactcaacagaagcacgctgaaagaatttgagacctacctgcgcaacaagcaactgagctggaacacagtctccacctatatgagaacgctgcgcggagcttacaacaaggcagtggaccaaagaataacagcagaaaactcccgcttgttcaatcacgtctacaccggagtgaaaaacaacatcaaacgtgcgctggaagtggaggagataaacaagctgctgaatgaaatccccttgaagaaattatcgaaagagctgatacagtgcagagtgtgggcaaacctgatgttccggctgcacggaataccttttgtcgatttagcccatctacataaaagcgacctgaaaggcaatatactttcctaccgccggcataagacaggcagacaaatgatagtggaagtgtcggaaaccacaatgacactgataaacaagtatcagaataccaatcagaactctccctaccttttccctatcctcagcggaagcaaaaccggagaagagctgtatacagagtaccaacaggcactacgaaccatgaattataatttagacaggctggcgaaaaaatgcggcgtatcagccaaagtcagttcatacaccctgcgccacacctgggacacccttgccaaatattgtaatttctccgaacaactaatatgtgaagcccttggtcattcgtcagtaaaagtgacagagatatatttaaaaggatttaagaacgaggttataaaaaaagcgaatgacgcaatcatgtcatacatttcaaaaaacagtaggaaaagggtataaaaaaatattaggaagataactgccattacctccctaatatataactgaccggcttatgcttacttcccgaccggtcacaaaaattaatacaaactacagtttactcaccaccacctgtgtgctcacgattggaagtagcaacctcaattgatacattaccatggcgtgtacctgaagccgacttaccgagtgcacttgccgatacaccccattcttcctgcacaccactgatttccaacatagtacctaccggcaatgtaacattgataggataagagccgttgagtgtagtcgccgttgcaccgaaacgctgtgccaactcttctatcaaaagagcagtcagtttgtctgcattaccttcagtactgatttcagtacctgccttataggtataagcagcctcacccacagacatatccttagaaccatacaggttgtcccatttgctttgttcaaactccacagctttcgtactcttcttctcagagaattccacatcgaggaacagaccataagaagcgaactcacttgcagcaacgattacatggctgtcttcaacacggctgtccgccttcacccattcaccgttcttatactgcttggcttccaccttacctgccagttcggtatccagttcgaaactcagctcgatagcctttttcaaagaaacaccctccttgttacaagaaagaacggcaccgaccaacatggtctcatcggtagcacgcgcagcacgtgccactacatcttccttcttataaagcggagagatgatgaccttcacatctgcatctgtatccacggcaccggcagcgatttcagccttcacttccaccttggcttcctcattgcctttcaatgtttccgtttccacttttccttcacttggtgcatcagccgatacgctcacttccttcttcacgtcagaagcaagtgccgcattccacaccagattctgagtcttcttcacatccgcaacagttaatgttcctgtatgtgacaacttaccttcggcttccgctttcagttggtaagtacccgccttgacatccttaaacagataaacaccgttggcatcggtcgtggcagaattaccctctcccaatgaaaccttcgcacccgagattccctcaccgttcagactcgtgataactccggtcaacgtattggaagcaacctcaaccacaggcggagtcacatggtcataatcaggatcatcgtcactacaaccggcaacccccatggtcaaaccggcaatcagaagcatataagctcctcttcttacaaaattgtacatagtaaaataattaaatttaaaaattatgtttagttatatcatttacaacagattgatgcaaaagcacacccctccggaaaaatatttgccgttttgcagcgaagactgtaccagcaagtgcttccacaatttccagtcaaagcccacgttcacatcatcgcccgtatactccgctatcaaccggaaattcttctgaaacgaagggctgaacgtaataccgcccaccggtccgttccatttcgagttcagactccaccgccagtgccggtaagccatgtgcacacccagcacattccctttcagccggaaatgcttggacaatgccacataataattggaaaaatagctgtttaccacacgcgatacatccgtctcatgctgcgtcttcagccagtttacacggaaatccaggtcattgacccctatcgccacactcggccaccacttacccggcttctcacgaaccggctgtagcttgagcgaaaaataacggtccttgcggtgcagccccggatgttccttatcttccacaccgtcaacaatcttcgtcgatttcaaaagcgtacaagtatacgcaatctccatccacctgaacggcgtgatactcaggtaataactcatcgtatgatatttatcgcctttatacgtcagcacattcggagtaaactcccgattcaggaaatgcacccctgcgcgtgcctccccctcttcacccatgtccgccgaaggaacatgtatcaaaccgctcatgcccgtatactgctgtgccacggccggcaccgaaaacagcaatgccatgaagcaccccattatatatctcattttcattcagtacctcctttctgtcgaacagtaaaatcaggcgtcatgccattcgcaccccagtccgaccggctgcggtcaaaccatccttcccgttcattctcttcggggtcggtcgtatacattttacccgcataagcatccgcctcctgattatacgtcaagcggaaattggatgccgggcggaaacgcaccttcctgttactccgtttataaggaggaatcatcataaccaccttaaaaccgaaattctcttttcccttatcggtatattgggcaaacacccccaccgtgcaatgccggaaatgcctcatcgcttctccctgcacaccgcagtcttcatacaggaaacgaccgccgcgcacccggaattccgtattcaccccattcagataagcacgtaccccggcaagagccgtcaaacgctccatcggactgcattcccatcctgccgccatggaacaaaaacccgtccatcccgcctgtgcgtccaaggcaagccagtccgtagccgcatacatccacttcacatccagtccgtagcgttccatcgcaaacagtcctccgctcactttcagaaaatgcttccggtgccagtcccattccttgctaagcacagccatgttcagacggactttcttataacgatcgccataatcattataaacaggcacaatgacctgtcccgccaactgccagcggtttcccatataccacttcactccgggtgtcaggttcaccagcacctcatatatcttattgtgaaaaatatcacgataatgcaattcggctcccataaacacatccacccgcgtgttctctgccgattgcgcccttccggtacaaacaaacaataccgacaggcataacggcaaaaaacatcgatacccaattctacttatccaaaacttcatacaccgaatgtttactcttgaactcgggaaccatttccttcatacgttttacaatctccatatcatcctcttccacactggaagccaccagctcatccacctgccggcacacatcggcataatcatactcacgcacctgcgcaatcttgattttaggatgaaaagtaggcttggtcgtctcttcttcattcaatacctcctcatacagtttctcaccgtcgcgcaatcctgtaaacttaatctccacattcttggctccgcttaactgaatcatacgtcgggcaagatccacaatcttcaccggcttacccatatcgaacacgaaaatctcaccgccattgcccatcgttcccgcctcaagcaccagcttacaagcttcgggaatcaacataaagaaacggataatatcgggatgcgtcaccgttatcggtccgccctgcttgatttgttccttaaacagcggaataaccgaaccgttcgagcccagcacattaccgaaacgcgtagtgacaaactgagtgactccctccactttgccatccttctccgccttatccagactctgcacataaatttcgcagatacgcttggagcaccccatcacattggtgggattcaccgccttgtccgtagacaccatcacaaacttcttcgcccgatacttcacagccaagtctgcaatgatacgcgtaccctccacattattacgcacactctctcccggattattctccatcataggcacatgcttatacgccgccgcatgaaacacataatcaggacgatatataccgaaaatctcctccatgcgttccttcatgcaaatatcactcacgatggtttccgcctcgatgtcgggccatttgcgtgccatcatcagacgcacatcatgcaaaggcgtctccgcctgatctatcagaataagcttttgcggagtaaatttggcaatctggcgcaccatctcgcttccgatgctgccggcagctcccgttatcagaatactctttccggtaagcaattcctccaccgctttcaagtcgatttctatcttgtcgcgaggcagcaaatcttcaatatccacctccttgagctgacgatggtcaagatcactcttaccgtcccactcctgcgcggcagaaatcatatagattcgtatacctgcctttatcagcctctccaccatttcggggttattccgaatcgcctcattcttcaagggagaaaccagcaaagtatgcactccgaagtcctccatcttctccaccaaatgctcatcgttggaataaacccgcttccccatcaggaagcggccctgcatatcctgcctgtccgaaacgaaaccgctcacgacatatcgggagtcaacctggttgcggatactcttcgccagtcccactccgccggctttcaccccgtagataaacacacgttttccgcgtcgtctgttaaaagtagagtcatacagatatttcacaaaaacccgcacgctccacatcatcagaacagccagcaatgcggcaattccgatatccttcataccgactgccatcaaccaacaatcctcattcagcagatacctgacgcctataatcatcagcaagcccgtaatcatggcaaaacccatccgctgcaaatcgataaacgaagaataacgaatcacccccgaatacgtatgaaacatccgaaagctcacaacatagaacaacaaataaaagcagaaagcccctgtcagttgtacaaagttctgcaaaaaagaaagtgttccgttattcaaagcataaaccaacacatccgcgcccagcactatcaggcaatccaaaacgaatatacaccaatacggcagcgcatctttcgaaaaataccagtttgataatttccaaatcatatccaaataccgataataatccattatccttttatacaatcctttattgtctgcacaatgtatgccacatcctcgtcacttacacaagggcccgcaggaagacacagtccggtcctgaagatttcctcttccaccccgttggtataaacaggcgcatccgcatacaccggctgcttgtgcatcggcttccacacaggtcgtacttcaatcttcctagcaagcatgaaaacacgcattgcttccacattctcattaggctggcaatccgtgatggcactatccaccgccttaatcaccccggcagctcctcccaccgcagtcttgaccacttccttatacgcattctcctgaccgacaaccttcacatcaggatcgatggtagccgtacacagccagaagttggcatcataacgcgcatcctcaggctgcttatgcatacggatgcccttcacatccttcaacagttcttcatacaaagcctgcacatgcttatgatgagcaatgtgcgcctccgccacggtcatctgtccgcgaccgataccggcacaaatattactcatacgataattgtagccgattgccgtatgctgataataaggataagcatcgcgtgcctgagtagcataccacataatggtatttttatcttcggcattccggcaaatcaaagcaccgccgcccgaagtggtaatcatcttattgccattgaatgacaacacgccaaacttgccgaaagtgcccagcaccctgccgtcgaacttggaaccgaacccttccgccgcatcctccaccacaggaatgtcatagcggtttgcaatctccataattctctcacaatcgtatggcataccgtagagcgccaccggaacaatcgccttgggcttctttcccgttttctccatacggtctttgatagcttcctccagcaacaccgggtccatattccacgtatctttttcagagccgacaaacacaggctttgcacccagataagtaaccggatgcgacgaagcacaaaaggtaaagctttgtaccaaaacttcatcacccgcctgaacgccacagccaatcaatgcaagatgcaccgctgccgttcccgccgaaagtgcgacaacttcattctttcctccgacaaagttcttgaggtcttcctcaaaagcatttacattgggacccaaaggcactacccagttggtatcgaatgcttccttcacatatttctgctctattccatcttcactcatgtgagcaagacagaggtaaattgttttttcaggaatgtaactcataactactatattaattcattattatatctcatattcttacctaataccg

SEQ ID NO: 6695 - DNA, 6787 bp, Unknown
  gut microbiota DNA sequence
gctgacaggaatttgcttccgaagaagactgttttgagggtggcgaatacattcatgaggcactttttttagatttgacgaactacaaatatacaacatgaaaaagcgtttgtcaagagagaagacaaattaatcaaacccgggtacaggatatgacggagcctgacacaatgacatatatacgtgcaggctcatgcgtacgtacgtgtagctcgatacgtatatacgtgtgacctgatgcgtatatacgtgtgacctgatgcgtatatacgtgtggcctgatgccaccgtatgtgtagtccgatgcgtacgtacacactttacaaacagggggatgtgtcaaaatgtggataatgctgtcgtttcgttcgtaggggcagggttcgcctgcccgaagacacaaagcaaactgttttcgggtgagcgaacctcgcccctacagctgacgatgggatagcacggtttagttttggcacactcccatgctgcataaaacctttggattcaaaatgtacgtcattgcttaacttggaattcatcttttcatccagactgatatgaatctcttgagaggtttgttcgactccagagataagaaagtaatctaatatctggcaggcaacacgaggctggctagcatgttcaaataatcgtttttcataatgcgaagtaagcaatacttcacgagtataaaaaataatccccgctaaaaatctactgagcccaaaaaagaccttgatgttttcaaaaaagaccttgaggtttcttaaaaacatcaccatcttttttaaaaagcccggtatgttttttatgtaagggaagatggaaccaccctcaccaagtcggtcgtttctccttttccgttcatccttacatattagccaaaacgcattatcaatcaatcgtttaacactgacagagcatcccctcattcacctttcagccgtgcttcccaagctacttttaaaccagccttcagcatttctcccgccggaagaaattttacagatgaaaggagactgcaggggtggcaacaagatgtccattcactaccggagccctaccaacaggacatttcagcggtagatgaaaggaggaaggaagaagcaatatttccttcctccgctactatgatatctgccggcttctcatcaaatgttcgccgtcgagtccttcagattccacttcacgataaacctttacccttgggattgtgtctaaacactgataatgctgtcattttgttagtaagggcgagattcgctcgcccaaaatagcttatttgtgtattactcccaagatcgtgaccgttggttcggacaggcaaaccctgccctacagttgatgatttgatagatcgggttagctttgatacatccctatcagactgcgacaaagactttttaaataatgcctatataatctcaaagcttccctccaaacggatatccgccgatgaagccccaaccattactttgaaacttcccggctctacacaaaagttcatattcttatcccaaagccctaaatcctgcggacgaagtttaaaacgaacgattttttcctctcccggctccaaagaaatacgctcaaacccacgcaacacttttgtgtaagtcgtaacactgctcacttcatcacgcaaataaagttgtaccacttcatctccttttacctttcccgtattcttcactctgcaacttatatttacttcaccctgtaccccttgttccttgggagttatttgcaaatcactataaacaaaagaagtatagctcaaaccatatccgaaaggataaagtgcaccataaaccgaagtacttgcagggacatccgatcccggtttaaaaggaaaggcaaatggtatttgtcctactgatttcggaaaagtcacagccagtcttccacccggattgtaatctccaaacaaagcctcagccactgcctgcccgcaaaactcaccgggaaaccaggcatgtaatatcgccggaacattagccgctgcataattaatggttgccgcacgaccgtcaagcaacaccaacactaccggcgtgcctgtgcccatcacagctttcaacaactcttcctgacggccaggcagctccaaactggtgcgagaacggtcttcccttaccgtcagttcattaccgcccagcaccataatgacaacttctgcattttgcgcagcggcaaccgcctcatccatcagcctgctttcttcttccgtcttcgggaaatcaagaatttcactttccgggaaatgcgggtctataatatcacaacctttccgataaaccacctctgcatcgggaagcatttcctttattccctgaaaaactgtctttatcggtgcattggcaggtccgtaacggcagataagttgcttcttctcttcggcattcggaccgataacagccaccttccgaatcgatttggataaaggcagcatctctttctcattcttaagcaagaccaatgactgacgcgctgcatcgagtgccaccgcctgatgttctttgctatgtactatcttctcggccagttttccatcaccgcgatacgggttgtcgaataatcccagccaaaacttcacccgaagaacctccgccacacgcttgtccaccgtatcaaaagaaatctttccatcggcaattgccttacgcaaaggaattataaactcgtcgggagcggtaaaattagtacgcacattcaaaccggcattgacacactgcgcaataccgtcttcgtatgtatcagccaccttatgtttgcctgcaacaaactccaccgcctcactgtcagaaaccacataccccttgaatccccattcctgacgcaagatttcggtcaggaaatgatagcttccgctaatcggttcaccatcataatcattataagagctcatcacgcccaaagcccctgcatcttggaaagctacccggaaaggctccagatagagcgttctcatttcacgcggtgctacatggggatcggtacgcgtttgcccatcgcgtccgcccacaggaatactgtaaacagcaaaatgtttgggagtggcaaccaaattatgcttttgaagggtagttaccatttgtttacctagttgtcccaccagataaggatcttcaccatacgtttccacacaacgtccccagcggggatcttgcgaaatatccaaaataggagaataaatattggtatagcccaaagcatctgcttcacgtgcctccacttcggcaatacgcgcaatcagttctttgttccaagtggcaccttgtccacactgggcagggaaataagtggcacggtcgtgacacaaaccacgtataccctcgtttgtaaagtcaaccggaatacccaaacgagtttcttcaataaaccaccgctggatagcatgcttcgtatctacatgcctggtgtagggaaaggcatactctgaacgaaacttgccgagaccgttatgctcttcatcaatatttccaatgccgtctttccatatttcggttttccagttttcttgaggcaacgcatctttcaaaatacgccccgaaccgtaaagcgtggccatctgacaggttttctcatcaagagtcatttgactcaacaaatcctgcacacggtcttccaacggagccttgggatcttcataaatatccatcactccattcttattaaagtcaatccagcctttatgataaatacttttttgaggggatgccgcactcatctgagagtgagtacataaagccaacaagcctaataatacaatctggtttttcataagtaaatattctttcgttgttcgatatgcgtgttttattttcagtaaccaattacttatctgctcccaaccatgtccatttatgccaaataccttccaacggtccttgcttgtgactcttcaaccaccatttacagaaacagacctgcaacaagaagagcacaaacccgattatcagactaagcgcatagccacagtaaggagcgagatacagtccgaatgggaaataaatgacagcaccggcaatagactgtccgatataattgctcagactcatttttccataaaagcgaagattggatacaaacttcttgaagccttccttttgataaagcaacacaaaagatgcaaccaacactaccgtgaatgcaaacttctgccacatatcgaaagccgtccctactgttccccgaacaagtaagctgtcacttgccatcaccaactctttcaactggaacaacggagcaaatgcgatggcagaaataataagtgccttcacccagaaacgtgtattggtttcggaagaaacaaaaagctgcttacggccgatatacagtcccatcaggaacaaaccggcagtctgccagaaacgtccggcacccaatgcccaatacaaactcgctttttgaccgtaagtgatgttcttccacaagaactctcccaaattcccctctttcgtataagccgccacttcctgatacattgctcctacccccaaatcgggcaacgtatgcgacgggtcgtacaaacttactatataatgataccattcaacaggttgcagtaaaaatacaatagctgtaacaagaatggcacaatcactccatttgcgcaccacaaataatacgacacccactacaacaaacagtaataggacatctcctgccgggaaaaaagcagcattgacagtagcaaaaacggctaataagacaagacgccaaagaaaacgatagccaaaatccttccctttccgttgctgattagccgactgaatatagaatgtaaatccgaacagcaaagcaaaaatagcataagctttcccggcaaacagagaaaaagtaatgttaaagactccgtcattcagaatattcaaccatccgggatcacctgtaggataaaccggaaagataaagtgttccaagttatgtaccaagagaattgccatcacagcaaatccccgcaaagcatctaccacttcgatacgtggcagtttttctgataattgtttttccatgaaatagatattgttaataaatagatacaagcaacagatcctccacttcgttcagaatgacaaagtaatagaccatttcagtcttgacgcattcttttttttcaattgagtgcaaagataaccttctttttccaactattcattcgcatagatcaaattctttcgaatgcatctgcctcatcctgaacgaagaagaaacatacagtccgacagtatgtaaaatttaactatttactcttccgcccaaactattatttttctacatttgttatcattgaaactttaaatacgaaagacatgaaagcaaatcctgtatttagtttgtacatccctaccaaattgatattcggttgtggggaaatcaataagttatcaagtgaaaaactaccgggaaagaaagcattggttgttatttctgccggaacttccatgcggaaatatggatatctgcaaaaagtactcgcccaactgagactgaatcatgtagaaacggtagtttacgataaaatacttcccaaccccatcaaagaacatgtaatggaagcagccgccatctgtcgcgaagaaagatgtgactttgtggtcggactgggagggggaagttctatcgattccgccaaaagcattgctgtaatggcatgcaatgacggtgattattgggattacgtttcaggaggaacaggtaaaggacgtcccatcagcaaagctctgcctattatagccattcccacaacagcgggcacaggtactgaaatggacccatggacagtaatcactcatgaaacggcacaggagaaaataggcttcggctgtcccctcacctatcctaccctttccattgtagaccctgaattaatggtatccatcccgcccgaacttaccgcttttcaaggatttgatgcctttttccatgctgccgagggtttcattgccaactgtgcaacccccatcagcgacctatatgcattggaagctatccgcttattatataaatacctgccggtagccgtagccgacggacaaaatctaaaagcacgcgccaaagttgcctgggcgagtacactcgccggaatggtagaatctacctccagttgtacttccgaacattcactggaacatgccatgagtgcctactatccgcaacttccccatggagccggattaatagcactttccgaagcttattttgaaactttccgtcacgactgcaccaaacgctacatgaaaatggccgaagtgatgaccgaaaagaagagtaatcgtgcatccgacttcatcgatgcactagtaacaatgcaaaaagaatgcaaagtaaaagatttaaaattaagtgaatatggcatccggcccaatgactttcctagaatattgcagaatgcacgtgacaccatgggcggtttattcacacttgacccacatcccataaccgatgacgaaatactgaatatattagaaaagtcttatcgataaatacaagaagggctatagcttgatttcctttgccatagcccttctttacattatatttctactctcccacattctttatattcaagattcttcatacatcgacaacattcgataacatcacccccttcatccccctctattttccgttgtctaaagaaaacccatatcacaacattttaatcatttactaagttctttcagaactttgcaacattgctacaaagcctgtataccatttgatggagtatatgtataggtataatatggcttttgtatctacttttattctacctaattat

SEQ ID NO: 6696 - DNA, 28411 bp, Unknown
  gut microbiota DNA sequence
gctgtgcattttttgcacagctatcaataaagaagggttgaagctgtaaatgctcaaagtagacattctagtctgtaaaaagcaaaatgtttctattttatgggattatcttaaaaccctatgtatgctatagttaataacatagttattataataagtgttgaatttagattaacgggaagggggcaaggcgttgttccttttcttttttaatcttctcttttctccaaaaaagtttatctttgcattattatatgctaactaatttataattttatgaaaaaacacgctaatcttttttgtgttggtgcagccttgagcttgctttgtgcttgtgagtcggttgtaaaagctcccgaacctattcttccgatacccgaagccaagcaagtggaatggcaaaagatggaaacatacgcttttgtgcatttcggtctgaatacttttaatgaccgtgagtggggatatggtgattctgatccgaaaacatttaatcctgcgaagctggattgcgaacagtgggtgaagacttttgttgctgccggtatgaaaggggtaattcttacagccaaacatcatgacggtttttgcctgtggccgacgggactgactgaatattgtattcggaatactccttataaagatgggaaaggggatattgtccgtgagttgtcggaggcatgtaaaaagtatggcattaaattcgctgtttatctttctccatgggatagaaatcaggctatttatggcacaccggaatatgtggactatttctataaacaactgcatgaactgttgactaattatggtgcggtgtttgaaatttggtttgacggagccaatggcggtgatggttggtatggtggtgcgaaagattcacgtactatcgaccggaagacttattatcagtatgaccgcgcttatgaaatgattgataaatatcagcctcaggcagttgtcttctccgatggaggtcccggttgccgttgggtgggaaacgagaacggatttgcaggagccactaactggtcattcttgcgtgccggagaggtttatcccggttatcctaaatatagagaattgcaatacggtcatgctgacggtaatcaatgggtggcagcagagtgtgatgtttccattcgtccgggatggttctatcatccggaggaagataatcgtgtgaagacagtagaacagctgacagacctctactatcgcagtgtgggtcacaatgcaactttgctgttgaattttccggtagacagaaatggattgattcatccggttgactctgctaatgcagtggatttccataaaaatattcagaagcaattggcacataatcttttgtcgggtgtcgttgctgaggtttctgacgagagaggagggaaatatacagctaaggccatgacggataatgattacgatacttattgggctaccaatgatggtgtggtgtcggcaaccgtagagtttgatttgccgcaacaggagaaggtgaaccgcatgatgctgcaagaatatattcctttgggacagcgtgtgaaatcttttgttgtggaatataataaggatggtcaatggttgccggtgaagttgaatgaagaaacgacaacagtgggatataaacgtttgctccgttttgagacagtaacaaccgataagcttcgtgtgaactttacggatgcccgtgcttgtctctgtattaataatgtagaagcctattatgccggagagactgctgatgtatcgtttgacaatacagttgcggatataaagagttatccttttacattagtcggtgtagatgaggcggaagctaagaagtgtgcagataaggatgatactacaacgtgttttgtagatggtaacacggtagttgttgacttgggagaggaacagactgttgcttctttccattatctgcccgaccaaagtgaatataataaaggtttaatttccggttatgagatatctgtaggtacggatgccaatgcaataaataatgtggtaactaaaggcgagttctctaatatcaagcataatccgatattgcaatcggtttatttcacccctgtaaaggcacgttatgtaatgctgaaagcagtgaagatggtgaatgaaggcgagacaatgggatttgcagagattggtatcagataagattgttctttaattgttgatggaagacagtaacaccgcaggggggggaagaaaaacttctgcctctgcggtggttatgctataataaacggtatattcctccggcaagtacccgtagtacccctttcatctctagttcaaagagcagggcgctcattcggttgacaggaatattggtatctaccaccaatgtgttgatttgcaacccgtcgggtctgcttttcaatagccctaccaccttttcttcttcttcgcttaagtcgggaaacagttctcgttgccggggtgtggatgatgttttttctttatcttcactccatcccatggtttctacaaaatctttggctgataagattagggcagcctgattgctttttatcagttggttgcatccggcggagaattcatcatttatccgtccgggaaaggcgaaacaatcccgatgataacttccggcaacgccggctgtaatcagtgcgcctcctttgtcggcagactcaacaacaatagtggcatcgctcatccctgccacgatgcggtttcgcctgacaaagttctgtcggtcggggtttgtcccactcataaactcagttaacagtcctccctgtttcagcatttctattgccgttttacgatgagcagaaggataaatgcggtccagaccatgtgccaatactccaattgtattgaggtggtttgccaatgcagcgcggtgagcatgaatatctatgccgtaggccaatccgctgacgacaagtacttccgggagcattgcggctaattcttccaagaatcggatacagatatcctgaccgtaggcagtggcatggcgtgtacccacgatattgattattttcaaagcattcagatcagcgtttccccgatagtagagcacaaggggagcgtcatcacattcacgcagccgtgaaggatagtcctcatcggtcagtgtcagacaacggatgcggttcgtttcggtaaaaagaagctcttcttcggcacgacggaacgcttcaggacaatccaaagcttttatctgtttgggagaaataccgggaaccagttcgcaaaggtctttccggttgcggaatacggcagtggcacttcccaatgcgtcgaccaatttatggatgccgattagccccaggcccggaatgcgggtcagggctatggaatatagttgttcgtctttcattgtttgttcagatagggtgcgaaagtctcgtcaaacagagcactgtcacccaatctgccgtttactacacaaaccgattctacggttgctttgatggctaccttcatgtcgggtaggcggaaaatgtcttggtagaatacatacttgatgccttccttcttaaggtagagtttagatacgaactcgtctccactcttcagtggggttttgaaagccatggtgaggcgagccactaccggatccactccttcttcgtgcagtttggcaaagctgatacctaccgaagtgaggaactcgtggcgggtatgttccagataatgttggtaattggcattattcacaattccctgcaggtcgcattcatagtcgcgtaccttcatttttaattcataaatatacttttccatatagcaaaggtaaggaaaattatgtttctttgcagtgaaacaagaataaagatatgatgaaactgtatgcttccccgttacagggcttcactgaagccccgtggcgcaatatccaccatgagctattcggtggcattgacgcttattacaccccttttgtacgcgtagagaaaggggagttccgaaacaaggatatccgagacattgaaaaggaaaacaacaaggtgacttgtttgattccgcagttgatagcttctacgccggcagagttggaaaagctggtcggtttgtttttggaacgcggatatcgtgaagcggacatcaacatgggttgtccgtttccgctgcttaccatgcggcacaagggctccggtattttgccttatccgtcagaggttaaagtgcttctgaatgagctggcacattatcctgaaatgaaattctcagtcaagatgaggcttggatgggaatattatgatgagtggagacaggtgcttccgttgctgaatgcggtacctcttacacggattatattgcatccgcgcataggtcggcagcaatataaaggtatggtatataagaaagaactgagactgtttgccgagatgtgccagcatccgctggtttataacggtgatttgcatacaccggatgatatccggcgaatcgaagaggagtatcccgacttggatggagtgatgatagggcgcggtttgttagccaatcctgcgcttgccatggaatatcgggaaggcattgttcttccgcgtgaagaattatatgccaaggtaaatgttttccataaccgtctgttttaccattacgagtcttacctgcaagggggtacacaacttttgagcaaaataaagccttattgggaatatcttctgcccgacatggataaaaagctgaagaaggctattctgaaggcttctcatgtagaataagtatcttgaagcagtcggcattgctttgatgtctaaaaacatactataagaattctttcgaaaagtcggtttatcgggaatttgtactacttttgtagcatatcaacttaataaaaaaactatgattaacagatttgtattaaacgaagtgtcttatttcggaccgggcgcgcgtgaagtgttgccacaagagattaaccgtcttggtttgcacaaagcatttgtatctacagacaaggatttgctgaaattcggtgttgccgacaaggtattgaaggtattggagaaggcaggcattccatacgaaatattcagtgaaatcaaaccgaatcctactgtcgccaatgtgaaagcgggagtggaggcatttgccagatcgggtgcagattttattctggccatcggtggcggttcgtccatcgatacttccaaggcgatcggtatcattactaacaatcctgaattcagcgatgttgtttcgttggaaggtgtggctcctactaaaaagaagtcggttcctatcattgcactgcccaccacggccggtactgctgccgaggtgactatcaactatgtcattacagatgaagagaatcataaaaagatggtatgcgttgaccccaatgatattcctgccatcgccatagtcgatgcagagctgatgtatacgctgcctaaaggattaacagcttctaccggactggatgctctgactcacgccatcgaaggcttgataactaaaggtgcatgggaaatgagtgatatgtttgagattaaagcaatcgaaatgattgcccgtcatttggaaacagccgtgtccgaccccacgaatgctgaggcgcgtaacggcatggcggtagcgcaatacattgcaggtatggcgttctcgaatgtcggtttgggtgttgtgcatggcatggctcatccgttgggtgctattttcgatattcctcatggtgtggcaaatgccttgttattgcctgttattatggaattcaatgctccggctgctttgcctaaatatgtcgatattgcgaaagcaatgaatgtttataaagatggaatgagccgggaagaggctgcaaaagcagctgttgatgcagtcaagactctgtctgtcaaggtcggcatcccccaacacttgtcggaactcggtataaaagaagaagatttgcctcgtctggctgcttctgccattgcagatgtttgtactccgggcaatccgcgtgaggtgacggaagaaataattctggaattgtataagaaggccttctaaaggcggtttcggcagttgttgttttatggaataatttaagaggggcatcttgtgaggatgtcctctctttttatgcttttctttttccttatttgattaaatcttcttttatcattcatatcgggataggagcattacctttagtttcttttcagatactcatatccaatcctgcaatacaggcatttctttttgtcacaatattccttttttagttgtatcagtgcctgactatctgatgcattggctgcttttattccacattgttcccacatgcgggtaatatagttatattctgccttcagttcctctagaaaagcaccggcacgtgcacaatactcttcttttcctttgtgtactccgtaactgtatagaaaagttgctactgtattgattataagtaagtcaagagaagaattacttaatgtttttggtcgggaaggcgaagggtgttcgaaagtatagtgatttacccaatatgctgaagtacctccttttaggatttcatgcactttggttactgtttccgcttccatgatgcgcgaaagcagtccgtaagagcgatgatacagcactgccagttgcgctattcgtatatgggggaaattggtggggcgcagacgcaggaagcgccattgagaaacatccatcggggtgagtccgaatttatgcgaaaggtattcgtattcctttttcaaacgtaaataatactcgtcgccggccgttccttgaagcagtcctgcctgtccgaagaaaaaggcctctatttgaaataactcatcccgatgtttgtctactgcccgtaaaggaatccggtttgcccaagtctcaaaagcatctccgttgaggccaaagccgaaattgcgtgccaaagtaatgaaaaaggcatcttcccaattgctgttgcaacgtttgagccgttccgatagttgcgaggctttctgttcgaaacgttccagttgtagggcagacatccaggagtgtatcgtaaaaatggaaagggtggggatgatgcggtagcaaggcggataactttctgtttcaaccagttcgtgatagttccggcaaacatagtcggggcaggtgagtatcaattgaggaataggctcgccgttggtacggtgcacatcaatatccgcatctgatgtaatatgcagaataacagagtcgtatgtcgcatctgtatggtgtccgtgttttaaccaatccgaagaatgttcatgtatctccacattgcctatccataaaatgccgttcagtttgacttttgcattaaaaaaatcgggaccggcatttgtgtttgccagtcccgtatctatgatttcaaccttttggccagttgtggtttttagttcctgaagcggaaatatcttgtgtttccaaatgtaatgtagtagttgttccatgttaatgaggtgtaaatgttaggcaaatgtaatggtttacagtgaaaaaagctatctttgtagcaaaaatatatagacatacaatgaaaatagcattaattggatacggaaagatgggtaaggaaatcgaaaagattgccattgcccgcggacatgagattgtgagtattatagatattaataatcaggaagattttaactccgaagctttcaaatcggcggatgtggctattgagttcactaatcctacagtggcatacgataattatatgaagacttttgcagcaggggtgaagttggtatcgggcagtaccggatggatggatcgccacggtgaagaggtgaaaaggctttgtaccgagggaggaaagactttgttctggtcgtccaattttagtctgggagtagctattttctcggctgtcaacaagtatttggctaaaattatgaacaatttcccggcttatgatgtctctatggtggaaacgcaccacattcataaggtggatgcaccgagcggaacagcgattactcttgcagaaggtattttggagaatatcgaccgcaaggataaatgggtgaagggaactttggtggcaccggatggcagcgtgtcgggcaatacggtttatgctcctgatgagcttcccgtcagctctgttcgcgaaggtgaagtgccgggtattcatactattcgttatgattcggaggcagacagtatttcgattacccatgatgcaaagaatcgtaaaggatttgctttgggtgcagttttggctgccgaatatacggctcagcacgaaggatttttaggtatgaatgatttatttcaattttagaatatgataaaagcaacacgtgcacaatggattaagtttgtcattgtattggtactttggctggtgtttctcgtttggctgaaaagctggctggggctggtggtagtgccgtttatcttcgatgcgtatattacgaagaagattccttggacctggtggagaaagtcaaagaatcccactgtggtgaccgtgatggggtgggtagatgctatcgtttttgctttggtggcagtttacttcgtgaatttgtatttcttccagaattatgtgattccttcttcttcactggaaaagtcattactggtgggtgattatctgtttgtcagcaagttgagttacggtccccgcgtaccgcagactccgttgcacatgccgctggcacagcatacattgcctgttttcaattgcaagtcttatttggaatttccgcaatgggactataagcgtgtaaaaggtctgggagatgtgcagttgaatgatattgtggtgtttaatttccctgccggagatacggtgatggcaaatgtgcccaatgatgatatttatcgtgtgagctatcaggccggtaaagaactgactaaaccggtggatatgaccggaatgactcccgaacagcagcggatggtgtttgattattattatcaggcaggccgtaaatatatcgatgagaatgccggtacttatggcgaagtgattgcccgccccgtagaccgtcgcgagaactatgtaaagcggtgtgtgggacttcccggacaaacgcttgaaataaaagaccgtgttgtctatctggatgggaaggcaaataaagaacctgataacgtgcagtatcgctatctggtgaaggtgcataaagccataccggatgatttggcacacgagctgggtatcagccacgaggatttggcttattattatccggaggcttcggcttataatattcctttgacagagaaggcaaaagccggtttattggcacgtaaggatatagtggccggtatcgagaatgttccgggtgatgatgcgggaggcctgtatccgctgaataaactgaccggttggactaccgataattatggtcctttgtggattccgaagaagggtgagacaatccgactgacattggataatctgccggtttatgaacgtcccatccatgcatacgagggcaatgacctgaaagtgaaagatggaaagatttacatcaacggaaaggaaacaaacgaatatacattcaagatgaactattactggatgatgggtgataatcgtcataactccgccgattcccgtttctggggatttgtgcccgaggatcatgtggtgggaaaacctatctttatctggttgtctcttgaccccgaccgcggttggctggacggcaagatacgctggaacagattgttctcttttgtagataatattaaatagtgcacattccccgtgtctcaatatggataaaggcaatgcttacggcagtcgttttggtgctgctgataaagacattcgctttcacctcctgcaccattccttctaccggcatggaaaacagcctctatcagggcgagagggttttggtgaataaatggagttacgggtttcgtgtgcctttttccacttggcgatggttggaaaaaccggtcgggaaaggggatatcgtgttattcaataatcccagcccgcgctctttgcagacaatggttggtaaccgcgagttgtttatcagtcgttgtgtcggtattccgggagatacattaatgttgaatgaggagttattgctgacggacgagcacgtgctcagccccgacagcaagtctctttatgtatatccgcatacggcagaagatactgtgttgctggctatgcagcaattgggtattacaggaaatcagctggtagggtatatggatgaaaggtatatccgcagtttcagtcactatgagtattatttacttgagcagaagctggcaggaaaagtgagtctgcttcccttgtatcagaaggaggtgagcaagagtcatccgtttgtgattccggccaaaggcagatcggtaaaggtatatccgtggaatgtgactttgctgtgtaatactatcatgcgccatgagggaaagcgggcttctgtcaaaggagatactctgctggtggaggacaagccggtttcggcttatacattcgagaagaattattattggatggcatccaataatccgataaatctatgtgactcgcgtcttttcgggctggtacccgatgatcatttgataggcaaggcctggcgcatctggttttcctcacggaaaggacgcttttttgaacgagtacaataatggagaaaataatatatgtaggctctgcctatttagctccggtagaatattataccaaattgtttgcatacgataaggtgtatgtggagcgttatgacaactatgtgaaacagacttaccgtaatcgttgtgtgattgcagcagccgatggtccgttggcattgactattcctactgaaaagagtgacggtaataaatgcctgatgaaagatgtccgtatctctgatcacggtaattggcggcatatacattggcatgctttggtagccgcttataagcatagtcctttctttgattattatgccgacgacttccgtgtgttttatgagaagaaatatccttttttatgggatttcaatcaggaattatgtagtttgatatgccgtttaattgatatcgaaccccagatggaaggaacggccggctatcgtaccgaatttgctgccggagaggatgattttcgtgaagttatccatcctaaacgtgattatcgtgtggcagatactgcctttatccctaagccttactatcaggtgtttaaagaaaaacacggctttttgccgaatttgagtatagccgaccttttatttaatatggggccggagagtttactcgttttgcgagatagtatagaaccattaaacttataatatcatgaataatttatttagtgtaaaagatcaggtggtagttatcaccggtggaacaggtgtattagggaaggccatcgctgcgcacttggctgctgaaggagcaaaggtagtgattctgggccgtaaggcagaagtgggcaatgccattgtggaaaatatcaaagcaaaaggtggggaagccatgttcctggtgactaatgtgctggatgaggctgtcttgaaacaaaatctggaagatattttggctaagtatggccgtgtggatgcgctgttgaatgctgccggaggaaatatgccgggggcaactattgctcctacaggtactttctttgatttgaaggtggatgagtttcagaaagtgctgaacctgaatctgacaggtacagtactgcccactcaggtatttttgaaaccgatggtggaacagaaaaaaggtgctatcgtaaacttctcatctatggctgcctttcgtccgatgactcgtgtgtgcggttatgcggctgccaaggcaggtatttccaattttactgcattcatggcgcatgaggtggcaacaaaattcggtgaaggtattcgtgtcaatgccattgctccgggtttcttcctgaccgaacagaaccgtgctttgctgactaacgaagacggaagctacacagagcgtggaaatgatgtgattcgccagactccgtttaaacgcttcggtcgtgcggaagagttgtgtggaacaatacaatatttgattagtgaagcttcgtcttttgtaaccggtacggtggcagtagtagacggcggatttaatatttttgcaatgtaatatttgattggttatgatactatgtgaacaaacatggcgctggtacggcccgaatgatcctgtatctttatgggacatcaaacagaccggtgcaaccggtattgttactgccttgcatcatattcccaatggggaagtgtggacggtagaggaaattatgaagcgcaaaaaaatgatagaagaggtggggctgacttggagtgtcgttgagagcgtgcccgtacacgagtatattaaaactcagacaggagactatctgaagtatatagagaactataaacagagtttacgtaatctggcagaatgtggcattatggttgttacttataatttcatgccggtactcgactggacacgcaccgatcttgcttatactttgcccgacggctcgaaggctttgcggtttgaacgggctgcgtttgtggcttttgatttgtttattttgaagcgtcccggtgcagagaaagaatattcggcagaggaaagggaaaaggctaaggctcgttttgcccaaatggatgcggaagaaatccatcgtttaacccggaatatgattgccggtttgccgggatctgaagagagttttacattggagcagttccagcaagagttagaccgttataaagatattgatgcggaaaagcttcgcaagaaccttattttctttctgaaagaaatttgtccggtggcagatgaggtcggagtgaaattggttatccacccggatgatccgccacagccgattcttggcttgcctcgtatcatgagcacggaagaggattttgagaagttggttgaagcagttcctaatccgtctaacggcttgtgtctgtgtacgggctcattgggtgtgtctgcacgcaatgatttggcaggaatgatgacacgttggggtgaccgtatcaactttgtgcatttccgcagtactcagcgtgacgcggaaggaaatttctatgaggccaaccacttggagggtgatgtggatatgtatcatgtgatgaaaaacctgttgttattgcaacagcgacgtggtgtgtctattccgatgcgcccggatcatggtcatcaaatgatagatgatttaaagaaaaagactaatccgggatattcctgtctgggtcgtatgcgcggtctttccgagcttcgcggactggaaaaggggattgccatgagtatggaagagggcaaataaacggtctgtttccaggtataaaaaacgcggacgtatgcatggaattatacatacgtccgcgtaggcttatacatacgttcgtgtaagcctgcacgtacgtccgcgtgagctcacacgtacgtacgtgtggaatgagggtttaacggagggtttttaactctccgttttccattgcaatcttgtaagttttgccttttgaggtcttgaaggtgagcgtcttgtcgccgtatctcacatggcagggagcacctgctttagacaggatagtggcttctttcaggctaccgttttcccatgttatgtcgacttcaaaattaccttttgcacataatccttctacagcaccgtttttccaagcatcgggaagtgcgggcaataactgaatgaatcccatgtggctctgcagcaacatttcggtaatgcctgccgtgcctccaaagttaccgtcaatttggaagggtgggtgagtgtcccataagttattcattgttccgtttttcagtaagttgccgaagagcttgtatgcatggttcccgtcttgcagacgtgcccattggtttaatttccatcccatgctccaaccggtcgcgccgtcacctctgtgttccaatactactttggcggcttgtgccaattcgggagtcgtgacaggagagactgtatgccccggatgcaggccgaacagatggtttacatggcggtgttcgtctttggggtcatcaatatctaccgaccactccatgagttgaccgtaacgacccacttgatagggaaccagattgtccaatacgtgttgccactgtttacgttctttagcgtctactcccaatactttgctggcatcgatggcgtccaacagaatttcgcgaatgacggcatgtacgaaggtggctccctgatctaccggtccgtgttcgggagaggtggatggggcggctgtgtaagtaccgtcagggcgatgccacaggtagtctacggcaaagttggcactgcttttaatcaggtcataccctgtttctttcagaaattttttgtcgcgtgtgtagtcatagtaatcccatatgtgagtagctaaccacggtcctgccatgggattgaaattccatgacatatcttcgtctgtcagcggagaagtaaatccgaagatattgccggagatggatgctgtccagccacgtgcaccgaagtatgcccgggctgttttttctcccggttttaccaatgtgcggataaaatcgattaatggccatgcacattcgcctagattagtggaacagacaggccaatagttcatctggatattgatattgttatggtaatccacgtgccatggaccgtccacaccattggcccacataccctgaaggttggcgggaaggttgccgggacgggaactggctatcagcaggtaacggccgaactgataataaatttcttccagtttatagtcgggattgcctttacggtaacgggccagacgttggtaggtgggcagatcggtaactgccggatactgtaacgtcatgggggcatgagggtttagtgtcagttttacccggttaaacaggttagtatagtcagccttgtggcgttcgcacaactcattatagcttttgccggcggcagtattcatcatggtaagagtggtctgttccgggtctgcacctacgtatgttttcgggtctttaaagtccgggtcaaagttcaatttgtagtcggtgtcagctgttaagagaaaaatgacttcatctgctccttgtgcaatgagtttcccgtcagtggcagtcaggtttcctcctttatggatggcacggatgcgaagggcaaacttcatttgattgtttttcaaacgtccggtataaagcaggctgttatttccgtccgcttttatggtgcctgttgcttcggggtttgctccgtaactgaatacaagattctgcatacccggtttgtcggctgtaaacttaataaccataacactgtcggggtaggatgcaaaatatttacgctcatagtttacaccgtctttacggaagcttacaacagcgagagcggaatccagagagagggcgcgtttgtagtttgtcatgcctatctcgctcagtcctgtttcaatgtatgcttctcccaaactggtgtaagaaccgaaacggaacggagtttcgcggctgggttcgtaatctgccagtccgttgaaattgcggcgggtaagctcttctgcttttttttgattcccttcaacaaatgcttgtcgtatttcaggcaataggtgagctgattccttgttgacattccaataatagtcagctcctttctctgtgttcggaccaccgcgccatagagtcttttcattcagtgtaatacgctcggcagctaccgagcccaatatatttcctcccagacttccgttcccgattggcaaagagttactttcccatgatttgtcggcagtcggggcataccaagaagcacgtccgtccagattattgggcttgtcaaaccaaatgctcagcccttttgtgtaatcaatactttgtgcatgcatagaggcagccagtaaagtactgataaggcataaatgaagctttttcatgtcattatgatattagttgggttttattttgcaaagatacgattttctatgagtatacaagtgtagaaaggtattcttcggcaaacatttcattggctatttccagtaattgctctgcagtcagggcttctatacgtttaaagacttctcccggaccttcaaatttgccgtaatgcagaaatgcttttcccatatcgagtgcattgttttcaaagttgtcacttgccacaccgatttgtccgataatctgtttcttggcggcagtcagttgggcaccggtcagtttattgtcacgtagctttttcagttctttgtgtaccagtcggatgcaatggtccacgtcttctgtgtcagttccgaaatagatgcagaatacacccgtatcggtataagaagtcaggttggcctctacattatataccagtccgcggcgttcacggagtgccaggttcaggcggctgttcatgccgggtcctcccaatatattattgagcagatagagtccggttcgtttttcatcgtatgcatgatatccccggctgcctatcatgacatgtgcctggtgggtgtctttgttgatggtcagtgtctgtggaatataggtaaagggagcgatacgctgacggtttgtttcgctcagcgatatatcgcttacagctttttctactgtccggattaccttcttgaaatcgatattgccttgcacaaaaaagaccatgttggttgttttgtagaagcgtgctgtaaactccaacgcatttcggctggtaaattgtctcaagagttccggttttcccagaatatttcttcctaaggggtgattggggaatatcagttcttcaaagtcatcaaagataagttcggaaggactatcttcataactttggatttcatcgataatcacttctacttccttgtctatctcatgttgggggaaagtactgtggaacacaatatctgccagcagttctactgcacgcggaaagtgttctgccagaaaagcgctgtaaattactgtttcttctttattggtataggcattgaggtctccgcccacattttccatacggttcagtatatgccaggcgtgtcttttctctgtacctttaaagataaggtgttctacaaaatgcgccattccttgctcttgttcatattcatcacgtgttccggcatctaccgcaaaaccgcaataggctactttagagaggttgggtgcatgaataatacgcagcccgtttgacaaagtgaaagtattataggacattgttttttagttcaattctgtttcggtggacaaaaatacaacaaaagttattgttgttcttcaaaaaatgcagatatttgtattcaataacagaattcaagagaatggataagattgctattttttgttctgcgtctgataatatagaccctgtttactttgataaagcgcgtgaactgggaacttggatgggacaaaacggaaagaccttgatatatggcggagccaatatcggcttgatggaatgtgttgcccgtgctgccaaagaaaacggaagtatggtgatgggcgtggttcctaccaaactggaagaacgcggaagggtgagcgatttgttggatgttacctttcgtacagacaatctgagcgaccgcaaagatgttatgttgcacgaagcggatgtagtggtggcactgccgggcggagtgggtactttggacgaaatatttcatgtgatggctgcagccacattggattatcaccataaaaaagtcatattttacaatatcaatggattctggaatggcattgtggaatttctgaaaggactggaaacacagcattttgcacatcatccgcagaacagttattatgccgtggcggataaccgggaagaactaaccgaactattaaaataaatatctctgttacttatgatgacatctatacacgaattgttgaagaaagaggcggaagccgtattaaatattccggtttcggatgcttatgagaaggctgtagctctgattgttgagcaagtacataacaaaaggggtaaactggtgactaccggaatgggaaaagccggacagatagctatgaatattgctaccacattttgttcgaccggcattccggcagtatttctgcatcccagcgaagcacaacacggagacttgggcatattgcaggagaatgatttgttgttgttgatttctaattccggtaagacccgcgaaatagtggaactcacacaattggctcatacgttgaacccaacgctgaaatatattgttataacgggaaatgcggatagtccgttggctcgtgagtctgatatttgtttatgcaccggacatcccgatgaagtctgtgcattgggtatgactcccaccacttctactaccgtgatgacggtgattggagatatcctggtagtggaaaccatgaaacgtaccggttttaccattgaggaatatagcaaacgtcatcatggaggatatttgggagaacgttcgcgcgagttgagtaaataaccaatctcctttgggatgaaaatattcaggctgttatctctgctgctggttgtattattggcttcttgtctgaataagaagaagtcggcagataccggtatgccgggaaatgaatctcggtatgtggtgttggcttatgttacttcatggggagtaagtactcccgaaacatcgtgcctgactcatatcaattatgcttttgggcatgtggcggatgataacaagggaatacggatagataatgagcctcgcctgcagatgatagtgggtttgaaaaaggaaaaaccttctttaaaggtcttattgtctgtgggaggctggggtagtagccgtttcagtgaaatggcggccaatgacagtactcgtactgcttttgctgccgattgcagaagagtgattgataaatttggattggacggtattgatattgactgggagtatccgggtagtggaacggccggcatatctttttcttctgccgataaggagaattttactcttttgatgcgtgatgtccggcaggctgtcgggaaggacaaacttctgacgatagctactgctgccaccgggcgttattatgattttagagctatcgaaccgtatgtggattatgtaaatattatggcctatgatatggaagaggcgccttttcatcatgctgccttgcattgttcggacatgacggaggaatggtcgtgtgagaaggcagtggccgggcatattgccggtggttttccggtacagcgcctggtattggggattcctttctatggacatggaaccaacgaggcgcctgagtctttggattatcgccatatcatatctatcgacagtctgtatagtcgctgggatagtgtggcacaagttccttatttggttaattccaaaggaacagtcgtcgtgaattatgaaaatgcccaatccatcgagcttaaatgtcgctttctgcaccggcagggtatgctgggagctatgtactgggattatgatagcgacgatgaaatgggcactttacgacacgctgtttatcgcggggttatgcaacttccttgattcttatttttgtttattagctctgtaaagcggataagccgcttggagaatcttgtttttcagcaagaccggatagtcggggtgtgcagcaaagaatgcttccacttcacgatacgcttcaggactccgatgctgggagagcaatgcatttacccagtttttggggaagaaaatatctccggtacgttgtacatccaacaaagcttccaatgccgggcggatatattttatcgaataactttctctggccggatggttcagataacttaatgcggtggcagtccaaggctctattctacgattttctgctaacattaaagaccggaataaagcatcaagttccagtgtatcgggggtgactgcacgtgagataaagtcgaattcacgtaaacggtcgggatttttgagacgttgacgctgggtggtcagaagtgttttgctttgctccggcatacgaagtgagagaatatacgccaaagttgtatagtctctttcattcagttgcttgccggattgatttgtccaaatgctgtagagcttttgtaagcttcggtcagatgtagcgttttgaatcaagcttcgtaaaagctggatgcggcaagagggaatggcgtgagtttcgctaaggcggaacattgcttcttccatttcttgtttcttttcaaatgctaatgtgcggagaggatttcccaaataaccgataatggttgaggctattaaaggattcttttctttactaagtccggttaacaaactgctgctccattcttcgtctgtgaaatgtttggcttgataattctcatacagaagcataagcaaggcttctcgtgcggtgtcatcggctgtttcttgccaatgtgccagcagccatggtagtgtatgactgtcgggtatgaacagaccataaccacggccgtctgtgtttggaagaatatagcggacggggaaaggcagtggtaatgtgcataaactgtcggtcaggttgacttccagaatactatcccgttgctcaccacataaagtgacatggaagcgctggggccaagtgattccccggtggtaagggtcttcttgacagatttgcagtttcccgtctttttgggcaaaacgtatagtgggcattcctttttgatttacccatacatcactgaaagcagccaaatcttctgccgttttgttatccaaaatgcgtatcagatcattccatgtggcattactgtaggcgtatgtgttgagatattcccggattccttctctgaatttgtcttctcccatcagttctacgagttttatcatcatcacgggagctttattatagatgatttgtccataaatcagtccggcatttcttaaattgtccaacggctggcggatggaggtcgtaccgggagtacgatcttccgaaagtgaagaagcagtgaatgttttaatccggttcaattgatgattaatgtccgggtataaaggttcgctgatgcaggcggcgaagtagttggcaaaaacttcttttgtccatacatcatcaaaccagttcattgtaactaagtcgccaaaccacatatgagctgtttcgtgtgcaataagttcggtacgtctcaactcttcatcaggggtaggatgctcactcagaaacatctgattgtcgttatataaagtagcgccggtatgctccatgcctccgtattgaaaaccgggtagaatgatgaaatcatatttggcaaacgggtaggagaccccggtataatcttccagccaatggagggaagccataacttgcttgaaaatagtatctaattgtgctaatttcttcgggtctgtttcccgatagtaagccgaaatctttctgcttccttccttatattcttgtttttccagctttccggcaacaaatgagaacagataagtgcttaatggctcggtcggagcaaaataaatgctttttcttccttcacgttcttcttccttattaatataggtgttggagacggcaacccattcagacgggatgtccaattgcagtgtgaaagaggctttgaggttaggttgctcaaaacacggaaaaacagttcgcgccctgtcgggtactaacaaggtatacaggaactcgtcgtttctgttcagagactgattgccggcagtaaagcggatatatatgtcgttctctcctttctgtgttgtattcttcggcagaataatatgttcgttacggaattcataagatgtcggcagtccgtttgcggatacttcttttatcttatccgcttcttctctgaaatcgaggataacctcttgtgctttgttcagccggaaccgaacgtgtatctctccctctaccggcattgatttttgttttggaatagataaacgaaggtcgtatttcaattcattgatttcttgttttctgagttctgccaattcctgcgaaattcctgagtcataaatacgaggattttgggaagccggctggcaggcattgagcagacaacacattataataataattccgtagtgtattttcatcgtttataatttatcttggttatcggctgctattttacggattcctcgttgagatgcaatgaaagcacctcccaatactctccgtccatcgtaaaatacggcagactgtcccggagcaatggcagaagcctcggaatagaaacgcaccagcaagtgtttttcgtcaagaacagctacacggcaagggatgggcttgcttcgataacggatgcggacagctaaatctttgcattgcatcagttcctggatatcggttatctgatagtcttccaccaacatatattcggttttcagctcttctgcatctcccagcatgacggtgtttttctctgcattgattcttaatacataagccggacgacctaaggctatttccagtccttttcgttgtccgatagtataataaggaaagcctttgtgttgccctatttttaaccctttattatcgacaaaccatccgggtcctatttttgtatcgatatccgggcactgagaacgaagaaaatcacgatagtctccttcgataaaacagatttccatactttcgcctccctgtgcttttgtttcaaaacctttttgacgaagatattcccgtacttcttgcttggtatatgttccgagtggaaagatgaaacggcgcagaatttcctgtggaagtttccacaggaaataagactggtctttggtcatatcatctcctgctattatatataggtgtccgttatgttcttccagacggcaataatgacctgtagatatgtgggcacaattagtctggtctgcccattcacacagaatacgttctttgaaaagcgggttacacattacacaaggattaggagtacgtcctttcatatattcgtcaatgaaatgcttgacaataacttctttaaattcttcacgtacatcggctacatgatgttctatacctaattttcctgccaatgcccgggcttcgagcacatcatcgggttctgtctgtccgggagtggagaattttgaaggtacatcccatgtacgcattgttactcctaccacttcatatccttgttcttgcagcatgatgcaggtggcggaactgtcaatcccgccactcatgcctaccaatactctttgttctctacttttcatcgtttgttgtttaaagaaacagttccggttctcttcgggctgcacatttctcgtgcaacattggagtataaggggtatcaaatatgcgtgctccgttaggacactcttttacacaggcgcaacatttgatgcatttcgctatttcagtttctatctttccttcttgattaaggtaaatggcgtgtgtggggcaaatttcaatgcactcgccacaggcaaaacattcttctgtacatagaggagcggccggggtagacggcgctacatagcgataaggaacgttacctttgataaagaaatcggcaggagcctcactgttcttgagctttttgaggcagtctttaccaaactgctctgctatttgcaggtcgttagcgtccggtcgtccttcggcaacaggcattccggggcggctgtaactatgttccccgatgaaagctccggcggcaagtggtgtaaaacctaagcgggttgtctcatctcttagttccaccaatgcatcttcataatcccggttgccataaacggcaaccaaaacaaccggagcattttctccttttaatcgtcggattcgctgtagggcaataggtgccactcggccggcataaactggcactgcgataatagtcagtgcattcttaatttcaataggtgtgatactctcatcaagtgtcaggtctgtttctattctgcgttccattcctataccatctccgatggcacgagctattttcgccgaagtatgcgtaggcgaaaagaatacgatatgcgttgtatctaccatagcaattattagttgattgggaaacaaagataatgaattttgttcaaaagcatgaataatccttttcaagatatactgttgctatgcattatgtataaaggattcttttattgtaagtcaaaattagagaataacttactagttgtaaacaaaatcggtattttgttaaatgatgttgttctgtgaacaaaaaaataggtaaatggctgctttcgcaacttttagtcggtaatttgaatgattattatgttagaagacatatatcttcttttttctgaaattttaaaagaatgtttttttgttctttttgggtacaataaagtcatctccaagtttgaacttcctatgttacatgggggttacgtgcatcaacttttatatatataataatgtgtatagcctttcttccggtttatttaatgtgtgacagtatgcattttctacgcttttacaggtaaaaaatatgtgaagattcctatttcttaaaaaaatcctgtgttttataaatatttttagtggaaagtgttgcagaatagagtaaaatgggtacttttgtccgatgaaattatggctattatagaaactgactaaaaaatgatggatgccctttttcgattaccgaacaatgatctttctgccgctttacagaaagataagctgtttaaggaagtggaacagcagtggaatactgtgtcgtctgaggaaggaaactctagaagaaaggtcgattatgaaatctataaaagtattgtgtataacttagaagtaagaaaagtatttctagatccaaagctttctttggtgaagtttagttcaatagtcggcacgaatactacctacctgtcgaatgtcgtcaatcattactttaaatgcaactttaagacattggtgaacagatgtcgggtggagtatgccaaactccttctacgaaaggaaaagcgcacggctgatgaattgataagactttgcggatttacatccagaagtgtctcctattctgcctttaccaaagaagtcggtgtggttccttcacggtatcccgggaatatgctcccgtttttttctgaatacgattaagtcctttataaaataataaacaaaaaacaaatcaagtttttaaatttataaatttaaagtttttctattatgaacaaaaaatttttaagtgtagtcctgttcggagctcttatggccggctcttcagtgactttcacgggatgtatcgacaacgatgaacccgcaggtatcgaaaatcttcgcggtgccaaggcagaattgctgaaagctaaggctgctgtagaaacagcaaaagtggcttatgtcaatgcacagacagcacaggctaatgctgaagccagaagattggaagctgtggctcttcaagcagaattgaaggctaaagaaatggagttggacaacgcgttaacagaagcccagaacgcagagaagattgctgctgctgaagctaaagttgccgagattcaggctaaattggaacagaataaactgaattgggaaaaagaaaagctggaatgtgaaacaaatttggcttacgctcaaaaagcttatgaagatgcaatgaaggctcttgaattgtctaaagaatttttgagcgatcaggaacttgctgtattaaaaaccgttcaaggtaagttaactgctgctaagaatgctatttatggctatgatgtcgtgaatggagaaaatactaaccatattcttggttctaaagaacaattagatttggcatatgaaagatatgaagaagcagctactaatattgataattatattaccaaaccttctttggaagctaatttgaccaatgcacaagccagcttagacttttataaggctgaactggatttgaaacttgaggctctgaataccttgaaatcaggtgaagcttatcaggcatggttgaaattgaaggaagaatatactgcaaagagggattctttagaaactgaaatcgctgctaagcagagcaaagccaacaagattattgcagaacaaactccggcaattgatgctttggaagatgctattgcagatgcgcaagccatcgaagcttctgttgctgctcctaaatcagacaaagactctacatttgccgtgtctaaagcaattgtaactgatttggatgcaagtgactttggaggctttgtaacatacgatgccggaacagtgactgctaagtttaaaaccggtgcagaagttcttgcttttgtaaaagaagatgtgaaagagttgactaaccaaaaaggcgcagctgcttatgcaactatgctggatgacgtattctcatttgcagatggcaaagactctgaatacaagaaagcggtggacgaaattgatgctgctgtaaaagctgtaaacaagaaaaaagctgctattgcttctttggatacagaaaaagcagaggcagtaaaagttgctgctgaaaaagaattgaaatcggctcaggaagcacagactaagggggttaccgcatggacaaactctattgctgcttggaagaaagctgaaggttacacaacagaagaggctgataaaaaggctgtagaagcagcaaaaaaagcatatgaggatgcaataattgctgctgataaattgggtgatgatacagaaaaagcaaaagctatattgaaagcccaacaaacattcgcggatgccatcgtgaaatattacaacgcagcagcacctttgcaattgactgttaataaagtaactttaaaacaaagtgttactattggaggtgaaactaaagaaagcaacgtatcgaagaccgttaaggaatggctgagtgatgctgataataaagatgtttatttagctgcacttattacgtatttcggcaatgatgctacaaagttgtggactgtaggtaaagcagaagacaagtatgatgctgtagcaggaacaggtgccaaagctgaagcaggtttggctactcttaaaactaaaactgagattaagactgcatgggctactgcatctatcaagctgtttggtaaggaattaggccagaatacttataccgatgaaggccgtgagacagaaccgacagaagctgaaattaaggctgtatgggaaaaagataatagtgcagcaggtctctacggtgctgttatgaatgcggaagttaaacttcagacagctacagaaaatgtagaaaaggctgctcagttcgacaaggtaacagctcagttggctgcatggaagaaatctttggctaacgctaaagacgcttatatagctgacaacaaggaagtattagatgccgttgttgctgcacagaaagttgttaccgaaaacgtagctactccgattacagctttgggtatggataaagatagagctttattaggcgaaatcaatgctgtactggaattcagtgctaacgattcagatgaagcattaatcattaaacatgtcaatgacttgattgagactttacaaacagaaatcggtgtgaagaaaggctcatttaatgaagaaacaggagcatacgttgaaacatcaaccggtctttatctggagattgaaaaggctgagtctgatgtatttgaagctcaaaagatgttagacctttataactcaggtgatttaacagaacaatatgtagttgatactgctaaggcagcatatgaagcagctaaagcacaatatgaaaaagatcttgaaacattcaactattggaacgctaaattggctgaattaatggaaactctttacggtactgcttccgcagaataattaagtaaaaacgtaattatacgatgatcaagaaactatgcacattactgatgctcactatcctctctgcgcctttattggcgcagactgtaggcagtgagagtgatggcgtgttgtttgctcccaagaaaggccagtggcaagtatctgtcctgctgggcggaggtaacaatttctacaatgaaaaaacctcctacctgctccctgccttcaccaataccggcggttcggtcggactgcccgacaaaggtgaggcatcacagggggacttaaacagatacctgaacattgacggtttgaataacaatagtctgaccaacattctgggtattgaaggcaaatatttcctgtctgactgctgggatatcaacttccagttcagcatgaatatcaacctgactcccaagaaagactatgtggaaggcaactatacggaagtacccgacatgattatcccggcacaagattacattagtgcacggatgaccaacaactggtacgttggcgtgggaactaaccgctatttcaaagtgagcaatcctcgcatccatccctatctgggtggctctttaggcttccagatggcacgtatcgagactacagaaccttatacaggcgataattattatgatgaagatatggtagaaaccgataaagaaaccggaaaaccggttgaccccgacgaactcggcggtcttcctacccaggtctatctctcgggcagccgtgccggtcagatgttcggcatcaaggctgccggtgtagccggtatcgaatacagcctggccccgggcctggtgctgggattccagttccaacccctggccta

SEQ ID NO: 6697 - DNA, 221 bp, Unknown
  gut microbiota DNA sequence
ctagcaatagcggttgtgaaggtgctgcatggttgtcgtcagctcgtgccgtgaggtgtcggcttaagtgccataacgagcgcaacccttgccgatagttactaacaggttatgctgaggactctgtcgggactgccatcgtaagatgtgaggaaggtggggatgacgtcaaatcagcacggcccttacgtccggggctacacacgtgttacaatgggggg

SEQ ID NO: 6698 - DNA, 113304 bp, Unknown
  gut microbiota DNA sequence
ctacattcttgtctctaaatataattttagatttttttgcctctacccattcttcaggacaaccataacacaaccctaaaagctttatttttttatccaaaaaatatttatttatatgcgattcatcatgattacatgcaataattccatgctctaaatctttatgtatatttaacgaacaatatttcattaattgaatgtattctttcgttcttcctccatttaaacctccttgataataatattttccatcttcatatgcaatatatgccgtagaatttatattcctttcatatggaaattttagcttattagtatatacattcagccatgacaaccctactaaaaaagaatcactcttatttggaagtatttccaataaatcaatacgctcctgaaacaaagtatttccattaaaaaagaacaaataatcaaattttataatttctttttctatagaaagaaacatatcaaaacgaaataaagtatttccaggccagcccaaatttttttgagaacaaataataacattctctttatatctgaattcaagaaatggttgatctgtaaatacaaaataagttttaggagtatctactaaaaaatatttctcacaagtcttgtaaaaatcattaaaaaaagcaacatattttcctattgctatatataaaatacctatttccatatatatctattttctactttttttaagaaaatgcttatttcttaaaagccaaattagccaaaaatattttattacaaatgttctaaaatcaacaattcgaaacgatgaagcttctttaaaagcagaatacagtttcccatataataaattcaaaatcatatagcgccatctttttgcattttccaattccttataagataaatttccaataccatttttagcaattacatagctaattatttcatctatactcttattaaaggaacacactttatgataatctttattattacttattgatgtaggtaaacacctatatgctgaagtataatcatttagataaataatatctgaatgagcactaatagaaagccatgtaggataatcaaaagttttaaattggtatttaatataatcatcaatactacaatatctatcaaaaaaattacgcgaaaatagaactgttacagcaccaataaaattagttttcaacaattctgaataatcttgttttttaggctttttcgatcgttctaattcttcagatttagaaccaattacaatccaattagaacaaacgatgccacattggttgtttgtttcaattaaatcaacttgcttttgtaacttgaaagaatcaatccagatatcatcactttccaatattgctatatatttgcccttagctttttctaataaaaatttataattttgcattaacccatgattctcacaatacttaaaataatgaattttatctggatattgacttgcaaatttctgagcaataacagaagtattatcagtagaacaatcatcacctattaataattcaattcgaaaattgacttcttgccgaagaaaactttctattgcatatgtaataaaactttcatgattataagtaggcatcagtacactaacaattatttcttccatttctttttaaactttgatataatatctattacaaactcatttcttataacataaatctgaacaacaaaagaataagcaatcgtaatacaagcaccaataaaaagtaacaatagcaaagaagaaatacccatactgcacaatataagtaaaattgctaaaggcaacatatataaaatattttttattaatacgttataagggaatgacaatgataaatatttgaaaacataatattgagcagaactaagtactataatttctgataataaccaaacaattgatgaccccacacttccccaatgactaactaataaaatattgaaaataatacccacgctagctcctaatacagaattcattaaaacagctttatccttctttaaaggcatcaatatgtgacaaatcaaaatttgctcataaccaataactaataccaaaggtaaaataatacgcattggtaaaatagccccctcataccccattcctgctattaaattaataatataaggagcatataccgaagcatatataataagtgggatcgaaaaaccaaacaatatattactagatttttgagacaattttttaaactcttccatcttattttcagcaaccaggctactcattcttggaatcatcacacttgtaaaggctgtaaacaaagccaaaagaatagtatataacttcgtggccgtagtataatatcccacctccacttcgttagaagtaaagcccaaatatgcaacattgaaggtagtatacatagatgttaataaagcatatattcctaaaatacaaaatggccttatataatgacgaaaagagaattttctccaagaaaatttagcaaatttacgactatatattatatttattaaagcactaagtactattattaaaactgtcaacaaataataaataggataatctgaagagtcacggataaatataaagactaaaaaaacatacaaaatttttattgacaatcctctaaaagttacatatttaaaattttctatgccttgaaagaaccactccacttgaagaaaattgaaaactaatttcaacactccaataaacattaatgatttatatacatataattgtggaacaagaaatattgaaatgcacaagacaattaacgatataactacaaatatagcatttaagcccaagagttcagaaaacgttctggaaagtctcacaaaatcgccattagcttttgctatttctctaacacctaggacacttatccccaacattgagaataaaataaaataattaataatactatcaacgaaattacatataccaatgttattgactcctaatacacgcgatacatagggataagtaataaatggaaaaatatacccactaactgttaatgccgaactatataagaaattttttttaatcgaagccatcaatgtatcatatcaggggttattgatttttatattttgttttaaatattactctgctctatgcaatgtcctacgtctctcaataactttatccatatacatatgcatccctgtccaaaccgctacatccgcaataaataacagtgtattattgacatagctaactaagaggatattacttaaactaaacaaaaaagaaatgaacaaaatagttatcatcgcttttctgacagtaaatcccatggcaagaaatttatgatgaatatgcgttttgtccggcaaaaaaggacttttaccattacgcactctgcggatgacaacacgaattacatccagacatggaaccagtaatacgctgaatgcaaccaatatggcaccattataattgaaattcatcattacatattggttcattgtatatttaattgtcagaaaactgagaataaaacctaaagtcaaactgccggtatctcccatgaatatctttttgccacgctctgcctgaccaaatacattgtaataaaagaaaggaagtaacacaccgatagtagtaaaggctaaaagactgtatagccaaagtccattatatataaataaattaccatatacaaacagggcgacaatgctaagcccggaagccaaaccgtctataccatcaattaaattgatggcgtttgtaataaatacaactagcaaaatagacaagggtactccgatgtatacagaaatggaataaataccaaacatcccataaaaatcattcacatataaacctgccaatgggaacatagctgccgcaaaaatctgtaccagaaacttctgacgccagcgtactcctactaaatcatcggcaataccgacaatgaaaagcagggtcaaaccgctacacaacaataaaagttccggaaattgagtggtaccatccatccagaaaaaccatcccgccttcttgcataatgccaccaaaaacgtaacagcaaaaagtatggtggggaaaaagcaaactccgcccaagcgcgaaatgggacgtctatgaacctttcttccatcaggaagatcaaacaatcctttccttctcgaaatgatgataatattgggaataataatacgtgccaaactgatagccagcacgaagcctattaagataattatcaaatgatccatcataattcaaattataaaaccaaagaataagtattctcactacgagataaatcataattcaagcgacagatatgataatacctaccattaccccatctttgcaaaattacgtccattcttttagtttttgtgtctagttattaagtctttctatatatcctatgggcatctctacacaagcaaatcccaatgctgcaatgcgaacggcaaccttggttttcccgtctacagtaaccaactctccttttagccccgataaaggtccttttattacccgcactttttcaccgggtatcaaagaaggatcgttgagtgaaatggcactgtccgaataatcgagcataaaccgaaatcgctccatttgttcatcgggtatgaccaacggcacactttcgccacgattcaccatataccgattcaccgaatataattcaagcactttcttccgttccaaagcatctacatgaacaaatacaatcataggaatcaataccctggatatttttttccggcggtcactccattgatgaatttcctcttgtatcggaagaaaattttcaattcccatagtgtttaggcgagcacttgttttcttctcgtgataaaggcgaacgtacacagccaaccactgctttgggtaggcttcgccgttacctgtcacaatagcaggtaaatcaagcgcttctttttctgaattcataaaactcataattagcattttagtacatatctattatcataaatttaataatagacacatccatgatactaagacaatgcaaatatagcgtaatactgcgtaataaaacagttttttttaattatttatcctattttttccgcatatcagcaatcatattcaaaaaaaatattttgcaaatgaattaacattatctatgttagatagatacttatgtttaacagaattaaatgtaaattgtttcggctgtatcctattatcactgctacccctccggattatatcaaaaagaagaccggctaactcatttcaagttaatcggccttctgctatttttttaagataaataccattgatacatcttatgcaccccttcctcaatatcaattcgatggtgccaccccaatgcgtgcagtttactcacatcagtcagttttctcatggtaccatccggcttggtcgaatcaaaaatcaccttgccctgatacttcgtttccttcactatcaaatcggccagggcagcaatggtgatttctttgcctgtgccaatattgatatggcagttccgaacatcctttgtgcctttctgataagtatcttcaaaattgacatgttccattatgtagacactggcatccgccatttcctcactccacaaaaattcgcgaagcggtttaccggttccccacaacacgaccgatggtccggtgataccgtatttatgtaaaacagacagtatttcaccctcgcttgcagttccatctacgccctctaccggtcgaagactcaggtctttacgtatggctccccaatcagactcattcaaacatttagccaaatgaattttacgaatcatagcaggcagaacatggctgttttcaagatggaagttgtcattcggtccatacaaattggtaggcatcactgcgatataatttgttccatattgaagattaaaactttcacacattttcaatccggctatcttggctatggcgtatggctcattagtatattccaacggagaagtcagcaacgcattttctttcatgggttgttctgcatcgcggggataaatacaggtactacccaagaagagcaatttcttcactccgtgacgaaaactctctcctatcacattctgctgaatctgcagattctgatagataaaatcagcccgatataggctgttcgccataatgcctcccacatgagctgctgccaaaataacatattcgggctgttctctgtcaaaaaaggtttttacagcaactccatcaagcaaatccaattctttatgagaacaacctactaagttagtatatcctttcttctgtaaattattccatatagcggaacccaccaatccatgatggcctgccacatatatcttggccgttttctccattatttcccgatttgctccttcaaatacaattttttcacaaatttcatatcatgctgcaccataatcttcaccaactccggaaaagaagttttacgtggattccaccccagcattgttttcgctttggtagggtcgcccaacaactgctctacttcggccggacggaaatacttgggatcaacagccaccaattctctgcctgtgttcacatcgattcctttttcttccaccccttttccttcccaacgcagttctataccgacttccttaaatgccaatgtacagaattcacgcaccgtatggtactctccggttgctatcacaaaatcttccggtgtctcatgctgaagaatcagccacatacattccacataatctttggcatatccccagtcgcgcaaggaatcgagatttcccaaatacaatttatcctgaaagccttgagcaatacgagaggctgccaatgttattttacgtgtcacgaaattctctccgcgacgttcgctttcatggttaaacaagatgccgttcacggcaaacattccgtagctttcacgatagttctttgtaatccaaaaaccatactgtttggcaactccgtatggagaacgcggataaaacggagttgtttctttttgaggcacctcctgcaccagtccgaacaattcggaagtagaagcctgataaattttggtctttttttccagccccaagatacgaactgcttccagcatacgcaatgtgcctatcgcatcagcttcagcagtatattcgggaacatcaaaacttacttttacatggctttgcgctgctaggttatatatctcatccggtcggacagcctgaatgattcgaattaaagaactgctgtccgtcatatctccccaatgtaaatttatcagacggctcttcttcatatctcgcacccactcatcaagataaagatgctcaatacgccctgtgttaaacgaagaagaacggcgcaaaataccgtgtacctcatagcctttgtcaatcaaaaactctgccaggaatgagccgtcctgccctgtaatacctgaaatcaatgctacctttttcatgcttataaaaatttatttagttccttttctctaaaaagaataatttagtcattcagctgaaaattccttaatacgctgttcctcactcagtctgcaaataagaagtgtatcgtctttttccgccacgatatatccgtcaagcccttgcaccaccacctttttctcctgcgtggtatggataacacaattccgtgtctcatataattttatattttgccctatctgtgtattattatgagcatctttaggcaaatttccgtgtaaggagccccatgtgcctaaatcactccatccaaagtcggaagggaaaacaaatatctcatccgccttttccataatggcataatcgacagaaatgttttcacacagcggaaaattttgattaatcatttcctgttcctgttccgtataatagtaaggaagtaatctttcgaaaattttcgaaatggccggttgatacacccgcaatgcgtttacaaccgtactcacattccatacaaaaataccggcattccaaaagaaattatttttcttgatatatctctcagctgtctccaaatcgggcttttctttaaacgaatacactcgatacacttctttgttggaagtggaaggtatagttaaatctgcctctatatatccatatcctgtttcgggacgggtgggtttcatacccaaagtcagaattgcatccgaatcggcagtgaacttcatagcagcgtctatcacccgttgaaattcggttacatccatcacaatatggtcactgggtgtcaccaccatgttggctttgggattacgcgcctttattttccagctcacataagcaatgcagggagccgtattgcgccggcagggttcgcgcaaaatatgatcatctgctatttcgggcaattgctcctttaccgtttctgcatacttctctgaagtaaccacccaaacattttcaggcggacaaatacctttaaaacggtctgccgttaattgaattaatgtacgtccacaacctaatacatctataaattgtttaggataatcgggggtgctcatcggccaaaatcggctgcctacgcctcctgccataataacgaggtgattattcttaatattcatacattctcattttacattgtataaatgcaaagataaccattattttcagaaaaagacattgtatattaatttatatactctatatttgcatgaaatcaacaaatttctgtctacggacaattataaaatttaccataatgaaaggaattgtattggccggcggttcaggcacacgcctttaccccataacgaaaggagtttccaaacaactgctccctgtatttgacaaaccgatgatatattatcccatatctgtgttaatgttggcaggcatcagggagatattaatcatctcaaccccgtatgacttacctagctttcaacggttattaggtgacggaagtgattttggagttcgtttcgaatatgcagaacaaccatctcccgacggtttggcacaagcttttatcatcggtgaaaaatttatcggggatgattcagtatgccttgttttgggagataacatattccatggaaacggactttctgctttactgagagaagctgtacactcagccgaatgtgataacaaagcaacagtattcggatattgggtaagtgaccctgaaagatatggagtagcagagtttgataaagaaggaaactgcctgtccattgaggaaaaaccggctcaacccaaatccaattatgccgtggtagggctgtatttctaccccaataaggtcgtaacaattgccaaaaacatcaagccatcggcacgcggagagttggaaatcacaaccgtaaatcaatgctttttgcaggagaaagagttaaaagtacaaacactgggacgtggatttgcatggttggacacaggcacccacgattctttggcagaagcaagtacttacatagaagtcattgaaaagcgccagggcttaaaagtggcttgcctggaaggtatagcattaagaaaaggctggatttcgacagaaaagatgcgcgaactggctcaaccgatgcttaagaaccaatatggacaatacttacttaaagtaattagagaattagataaataatggaagttataaaaacagcaatagacggggttcttattttagagccccgcatttttaaggatgcaagaggttacttttttgaaagtttttcttctcgcgagtttgaagagaaggtgtgtaaaaccactttcgtgcaagacaatgagagtttttccggatatggtgtcgtgcgaggattacattttcagaaacctccttttacgcaaagtaaaatagtacgtgtcataaaaggttctgtactggatgtggcagtggatatccgcaaaggttctccaacattcggacagcatgtggcagtggaattaaccggagaaaaccatcggcagttatttataccaagaggatttgctcatggctttgccgtacttagtgatgaggtcttattccaatataaatgcgataacttttatgctccgcaaagcgaaggaggtattgcatggaatgaccctgatttgaatattgactggcgtattccgaaagataaaataattttatcagaaaaagataaaatacaccctattctaaaagaacacgaaactgtctttaactacaatcagagactatattaaacaaatcaggctgtctcaaaatagaaaaatgagacagcctctattcattacaaccaacacaaaagcaaaaaaaatctttctgccaacgtttcaatctataaaattttcaacattcaatttctatattggaagaagatagttctttcttcaagcccaccaataaatcacgaccaaataaaatccaggcagaagctcctattactgcaagaaaaacaaaaccaattaaaatcattttcttacttgtccctgacggatgcaaaggtacacttgccggttcaacaactgcaaaaacaggttttgcctcctgaaccttggcacgagccacctgcaattgattggcaacctgactatatacttgatatgccaaactcatttcgttttgcaaacgttcaccttctgttaaaacagtttgcaaaataacattcttattcgcatccatataattcgcataattctgctgagctacataatactcttgttgccgctctttatacaactgttccaaataattacaatcttgttgagcttttgaaaccctatacgacgttatatatttctgtaatttagcaaccacagaatctgcgacaatcgccgttactaaaggatcttgtaaaacgacccctactgtggttattccactttttttatctacctcggcagtgatagcctcacgcaatcctgtaactatagacatttgctcgcgagttagctgaaaagggtccaaagccatcatttcttccttatcattggaagatgaagagaaaagatttcgaagctttccgggaagttcaactatcactccccaccatggagcctttttatgctcaaaataactcactagagtcgtatctacatcaccatgcaatgtttttacatgcacatcaaataattccaaaataaacggagtagactccactatgtccgggaaaagggatactgttaatgcatctgcatccattccaccattcattccgctaagccctaacattgatgccataccagatagctcatttccactgttttttcctgattccggtgctaaagttacctcaactttatacataggaggaagactaaaagctattattaaacctaatatagcactaactcctgctacttttatcaattgttttcgggcaagccataacttcttgacatacaccatcaaatctatttccggtgccttggatattatatctttcttttcttcactcatcttatttcaatatattagcaatagacgccgctgttaatcctaatgaacctatagatgaagctattcccaaaattgtttggaaattcattcttccgttcttatcttttaccggtaccacaatctcgcaccccggctcaatcatatttcgccccgaacctttgactttggcaacctgaccgttcatataaatgataaatgccctgctcttacgggcgttgtttgcaaatccaccggcctgactaatatagtatttcactgatttattatctttataggctacggtattaggcaacatcaccgcaccgtttatctttacagtattactcaactcaggaacaaccaacttatcaccggcacgaagcaccacatccgcactggaacccggattcttcattgccaattccaaatcaatacccaccgaataaacactgtccaaatccaacttcaatgagtccatattggcttgtcccatttcacggcgcatcatcttaaacacatcttccatacgcttcagctcctcatcattcgcctgacgaatcagcttggcacctttcacataagcaaaaggagttacaccaccggccttttttaccaaatcagaaagacgttcacttttattggtcagtgcataagtaccgtcataaagcacctcacccgtaatgtctacattggcttgttcctgataacccggacttcttctgacatacacctgatcataaggctgcaacacaaaaccgggctcaccatcaattacaaatccatccttcaaagagaaagaatacattttaccaatagtagaagaaacatccgtactcttattgtccttgatacggcgtgagacatccacacgaacggtagaagccgactctttcaagccacctgcctgaataatgatatcttccagcgtcgtgttgtcggcgtacggcaactccccgggacgggctacttcaccaaacactgtaattacacccatatcctgcaaatcatggatactgggaatatatagaacatcattcttctgtaaaggaatatcggggatagtgccatcgagcaccttctttatgtcgacagaaatcacctcacgtgtcaaattatcacgctcacgatgtaacacggcacgggcagtaaacgcatctcccatcaaaccgtctgctttttccaccaactggcgaaccgtattcaatgagcctccaaactgatagattcccggacggtagaccgcacccttaatctccagcttattttcaaaacgattcaagatagcctcagccgttaccttgtcaccatctttcaccgggaagactgaataatcgatatcatcaatcgtatatacttgatattctctgccattctgacgaatcatacgcaaggcacgggtgtatgcatctcccgaaaagccaccggcatacttaagcagggtctttacattttcgccatccttcatttcgtatttcatggggcgttttacatttccttcaatcgtcaccaaggcttgataaggaggcacaatgacaacatccccctcctgcagacgaatgtcatcagtggctttgccacgcataataaaatcgtacacatcgattgtagcaataggcttaccgccacgaactaactgaatggcacgcaaactaccaatatcatttactccgcctgcacggtaaagagcatggaaaacagaagaaaaagaagaaagcgcataagtacccggagtcagtacctctcccatcacatttacctgaatggtgcggctgtctcccagtgtcacctttatctgtgaaacaggtttttcactgtctatgccggcataaatccggttcagctccttgcgtaaataatccgttgcctcgctcaccgtcatgccgttcagatacaccaaaccaatatcttctatattaatgtatccatcaggagaaatattatcgcgtatggtagcttgattagttccccaaatatctataatcacttcgtctccgggccccaaatgataatccaccggagtagccagattcacactaggctcaaatgtcaaattcttggtattgaaaatatcacgtccgaagaccttttcctctttcttctcttcttcttcctgcaaataaaggatcgtgttattgtcatatacaatatttccatctctatcaatggtataggtacccatctccttgggttccaacggttctgtcgttacatatttataaacaggaacttcttttttctccgaagaatcatcaaaattaaaatttttatcgatgtaatcactgccgtcctttccgtcttccttttccttaaccccgttcttggtacgactgcgccctttcgtgttgtctaaagtagaagacgatgagttttttccattcttcttttgctgttcgtacagtaatttgacacgttccgcctgttccttggtcactcccctacgagcaagctccgtactaatctgctgctggcttttaccttgcaacaaaccattctgcacatattccaccacttgcttatcggtcataccaccccccacctgcgcaacagaagtgacagacaggcaaattaatagcaatacaaatgttactatttttctcatcataaatccttcaatagttcttttaatttattttttcgactagtttagtataaactccgcaaaagtaagcaatctttttgatataagcattaaaatattgctaataaaaaagtatgtatcatacttcattataaaatcgttatcttcagttatcatatcaaaaaactcaagagagagagcaacaaaacagccaagacagttttcataaacaagggtgactacttttgaaaacaatagaaacatcttttttgtttctccggataatccaattattcatccccctctcctttggataaaaatcttgcttttgtcctaaaaaggataatttatttccccgataatatcctcactgacgataatatcaacaaaaaacgacttatattcccaaaattaatcgatttatattgcttaataccaatatttttccttatttttgccaaacataataaagaatgatatgaaaaagagaatattgattctggacgacaaagaaacaatagcaaaagtactgtctatttatttaatggctgaatatgactgcatttggttgcaggacggagttcaaggaatgaaatggctacaagaagggaatctgccggacttaataatttcagacatacgcatgccggaaatgagaggagacgattttctggaatggattaaggctaacgaactgttcaagcacattcccgtcattatgctgagcagcgaagacagcaccaccgaacgaataagactactcgaaataggtgcggaagactatatcgtaaagccctttaatccgatggaacttaagatcagagtaaaaaagataatcgaataggttatgacaactaatctgctttatataggaaaaagcaagtcttttttgactcaattcggaaaattggaagatgtgcaattaatttatgccaaagaccataaagatgccattaccatttgtatcaaccttaaagcgagagagaatattatcatcctctatgaacagggtaacttgaaggaggatgtggaaaacatcactcttttcaggaaaaaattctatcagggttatgtagtgctggtcaccggcggcttaaaaaaagaagaaagcgctgcgtatctgaaaagcggaatcaatgatacaatcagtcccaatatttcaaaagaagagctgattcagaagattgacttaataaataaaagacaagagttgctctacatcagcaacagaaagaaaaaagtggtaaagcgtttcatactgcctcggtggaaacgcttttttgacatcacttttgccggtatagcgctcatcgttctgtcaccggtcttccttattatatcattggcaattagattggaaagcaaaggtcctgttatttataaagcaaaaagagtaggaacgaattacaacatctttgactttctgaagtttcgctccatgtataataacgcagacaagcatctgaaggaactgacagacttaaaccaatataaatctgaagatgacaccgctaccgagcccaaaggattctctgatgatgacctggatggttttctaattggagacgacggcgttatactggtttctgatgactttatcatccctgaagaagtgttcgcatccaaacgcaatagtgaacaggaccaaccgtttgtaaaaatagaaaaagaccctcgtgtcacaagagtaggacgcttcctacgtaaatacagcttggacgaactaccacaacttatcaatatattgaagggagatatgtctgtggtaggcaatcggcctctccctctctatgaagccgagcgcttgacgaacgacgacagcatagaccggttcatggctcctgcaggactgacaggcttgtggcaagtggagaaacgaggagaccctgggaggttgtctgccaaagaacgaaaagaactggacttgaaatacagtaaagagttctcgttcggaatggatatgaaaattctactaaaaacatttaccgctttcattcaaaagggagatgtataaacaataataaaaaatgatttaaaggggaaaagacattttatgaaacaactatatgctattatcattctcatatttctgtttgcaggctatgccaaatctcaggaaacacacggaacacagcaatctgtcacaacacaggatgaagtaaattcaagtataaatatagatatagccaaaatcaaattacctccactgagtgtgttatacgaaaatgcacgcagcactccaagcatcgaaattctggaaaaagagaaacaattacaaaaaaaattgttagctaaagaaaaaagaagctggatgagtctttttaatgctttcggaaatgtttcgcacggcattgccgataatatcggctcgtctaccgaccctaccactcctttaatttatcgttatacgggaacagaacagacttcgtggagcgtgggaggttctgtcacactaccgctcgaaacgttattcgacctacctggcaaaataaaacgacaacgcattcaggtagatattgcagaattgagaaaacaacaggcatatgaggaattaaaaatacaaatagcccatctgtatgtccagattttatcgaatatcgaaaccttacaacgttcggcagaacaccttgctttatataaaggtgcatctgccattgccgaacaggaatacagaaacagacgcacgacaatagatgcggtagcccaaacgaaagaaaaagaatttggagccaatcaggggtttgcatctctgcgctcgactatcaatgaccaattgttaatgctcgaaattatttctcatacaccaattcttaccattcaggaagagttaagtgtcaccgaaggaattgacaaaagtgaaaatactgaactgaaataatatggaattattcaaatatatagtaagatttttctatcgcattcgctggtggatggttatctttccgtgtattgccggtgttatagcatggtttatgacccgagaccttgaaaagacatacgatgtaaaaacaactatttttacagggattatttcaggatacaatgtagatgttaccgactcccgcaatgcaggagtacatctgagcaatctgatgaacatcatcacaaccgaacgtaccttgaagattgtctctctcaagttacttgcccgttgccttgtatatggggatgccgagaagaatacaagctacatctcggcagaacactatcaacagttagtgggtagcgttcccagagagatgagagcgctcatcgacaagcagaatgaggaaaaaacttacaataagctagttgcttttgaaaggccgtctgttaataattttatttacagattgcttaactatacgcatccttactttagcataccgctcctttctcagaatatcaaagtggccagattgggtaacagtgatatgatagaaatagcatacagttccaatgatcccggaattgcttacaatacacttgatatattgaatgaggagtttgtcaaacaatatcatgaactgcgatatggagagaccgataatgtcattaagttttttcaggaagagctggctcgactaggtaaaatgctgacctctgccgaggactctttaatagaatacaacattgaacaccgtatcatcaactacggcgaacaaaccaaacaggtggcgggaatggatgccagttatcagatgatggataatgacttgctcatcacttactccaccagtaaagcgttaattgatttttatgaatataaactgggagatattgccaaagcaatccgtactaacaacctattcttaaacaaacttcagcaaatatcacaattaaatacaaaaatctctactatggagattactcccgaccaaaaaaatcaacaagtactggaaaatgagaagggggtgcttaatgatgctgagaaaagtattaatgacattgcaatgcaattgagtgccgaatcagcttcaaccaacaatgtaccatacgaaaccttgataagtcaatggctggagcaggtcgtattgatggaaaagacaaaagcacagatggatacccgcgatatcatgagagaaaagatagaccgggatttcctgtacttctctcctatcggtgctacactcggacgtaaagaacggcacatcggcttcgtggaaagtaattatatgtcaacaatgggggcattgaatgccgctatcttacgccaaaagaatctagagatgacttcggcctcactcaaaatcatgaatccgccattgtttcctcttacttcttctcccaccaatgcacggatgattatactttcgtccatattgggtaccttattgtttatcattggttatttcctgattatcgaaatcttagaccgtaccctcagggacaagatacgcacacaacgcatcaccggaagtactgttatcggggcttatcccaaagacagcgccctacgatacagaaggtataataaggcaatagacgaaatggccatcaagcagttaagtactagtctgctaccccatctaagtgtcagcaaacaacgaatcatcaacctactgagcacggaggagaaagatggcaagacgcatatagcattagctctggaacaatattggacaagcatcggactggacgtgagacgcatcacgtatgacgaagatttcttaagtgaagacagcctgtacgttcaggctaacaacataaaagacttgtgtcctgaccttggaaaagatgaaattcttttaatagaatatccggtactaaagagtaatccgattcctcccacactattaaatgaggcttctgtcaacctgatgattgtacgtgcaaacagaacatggaaagacattgaccaactgatgtacaagcgtttattgcaggctaaaaatgagcaaatacccttgttcttctacttgacacaagccggcagaaatacggttgaggaattcaccggacaacttcctccgtatacgagatttaaaaatatggaatacagactctttcaattggggttgactgctgttgaatataacaagaaataaatgatagttaaggaatataacatctttgaaaaaggaatcaatgcaattgtcgtgactgtcggattattgctttgtatctggactgccactactatgaaagcgacagtagcaaccgcaatcggcctgattcccttcctgcttacttttatttttatctgcatcaaaaggccgactattcttctatgcatcacctttattatcaactatattataatgggaatcaaccgatattatccgattccgattcccatcaccaatatcttcgacctattattcggcattatgttgacgctcatcatactcaaacaagtatatacggatgacgacaacagaaagaacgcaatgaatgcttacacattcgtcttgttaggatggctgttatactgtatcatcaatgcaggaaacggcatcacgggagagttatatcccgaagcgtggctcagaatattaagaccttgggccatctatccgttgctcacatgtttcattctatccatacattgcaaccgctattcttttctgcattattttctgattctgtggggaatattcaccttgttggctgctgcaaaaggttattggcaaaagaacaaaggatttgacagcaccgaactggcatggctgtgggcatacggtgcacgcactcacttcatacattcgggcatccgttatttctcgttttttacagatgcagccatattcggatctactatgggactatcatgcaccacctttttcttgtcggcactatactccaaaaaccgatacctcaagctattctattttgtagtcagcatggcaggattctatggtctgctcattgccggaacacgagccgccattgccataccgatagcaggattgggtgtttttctcttcttatcaaagaactggaaaatcggtatgctatcattccttttgcttgtaggcggagtgggaatgttgaaatacacaaagattggagaagacaaccggttgatacgtcgtatgcgcactgtcttcgactcgaatgaccaatcactgctcgtacgtttcgaaaatcagaaagcactcaaagcctatatgtcggagatgcccttcggaataggaatgggcgtacaaaacggagtcatttcccctcaaaacaaacactattttgtctccatctgtcctgccgactcaagccttgtagacgtatggatacagatgggcgtagtgggtttgagtgtttttctgggcatgcacgccgtattattcatattgggtgcgtatatcatactgtttcgaatcagcaaccccgaaataagaggaccgctgacaggtatgttatgcggatgtgcaggcatgcttgtcgcctcgtatgccaacatggtttattttcagtttcctaacggaatcctgatatattcttgttttacgtttatctttctgggccctcatttagacagattatataccaaagaacatgaacagcgcacaacctgacatatcagttataactgtcaattacaacggttatcatgacacttgcgaattcattgattcatgggtgaacaccgtcacgtctgtcccctatgaaatcattgtcgtagacaatggctcaaccgccaatgaagggctcttgctgcaacagaaatatccttccgtccatgtcatacgaagcgaacagaatctaggttttgcaggtggcaataatctgggtataaaaagtgccaaaggaaactatcttttcttattgaacaatgacacccttattgtaaaagatactgtatacctgttaatcaaacgcctgctctcctcaaaaggtattgccggtatttccccgttaatacttaattacacggagccgcacaccatccaatttgcaggatatactcctctgtcctccatcacactccgaaaccgtactataggtagaggaagccgagacaaaagctgttatccggcaaggaagacatcttacctgcatggtgctgccatgctcctcaaaaagcaggttatagaccagataggacttataccggaagagtatttcttgtattacgaagaactggagtggtgcacccgcatgactgcggaaggatatgaactttggtacgatccggcttttgaaatatggcataaagacggcagttccagcggaaaagggagccccttgcaatgttattatttaagtagaaacagattattatatgcatatcgcaaccttcccggttggagactgtatcttgctttactctaccaactggtcattgtatgtcctaaaaacatcatcacagcatggagcaaagggcaaaaaaaagcagccaaagcacatcgggaaggcacaaaagcatttttcaaacttagaaacaaagacaaacagctatgatatttattggatatttagatttagtattattcgcattatgcgctttcactgttgtctatctgctgatatatgccatagcagcaacagtcaaacgcacagacaaatattccgaatcgagaataaaacatcgtttcgccattctcatccctgcctacaaggatgatgaatacgtcttttatgccatccggtcttttctgcagcaagactaccccatcgactgttttgacatcatcgtcatttccgaccatttgaaatcggaaaccaaccgacagttggcccaactacccatcatattattaaaagccaactttaagaaaagctccaagaccaaatccattaaagcagctatgtcacaactcgcagacagccaatacgacattgccctactgatgaatgccgacaatgtggtagagaaaaatttcctgaacgaaataaacaatacttatgcaagcggttctaatgccatacaaagtcaccgaatacacaaagacagacccaacaacatcattgttttggacgcagtagcagatgaaatcaataattccattctgcgggccggtcatgtcaccttcgggttatccgcctcactcaatggctccggaacagccattgacttcaactggcttaaagaaaacatcagaaagttgagcgatgaagatgatgaaaagaccattgaatcattactgctaagagagcgaatctatgtggaatacctgaaccaaacccgcgtatacgccctcaaagatggtggaaagaaacggttctatgcccaacgcaacagttggataaaagcacaatattattccctgtttaccaacataggcaacctgccccatgccattttcagcggaaatttcgattatgccgaccgcatcctgcaatggttcattttcccgcgcactattttgttgggaatcatcctgctctttggcacaataatggtattttttgactgggtagcctgtgttaaatggtggctattactcttctgcttgttgttcacaatggctttggcaatccctaactacctagtagacgataagttcaacaaagcgatgaaagccattccggtcatggctgcaggaatgattgtcaacttccttttcgggaaaaagaaaaagtaaatcaatatgctgtcgggagcgatacatatcattgaatttgtactatatatctattttgccgtctgcgtgggatatatagttatcttctctgttgcgtcttgtttcttcaagtcacaacaatatccccaaagccatgatttcaaacgctttgccatactcatacccgcttataaggaagataatgtaatccttgactgcatccattccgtattacagcaaacataccctgaacagctatatgacgtcattgtcgtctctgacggaatggacgatgcaaccaaccatctgctctatctggagtcacgcatcactttattgaagatacaggaacaagaaagttccaaagccaaagctttacgcctagcaacagaacatatatcctacctccgatatgattatgtcatcatattggatgctgacaacctcatttccaccgattatttatacgaactgaacaaagcggtatcccaaggcgcaaaagccatacaaacacatcgaaaagccaaaaacctgaactctgatacagccatactggatgcagtcatagaagaaatgaacaacaccatattcagaaaaggacacatccaattaggattctcctcagcactcatcggctcgggaatggtctttgatttccaatggtttaagcaaaatatcatacatacacacagtgccggtgaggataaagaattagaagaactgttactcagccaaggcatccacatagaatatgccgatagcatagagaccttggatgaaaaggtacaaaaagcagacagcatgcgccaccagcgccgccgctggatggctactcaactgttccttgctctcaaaatgggaagtaacctgccttcagccctcctacatgggaatcgggattatctattaaaaacaattcagacatttatccttccgcgcagtatccttatagcagtactgagtaccatctcactcatttgtagtatcatttccccgttttcgtccgtcaaatggtggattttatttatattgctgactctatcactatacattgccatcccccccgacatgagacataaatatgcaggcaaaataataaaacaactaccttattttacaatcattatgacacttaatttatttcatttaaaaggaatggcaaataaatttattcatacgcaacatggacagttatgaatctaaagaattatctacataaaaatcccaagttaaagaaacggattcatcgattcatcatgcatccggtgaaaacgcgcccctattggtggatacggatactgcaacctatctatattaaaaaaggaaaaggggcggtaatctatcgcagtgtccgaaaagaccttccccccttccaccaattccggttaggtaaatattctgtcattgaagattactcctgcctgaacaatgccgtaggagatatcatcatcggcgattattgccgaatcggactgagcaatacggttatcggccctatccaaatagacaacggagtcaatatttctcaaaatgtggtcctcatcggcttgaaccataactatcacgacatcaccaaaaacatcatcgaacaaggcatcaccacctctcctatccatataggagaacataccattatcggggccaacgtgattgtactgcccggtgtaaacattgggaaacactgctttatcggtgccggctgtgtggtaactaaagacatccctgattactgcgtcacggtgggcaacccggcacgtatcatcaagcggtttaatccacaaacacaaatgtgggaaaaagtcaactgagcaattatggaaaaagaaatcaaaatattagtctgtgcacatcgggaagcagccctcccgccacataaatacttctaccccatccaggtaggagccgccctcaccaacacccggttctaccatgcgcaagacaataccggtgacaacatttctgacaagaatccccatttttgtgagttgacagcacattactgggcatggaaaaacataagatgcgacatcatcggactgaaccattacagacgtttctttgatttctaccgatcgtttgcttccttttcacccgacagaagtttcattaatcgtgattcgtttctgaaaaagaaatattgctttcccgatttagagaagttattgaatgattatgacatcatacttccttccaaacgtcattatccttacaatgtgggcacgcagtatgccgttttccacattgtcaacgacctccatatattaaaggaagtgattcatgatgtcagtcccgaatactccaccgctttcgatacactgatgtatcacagaaatgcctattccggttataatatgttcataacccgatgggaacatttcgacggatactccgaatggctattcaaggttttattcgaactggaaaaacgtgtaaagctctccggttaccccgaccaagcccggctgttcggctatttatccgaacggctcatcaacatatattgcatccgaaaccggttgaaggtgaagtacattcctgtcatcatgcctctggatgaagcatttcgaaatcccggcaacctccgttacaccctgcgccgcttaaaaaacgacttgatatataaacttacaaaagtataaagtatgccactcatatccgtcatcatcccaatatataacaccgaacgacttctgcccaaatgcatagaaagcgttttggcacaaacattgtcggacatcgaaataattctgattgacgatggaagtacagacgagagtggaaaaatatgcgacagctatgcttgtaaagacaaaagagtacatgtgacacacatccccaatcacggagtaagccatgcacggaataaaggaatagaactaagccaaggaaagtacatccatttcatggacagtgacgaccggatggagcccgaaatgttatcggaactctatcgtctcatcctccgatatcatgcaaatatgtctacatgtggttacttgatcgaggacgagaacgaaaatatcatttaccaaataaaagaggaacaaacctacgttctgaataatcaggatgccatatcttctttgtttcatgactcttactacagatacaaaggcaatttatgggataagttatacgataaaaagattattaacaaacatcaattagcattcaacgaaaacatatactataatgaagaccgactattcatcttccaatacatgatacactgcacatcaatagcttgcaccaccattccttattatcactatatcattagaaatgcaagtgccatgcacacattcggaaagtcatatcgtgcccatatgtgtacatttatggatgcttttgatatcatggccaccctctccgcctcttttcccgagtctgtcaggagaaccttgtctcaagattacatccacagttcgatttcattcttcaaaaaatatgccactcaaatgcccatgcatgaaatacaaaaccggattcgcactatcaaaagaaaccagtatacctgtctctccgtatgtgagaaaataaggtacacattatcttttgcccacatactggttcttaaaaaattccatagtcagccaatccagtgatagcagcgcagcaagaatttcaccagcctgtaaaccatcctatgaaatccggccgtcctgttcaattccggaatcaattccaacaaaggagagtctgcatatttatatttttcataatccttcaacaccctttcagggaaaaacgccttcaacacacgatacctctcctccctcagcaaatcagtctgcatagtacttaatccagacatatcgtaatctgaaataattttatccaatctgcgataagaagtgtgctgaaaaatcaacctgtccacaaaaaaagaccaatctgcaaccagcactaaagactcatcaaaccctcccttttcaaacagtgccctcctgatgaaagccgcctgatgaggaggatgatttctaaataaatccatcatagacaaatcattacagggaggcactttaagcccgccggttcctacacactccaccgttccaatggcgatatccacatcaagtttctgcgccgctacccattccaaaacagaagaatcatgaaaacagtctcccgagttcataaacaccaaatattcgccatgagcctgcgcaatccctttgttcatcgcatgatagatacccttatcggactcggacacccaataactcagtcgggcagcacattgttcaatcacctcttcactgccatccgtagaaccaccgtcaataataatgtattcgtaatctccaaaagactggtcaaacacactcttaatcgtcttctgcagaccaactttattattataatttatcgttataatggtaaatttattcatcgctttatccaatcaaaaaaacgaagcacagtgccaaccgccattccagccatgcccaacaccaagcgtactcccatcgatggcttattgtggggatggcacatattgtattccgtcatacagttcaacattcttttgaaataagccaacttcaaacttgtataatttccttcccaatactccctaccattggtacctgatattccacgccacaaaggacgtattaagaaaggataaaagacaaaatctttttgttcatcaatgctcgtaaaaagaatatgctcaaagttacatcccttgctgtcatctatcctctccttacgcgccaaaaacgaatgttgcaagaaacctttatcggtaataagcattctgctgtccgaatacctctccctcctatccatctcactctgaatatcacagtgaggaaggatataccgatgaaaacctatcatgctatttacattcaataattttaatcgtcctgttatcttcaccaaaaagtcacattggtgcacaaacaaggaatgctctaatgcatactccaggatgagcgcctccccatatccttttcctttcttcctgtcaaactcctcatttccctgaaatgtaacaaattccaaacgcccacaatctacaaacttccgaaaatccccactgatatcagtccccgaattctcaacaaaaacaatcggataatccgtctgtaaaagataaaactccagtgcatcctcatactgcctcctccgtatatccacatccgtaagagaagtatgaatcatcttccccggattaatacaagcagtgagcacaatgacatatttatttcccataccactattcttccacttttcgcaaaaagtccaaccaatcctctctgaacagcgaactcttgatattaagatgttcgcaaaaacgatttccgaaaaaagaactgccaggaagaacggtaaagtacaaattagacttctcggtggtatagcgttttacattccgttcagcaatatcaaaaacgatatgataccctccatcggacaatgtataaggaagaatgacaaacttaagttcataaataccgggagaaagcgtcgtcaaattctgcgaatcattataatccgtccgtgccaaaggatacccccaagaactgtataaattaaagccaattaccaacgaagatatctgcttggccaccttcactttcatgtacactcttatttcagaatcagtataaaacataccgtcgtgatttgaatcaatcgaagcatacaacagctgaagcacgttgggatcgccatccatacttgtaaattcccgctgcgtaacaatacctctttgataagcatttatcacctcacccataatgcctgaaaatgcaacgctgccattctccagcaaaacacctttgcgacacaactgctgcatacttcccatattatgactcacaaacaacaccgttcttccctctcctttcgccacatcctgcatcttgccgaccgctttccgttgaaactccgcatcacccaccgccaaaacctcatccaccaccaaaatctccggttccagatgagcagccacagcaaaccccagtctcactgtcatccccgaagagtaacgcttgaccggtgtatcaatatatttctccacaccggcaaaatcgacaatctcatccagcttgcgagtgatttcgtgtttcgtcatgcccataatagcaccattcatataaatattctcgcgtccggtcaaatcaggatgaaaacctgttcccacttccagtaaagaagcgatacgccccttcgccctgatacatcccgttgtgggagaagtgacacgagacaatattttcaacaaagtagacttgcccgccccattcttgccaatgatacccaacacctctcctcgctctaccttaaaattaatatctttcaaagcccacacaaaatttcccatcgctttctgagaacgatcgttcacctcgccgatacgcagataagggtcttcctttccacgtatccgtgcccaccagcgattcaggtcacggctcaatgtgcccgtaccgatagagcccaaggcgtattgtttactcacattatcaaattcaattgctatattacccatactacatattgtcaaattacatccataaaactacgctgcactttattgaaagtgatcattccccacactacaatcaggaccgtgaaaaggaaactatatcccaaataccaccagctaaaaattccttcacccaaaaatccgtatttaaacgtttcgataatggaagtcaacggattagctattatcaaccacatatatttttcatgactttgctgcatcaccgacagaggataaatgaccggagtggcatacatccacaactgcaccccgaaagtaaccaagaacctcaaatcacggtatttggtggtaagcgaagaaatcagcagaccgaaaccaagtcccaaccctgccagcatcagcaccaataaagggaacagacaagcgtactcatttatcgaataactatttacatccgtcgcaccaccatcaagcacacagtacagataaataaaaagaaacagtataaactggatacccattttcaccaaactggacaccacaatagacaacggaacaatcaaccgcgggaaatacacttttccgaaaacattctgattggcattgaacgtatccgaacaacgattcatacactcggcaaaataattccaacacagcaaccccgccatataaaacaatggccggggaagcccgtctgtagaaataccggcaatgcctccaaacacaaacataaacatcagaacagtaaacaacggttgcaatataaaccacaacggacctaatattgtttgtttataaaaagtcacaatatcacgccggatatacatcaccaataaatcacgataccgccacaactctcccaagtccaacttgaaaaatcctgttttcggcacaatcaccaatgtccatttctcctcttccatcatctttctattatctctttccactcttttattatgttatttatactaaactcgcgagcatactccatggcaatcctacccctttcggccaaatccgtacttgttgccataccaaccatccgttcagccagttccgctatatttccattttcaaaaagtactgcggcacggctctcacccaacagttcctccacaatgggcagatttgaagcaataaccggtagaccgtgtgccattgcctccatcaataccaacggcatcccttcccacctcgatgccaaaacataaaccccggcttgaacataataagaatttacatcgttggtaaacggttctatccttatcctgtcttccagcccatttttcgctatcaaagaacgatacaaagagtcttcgggcccctcgcccacaataacgagatgccattgcatattccgcttggcaaacaaggcaaacgcctctatcaacaaatcaaaacctttatgattcttagagaaccgccccaccgacaaaaaagacttattatcaggccgggcagttctcttcacttccattgtcagcggattgtatatcactctcgtttccagtcccaactccgtcttatatctctgttgatccctccggctcaggacaataatccgttcaatatcaaccatccgattgcagaaaaacgccttcaaccggggaagatacggatgcttcttttcaaaaaacgcttcataagaattgtgcatccagcccaccgttctcggtacattcaacttagaccggacaatagccaaatgaagacaacaataggcatgcaccccaatcgccacatcatagtttccaccatttattttctctatcagttcgtcctgataaggcaataagaagaaactccgtgcatacagagaacaagtccattcattcttcggaagtaaatatttacacacaaaactacagcacttctgtcgcaaacgccgccagatactgaccggagcatagatgagagacacaaacctgacagaagaccgatggtaatcataccggcgggtctgcctaatgtcatccgtggtcaatatcgtaacctcatactcctccgaaagccgtttcgccacttccgccaggacacgctgcactccgccaacgccgaaaaccgtatcacaataaaaaagaatcttcttcatcactcatcagcttcattaaatgacaattccctccgaacaaagaatctcgggatatctctcagaataaagttccgttatccggcaagtattcattttaaaccttgccctgtcaaaaaagccacacaccgttctttttaatttattcggattatacccgcatcctatccccaatatccgccgctgataaatgcggagatggttgtgatagcagaacaagggcaataatatttcccccataaatccaaaaacacgctgcgcgtagtgataaggagacaaacgaaggtgtttctccacctcgtacaatatggaaaacaaccattcggcataacaatgaaacaattcctttttcatgatgaacatattccgctggggaatatagtttttcttataaaacacgtccagcacactgtttctgtaagcaggatacagcttcaaaataacctgctccaatatcatataatcaatgaaaccggagttgaaaatatgctcatcgacaacagacctgtcaaacacacgggcagtaggcaatatcacatcatattgagtaaagacatcagcaaaatcaagagtagaaggagtttttacaaaacattcccacgtaatactatccgattcgatatgtttgaaaatatatttcttcggcgagagatcaaaataacgccggtaatgacacaaccctatataatcgacatctttcagattcttccaagcccaatacaaaccggtcaattcacaataagttttattcttaccgcttatattgtcccccacatcatctccctgacagcccaaatcaatagtggaagccgatttacctacctgaacaggcatataaatatcgtcatctcttacagggccttccttatgggtacagaccaagattcttacattatgtttttccatcatcattttttattattgccgtgtgtagcacatatacaaagatagtcttttttttagaaattcgactatttaagcatgatgtttaaaaaatattcctacttttacaccgacatcccttacacagaaaacaatgaagacagaacactttagacagcccctttcgctgatgcgttttctggcagtaatattaattaccaattcgcatatcgggcctttatatcctcctcatctgcaattcctatctaccggaggggcattgggcaactctttattctttttttgctcgggatttgcactgtatctgagcaaccgtgacaccggatttgctccgtgggcaattaggcggtttacaagaatctaccccagtttatggatattcatgacagtgtgtttcctcggagggatacagtctttccgtctgccggacattattattcctaccttttggtttctgcaagccatctttgtattctatgttttcttcttctattccatcaagttttttgaaaggcagttgtggaaagtctgtgccgcctttatctttccgttactcgtcacctatttctatgtgccccatcatgaatggattatcgaaaacaccgaacacaaccactttttacattggtatttttattacatcattatgctgtttggagccatcgccgcccaacggcggacaaatacagaaagcccttcttccatcgcccgaccgctgtcggctgtcctattgattgtcaccgtctactacagcttaaaaatatatatacttcactcagccagtcccatctatgatgtacaactctgcattcccatactgctgacactctttagcatttatatgttccgactttttgaaagactctccaatattggaacaaaaaaaacggcagcgattgtaaactatattgcaagtcttacattagatatttacatcgtacaattcgtgattatgggctacttcacccgatatacttttccctttggatacttcggttctattgctgcaatcttattggccgccggcatactgaattacatttcgaaatacgcaacctccttcttaagaaacagcctgtcaaaacttatcatatagactccttgatcgacagtcatatatggatgcaattcttttcttaaaaagttcaattctgtcaatcacatatctttttatcggaatccccaacaataatacacctacaactgcaaagaacaccaaataagggaaaacgacagaacaaataaagagagataaccatctaaaaaataaacaaaacgaccaaaataaaaagatgaaatataaatatccagtccataaaaggacacatctgccttaagtgcggccatattacaccgataaaacattcggagtgcagcattacaaaaaacattataagtaaagagacatactttcagaaacatctacttatcttagaaaagaaggaagagtttcaaaaaaagaataaggtctttaagcaaaacaacaaggtctttgaataaaacatcaaagtctttttctaaaaggccttagtcttttgaggattttatgtgaaagcagctctctatttttcccttcacaccgaaataccgattaataaagggtttcaatagccgcaatgtgtgaaagctattgtaaactaaacttatagaatagcagaaaatgacaagaaacaaagatacttttaatacagaagcaaaaaaacagaaaagcgtatcctgcttattttaaataatttctttttaactttatactttccagtcatttccgttgcgtttttatttgggattctatcaggaaaagcttatttttgtgggaaataatatgaaggatgaaaatagtgtatgtctatgacgccatcgcgcgaatcggaggcgtagaaaagattttagcagacaaaatgaattattttgccgacgtatgcgcgtacgacatttatctcatcactgcagcacagggaaatcaccccttctcttttcctatatccgcacgagtcaaacatatcgacctcaatgcccgctttcacctgcaatatcagtataaagctccattgcgatggtggatgaagtggcggctggattgcgacttcgaaaggaaaataaagaaacaaatagcacaaatagacccggacatcatcattgctaccacttactataaagcagatgtggtgtgtcggctggaatgccgcgccaaaaagataatcgaatcgcattgcgtcaagtcgcataccggcatcaatgatggaatcaaacgtagcaaacccattcagcttttatacgattatttacttaagaagagcttcctcaccatcgaagaaaagagcgatgccatcgtatcgctcaccgaaggagacagtaaggaatggaatgcagactgtaaacgaaaatttgtcatacccaattccatacccgagattccacccgccaccagtccccgcacggcacagcgcgccataagtgccggccggctcaccaaagaaaaagcattccaccggatgattgccgcatggatgaaggtgtaccgcatacatcccgaatggcaactggatatttacggagagggtgaagaaaagaaagttttattacatacaattaaagcgttaggactggaaggagtagtgagaatccaccctttcagtaccgaccttgggcaagaattcctcgacagctccatgtttctgctatcttcattatatgaaggtttcggactggtactcatcgaagcgatggcctgcggactcccctgtatcgcgttcgattgtccatatggcccgggcgagataatacatcacaacaaggatggggtgttactacccgattttgacaaattgtcgacagatgcccatgagttatggacaatggcatggtctgtcaacaaactgatttcgaacccatctttgagagaaaagttaggcaacgcggcaagagaaaatgccaaacgttttctgcccgacaaggtgatgacaaaatggattgatttatttaaccaactcgcagcacgatgaaaatagtatatatacacgaaagcatcgcccataaaggcggactggaacggatatttgtcgacaagatgaattatttggcagaccggttacagtatgaagtatatctactcacagcctcacagggaaatacacctgtcagtttccccttgtccccccgggtcaggcatttcgatttgggagtccgatttcattcgcaataccaataccgatatcccaaacgtctgtgggaagcaaaaaaattggataatctgctcaaagaacgcgcccaaatgatgatagacaatattcatcctgattttatcatctgcaccacggcctggaagcctgaagtaatcggcctgttgaaaggaaaggcaaagaaaataatggaatcgcattgtgctagagaatatatggcaatatcggacaatttcagtcggggctgcgtccgcgatttgtttgaccggtatgccgcacgcaccaagttctgtgctgtgcggaaatattgtgacgtgttggtaacgctgaccgtaagcgatgcacggtcgtgggcaaaaggatgcaagcagccgatacgtatcatccccaatttcacatcgttcgtttctttggaagactgtcccaactataatgtgccccgtgccatagccgtggggcggctcacttatcaaaaaggatttgaccaactgattaaagcctgggcggaggtctataagatatatcccgcctggaagctggacatctttggcgaaggaatactgaaggacgagctgaaagcacaaataaaagcttatggactggaaaacacggtgactatccgcccctttacggacaacatagcggaagaatatctcaagagttccttcttcgtgctcagttccaattatgaaggtttcgggctggtgctcatcgaagcaatggcgtgcggattacccagtgtggcatacaactgtccgcatggacccgctgatatcatctataacgaaaaagacggtatgttggtggagaaaaatgatttaaaatgttttacccggagtttgataaaaatgatccaatgtaatgaaaacagagagtggatggggcaaaatgccaaaatcgacatgaagcgttattcgccggagaacatcatggcaaaatggaataacctattcaaaaaaatgacatgaaaattatatatgtatatgacacaatagccgttgtgggcgggatagaacgaatatttgtcgacaagatgaattatctggcagaccacttacaccacgaggtatatctgattacttcgtcacagggagaacatccaatcagtttccctctatcacccaatgtgcagcatatcgaccttgatatacgttatcatgtgtgctacggctatccgctgccccaacgcatatggatgaagttcaggctgcaacaactaagcaaaaagcgtctaaaagatacaataaaaaaaatagatccagatattatcatttgtactacaacctacatggtgactgagatatgccggctgaaatgtcgcgccaaaaaggtcatcgagtcacatggggcgagagactttatccaccttacagatgatttcaagatggggttctttaaagacttgagaaatgaatggaacacacgcagacgtttccgacagatagaaaaatgcagcgatgctgtggtggtaacgcttacgcaagcggatgctaaagcatggagcaaagcaccgcatgtgcgcgttattcccaatttcacaaaattcatcgttccccaaagcagttcatgcgaggtacaccgcgtaatagcgatcggacgactcacctatcagaaaggatttgacagactgattgatgcgtggactatcgtcaacaggcggcatcccgactggaaattggatatcttcggcgaaggtatccgccgggaggcattgagcaaacaaatccgtaacaacggtttggaaaagtcggttaccattcatccttttacgaagaatatagcacaagaatacctcaacagttccatcttcgccctaagttccaattatgaaggtttcgtgttggtgctgctggaagcaatgggctgcggactgccgtgtgtcgcctttgactgccctaacggaccggcagaaacaatccgaaacggagaggatggtttcttggtggaaaatggtaatataaaggaatttgccgaagctctgtgccacttcatagagcatgaagaggaacgcaaatcatttggccaccgagcacgaaaaaacattgaacgctacgcaccggaagttatcatgccgatgtgggaaaaacttttcaacgaactgaaggagaaatgaaaattgtatatctatatacgtccttgaccaccgtaggtggtgctgacagaatcgtcattcaaaaggcaaattatctggctgacgtaatggggcatgaagtgtatgtaatcactgattcgcagacaggaagggcagtcatctttccgctgtcgcccaaggttaagcatattgatctggacatcaacttcgacagacaataccgtcacggcttgctgctcagaagtctttactatttcatgctcatgtttgtttacagaaagaaactcggcagattactggaacacatcaaagcagacattgttatcagtacattgggacgtgatattgacttcctgactcaactgaatgacggaagtagaaaagtgggagaagcccataccacccgaatgaacttacgcaaaacacaagacttgctggaaggcggattcgtacatcgtatgataggaaaacgacttaaaaaaaagatagatactgctgtaaaacaactagacgctttcgtcgtactcaatgaacacgagaaagaagaatgggcaaccgtcagacccgccgttatcattcctaattcattgccattctatcccgccgttccaagcacattgtcagcctccagagccatttgtgtgggcagattggaatgggaaaaaggaatagacaggctgattgatatctggttgtcggtgcataatacacaccccgattgggtattggacatttacggacaaggaatgcttcaagacgaactgcagcaaaaaattctagctgcaaatgcaggaacttatatacacctcaaaggaagcagtcccgatattatgtatgaatatctcaactgttccctattggtattgacatccagatacgaaggattcccaatggcactgctcgaagctatggcctgcggagtgccctgcgtaacatacgattgccctttcggaccacggagtatgattacgaatatgagaaacggtattcttgtcgaagaaggagataaaaaggaaatggtggataaaataaattatctgattgagaatgaaaagaacagaaaaaaaataggaaccaatgcgcgaaaatatgtattacagtattcgcaaaagaatatcatggataaatggaatatcctttttaacaattgcctaaccctcacatcatgagaattatttttttattatatcacggtttctccgagagcagcggcatcagcaaaaagattctatgccagataaaggcattgcgcgagctgggacatagagtgaacgtctgcacatatgacatgaataaaaaccgacaccgggtgcgcatgatggatgaagagattatagaagattatggcacgggaaaatgggcagccgtcaggaaaaggatttcatacgatggcatctaccgctatgccgttgctcaggaggtcaacatgatttatgtgcgttcgtttcacaatgccaatccgtttacggtccgcctgttctaccggttgcagaaagccggaataaagattgcaatggaaatccccacctatccatacgattcagagtataaaggctttccgttcttcacccgatgcggattacaaatagacagactcttccgcaagacgttagcaaagcgagtcaacggtattgtcacattttcagacgaaaaaacgatattcggccaacgcactgtcaggatatccaacggggtggatttcgatactgttccactccgaaagacaataaacaataattcgtcccctactctccatttaataggagttgcggaagtccactactggcacggctacgaccgactgatacacggactaggagagtattaccgacaatatcacgacaaagaaatttatttccatattgtaggcggagtatggaaatcagaaatgtatcattcgcaacatgctccgggttttcatgaactcattacccactatcacatcgagaaacaagtcatttttcacggacagaaaatgggaaaagagttggatgaactattcgacctggcagactttgccatcggtagtctggcacgccaccgcagccacatcgataaaataaagacactcaaaaacagggagtatgcagctcgcggcataccgttcatctattcggaaacggatgaagattttgaccgtatgccttacattctcaaagcacctgccgatgaaagtgccatcgatatcacaaagattatccggttctgctcaactctcgatattccaccgaaacaaataagaaactccatctaccatctatcttggaaaaatcaaatggaaaaggtgataaaagagttataaaaattttaatatcaaagataaaaaacttacatttgtcaaacaacatacaagaaggggcagtatggatagaaaaccggttatcgtttattgtacgccgtctctttatattcccggaggaatagaaagagtcttaacaacaaaggctaattatctggcagatgtggcgggatatacagtctacatcattttgacagatggtcaagataaatcaccttattatccgttgtcttctcaaatacggctcatccaactgggcattgagtttgaagagctatgggatttgcctttgtacaaaaaaataatagtatacctccaaaaacaacgcatatataaatgtaaactgagaaatgtcttgttcagcattaagcccgatattaccgtctctttgatgcgaagggaaataaatttcatcacttccataaaggatggcagcaagaaagtgggcgaactgcatatcaataaaaagaattatcgcaactttaaaacagagaccaacaacttcttcaaaaaaatgctctctactttttggagtaaacaattaattcataaattacaaaagctcgatcaattcattgttcttactcaagaagataaagaagattggaaagaagtaaaaaaaatcagtgtcattcctaatcctttaccattttacccggaaaccttttcacaatgtacacagaaaaatatcattgcagttggtcggttctcgcatgaaaaaggatttgacttattagcacaagcttggaaaatcgtctgccggaaacataacgactggcatttgcaattatacggaggaggagataaaacgtccttatacaaattaatattacaattaaatattaccgacagttttcaaataaacgaagcgactaccgatattttgaaaaaatatactgagagttctatttgtatactaagttcacgttttgaaggcttcggaatgagtatcgcagaagcaatgtcctgcggaattcctgtagtttcttttaactgtccgtgtggacctcgctatattattcgagatggagaagatggtatcttagtagaaaacgggaatgtggagcaattggcggataaaatatgctatttaattgaaaatgaacacagaagaaaagaaatgggacgcaaagcgcatatcaatataaaaagatttgaaacagagcagattatgtctcaatggataaagctgtttgaagaattattaagaatatagagagtcatgaaatggtataccgattatttatccgcatatgaaaagccatacagtgagttgcctcccccactcaccaacagagtcaaaaaaagaatcagagagttgaaacatcccaatcctttggtttcagtggtggctatcgctcataatgaaggaaacagaattttctcttgcctatggtcgatatgcgaaaacaactgtcactttcccatagaaatcatagtcgtcaacaaccattctacagataatacggaaagtatattgaaaaaactaggtgtgacttattataatgaagaacagaaaggacccggatttgcccgacaatgcggactgaatcatgccaaaggaaaatattgtgtttgcattgattcggacacgatgtatcctcctctctatatcacaacaatgacaaaagcattgcaacaaaaaggagtcatggcagcgtatgccctttggagtttccttcccgacaaacattattcacaaacaggactttttttctatgaaaaactgcgtgatgtttatttcaacatacagcatctacgaagacctgaactcaatgtacgaggaatggtctttgcttttcaaacagacacagcacacaaagtaggtttcagaaccgacatcattcgtggcgaggatggttcgctggcattgggactgaaaaaatacggaaaaataaaatttgtcagaagccgtaaagcacgtgctgtcacaggctatggcactatctctgccgatggttcacttttcaacagcttttggaagaggacggtcaaaggaattaacaattttacctctttgtttcattacaaagaaaaatatgaagacgaggattcaaatttgataaaataatcaatacatgaaaatagcaatagaagctcaaagaatatttaggaaagaaaagcacggcatggactatgtagcccttgaaaccataagagaaatacagaaaatcgaccgccaaaatgaatatttcatcttggtgagtccgggagaagacaggtgtctgcaggagtcggacaatatgcatatcgtacagatagattacccatcttaccctttgtgggagcaaatcggactgccgtcaaccctgaaaaagatacagcctgacttgttgcattgcaccggcaatacagctcccttgtggtgtcataccccactgatactaaccctgcatgatattatttttcttgagccgaagcaaggtaagaaccaatctgtatatcagaaattaggacgatgttacagaaggttcgtagttccccgaatcttgaataaatgtagaaagatcattaccgtatctaattttgagagggagcatatctgcaaattcctacattgggaaccgaaaaagataaccactgtgtataatggctattcttcgcatttcaggcccatcacggaatatcaagccgtgacacaaaaatacatcggaacggaacattattttttctttctcggcaataccgaccccaaaaagaatacagcaagaatactacaagcctatcggcactatctgaacacttcgtctcaacccctaccgcttctcattgctgatttaaaagaagaagttatcaataattacttacgtacatacggtctgacggatatcaaatccatgctttattacccgggttatatccctaacaaggatttgcctgccttgtatagcggggctactgcattcatttatacttcgttacgcgaaagtttcggtatccctatcttggaagctatggcatgtggtacacctgttatcacctcacaaacctctgctatgcccgaaattgccggaaaggatgctatcttggtaaatccttacaatccagaagaaatagctcaggctatggtacggctggaagaagaccccgaataccgtcattcactgtcacaatatggtttaagaagggtacagcggttttcttggaaaaaaactgcgcttaaaacattagaattatataatgaaataatacaacaatgaatacacttgaaatcatattctttattcttctgtccatcgttttctatacttatataggatacggaatcatactttggatattagtcagaataaaacggatttttataaaagaaaagagttatcatacgatggaagaacttcccgaagtaactctcttcatcacagcctacaatgaagaacaggtggtagagaagaaaatgcaaaattgcctcgaactggattatcccaaagagaagttccaaatagtatgggtgacggacggaagttgtgatgccaccaataaaaaactgaaagcatatcccgatgcaactgtgtactattctgccgaacggaaaggaaagactgcagccatgaaccgcggaataaaatttgtcactactccgattgtgatttttacggatgccaatacttctattaactcccaatcgatccgcgaaatggtacgttacttcaataacccgaaggtgggatgtgtggcgggagaaaagcgcatcaatatgcacaccaaggatgaagcagcagtgggaggtgaaggaatgtactggaaatatgaatcttttctgaaaaaattagactcacaactccattctgccgtaggcgcagcaggagaattattcgccattcgcacttccttatacgaacaaatgcccaatgatacgctattggatgactttatcctttccttaaaaatcgccatgaaaaaatatattattgcatattgtaacaaagcatacgccatggaaaacggttcggcaaacatgaaagaggaagaaaaaagaaaagtacgcattgcagcaggaggaattcaagccatttatcggttacgaaagctactcaatccattccgttatggaatactcagctttcaatatgtatctcatcgcgtactaagatggtccatcacaccaattgccttgtttttgctcgtacctctgaatgtattattaatcatttacaatgagcattcccgcttctatatcatactcttggtgctgcaattattattttatgcaggagggagctatggatattatttatccacaaaatcagtaaaaaacaaattgctctatattccttattactttctgttcatgaatataaatgtcattaaaggctttttctatttcataagaaaaaacaaaaatgacggtacttgggaaaaggtacgcagagccgtatgattaccccaaatatgaatgtatcatttcgcgaagtttggctgccataacaggctttgccatatagttattacatccggcaagatatgccttttcacggtcactgtcgtatgcattagcagtaagagctataataacaatctcttcattgaatgtacgaatcactttagtagcttccaaaccatccattacgggcatctttatatccataagtatcaggtccggatgctctgcacgacatatttcaacagcctctgcaccgttaaaagcacggagtatttcataatccctccgcaagataatagacagtaaaaggaaattactttccgtatcttctgcaactaatatttttttcatctcactattttgcttgtttctccatgcaaaattacgatataaaatgatataagcaatattttttttgtatatttgctgagattaataaaaacattacgacttaatattaagttgagtaccgtaagattgatatgaaggcttctaacaaaatattacacgaaaaacagtatgccgaaagaatcctagagattaccggcgatacaatgttctttgtatacaaagacgggacctgtcttgactttaagcctaaccgaccggacttctatatcaaagaggaagaagtggtaggcaaaaatattttttcatatttccctttggagacagctcggaaaatgcacaaggaatttaaaaaagtcattgatggaaaggtgttgtcctcggcagaaaactataagctcattctgggagaagaagtgaaatattataaatgcattatttcgaaatttaatgaagaccatctgatatttcaatatcgagacattacggggcacagtgtagtaaggctgaaactggaaaagaaaataaatgacttacgtgaagtagaaaaagcagcccatatcggcctgtggacttttgactcactcacccgaattttcacttactcaggctatacccaggtgttttgtgataatgaagaagaaaaaacaattacttttgatgaatatatcacctatatccatcccgaagataagacaagagttgaaaattggatagagaattatttgcatggaaaagaaagtcaagataccatttcatataaattgctgataaatggcaagattgtagacatgcgactgaaaatctataatcgggaagtatataccaaccgtattttgctggaaggatatatacagaatacatcggaaatagtatggaaagctgagcgttccaatcaactaaaatcagcgtttcttgccaatatgagtcatgaaatacgtaccccgctgaatgccattttaggattttcacgtattattgccgagacagacaactccgaagaaagattacaatattatgatattgtagagaagaacaatatgcgcttgcaagagctgattaacgaaattctggacttatcaaagatagaatccggaatgatggagttcaactatgcacctgtcaatctctataaattatgcgatgatgttaaaaacacttatcgcttccgttgtcaaagcggagtagatttgattttcgaacagtcagaccgttctctttacatatctaccgatagaaaccggctcttccagatattctccaacttaataggcaatgccactaaatttactcaaaaaggacatatcagttttggatataaaaaggtggacaaccagattatttttcatgtgaccgacaccggcaccggtattccggccgaaaagcttcccaagatattcgaccgctttatgatggccaatgacaatgttgccggtacaggactgggactttccatcagcaaaataattgccgagaaactaggaggaaaaatttgggtaaactccaaaccggggaaagggacgacatttacattcaccatcccctatatatctgtcaacggcgaagtaaaaagagaaagtcatactttcacacgctacacaaacaacaaagaatctacacataaagagattgtcatactagtagctgaagacaaccaaagtaattatgacttaatagaagccatgattggtaagacctataagctggtacatgcccttgacggtatggaggccatccaattgtatgaaaaatatagccccaaccttattctcatggacataaaaatgcctaacctcgacggtctggacgccacacgcatcatcagagaagtatcccccaagatacctgttattgctgttagcgcctacgcttacgaaaaagataaagcagccgcaatagaaagtggatgcaatgagtttttgaccaaacccatatctcctgatttattaaaagatacaattaataaatatttaaaaaacacataaattatgggaagactagccgtatacaaatttgcataccttttatccatcatattcactcttctgatattaggattatccgttttcgcttattttgcaggaagaatagacccagaaagcaatatgtttgcagcctatattgcatttggaaagcctatcttagtcattatcaatatcttgttatttttttattggcttgtcagattcaggtattgggtatggattccgctacttggtttattgataaattacggatatattacttccatgtatcaagtttacaattcgaccaaatatgccaatgatacccaactgaaaatcgtgacttataatgtacattcattcggaggagaaatcaccggtttctcggctaaagaatttgctgacatcctgaacaaagaaggagtagacgtactatgctttcaagagtacaggggcaacggagatttcaccaccaaagacttatataatacttattccaaaaactttccttactcatatctcccggaaggacgcgcgcaagctatttatagccgctaccccatcaaacagtctcagattattgagtttccgaacactaacaacggagctatttggacagatatagatgttaaaggaatgactatcagggtaatcaacgtgcatatgcagaccactaaccttgaccgaatgcgttcgaaagccgcacaagccagagaagtaggagatgaagaaaaagaaaatcaaatttatacacagttcacagataatatggaagccaatatcattcaacgcgcaaaacaagccaaagatatcgcttcattggtaaatgccaccgagactccagttatcttatgcggtgatttcaatgatactccgggaacatttacttacgaaacactgaaagggaatctgcaagatggttttctttctgccggagaaggatatggagctacttatcgcgggctgcacaatctgctcagaatcgattacctgttccactccccttctttattggccctcaaatatggtactatgtcatacgatatgagtgaccataaccccgtttatttggaagtaggactctagtaaaaaacaaccttcttataactcataatgcacccctctattttaaccctatattgtgataaatcaaagctaaaataaagggatgctcttttttaaagttttttatctataagatactcggcttctatcttacgaccactgtcatgccttcaacggaaccgaaaaataaaaggtagaacctttcccctcctccgattcaaaccaaagacgccctccattcttaacggcaaaatcaaggcacaacaacagtcccaaaccggaaccctcctcattattcgtgccatatttactaaagtgagtctccgtattcaacaacttccgctggtcctcttcactcatcccctttccgctatccctgacactgaccaccacactgtcgtctactatccgggcaccgaccacgatttcagaatcattataactaaacttaatcgcattgctcaataaattacgcataatggtcttcatcatatcgatatcagcatgaacctctatcttatcatctcccagataacgcaatttgatattctttatgcctgccaccagattaaaaatctcaatgactgacgcaatattctcaacaatattgaaatcctgatacaccacattcaatttaccaatctgactttttgtccacttcaaaaggttatccaacaaagcaaacacatcctcggtactttggttggccatgctcaacatctgatacatttcttctccaatctgagaaggaggcaaactcagtatcaacatattgagtaccattttaatggaacccataggagaacgcagatcatgagcaatcacagaataaagcttgtctcgccccatgattgttttgcgcaattcttccgtttgacgcagaataattctttttgccgccaccagcgaaatctggtgagtaacacgaatcaccaattcttccttattgaaaggctttgaaataaaatcgttcgctcccaccttgaaccctttcacgatatcggaagtcgtgttcaaagcagtcagaaaaataataggtatattctgagtcacaggattcgctttcagtttctctgacacctcaaagccattcatttccggcatcataacatctaacagaatcagatccggctgcttttcggctgcctgcaccaacgcgtccttaccattatttgcagtaacgaccttaaacttctcgtttgtaagcaatacctttaatagcaacacattagaaaccacatcatccactaccaagatggtgtattccgaatgatctatcactacattaacatctgctgtcatattcgccactatttagagagaatttgtttaaaataattaattacttctatcaacccttcctccaaccgtacagttggtttccagtccaatttttcctttgccaacgtaatatcaggccgacgctgacgcggatcgtcataaggaagaggttgataaactatttttgactttgaggccgtcagtttcaacaccaattgtgccagttccaacatagaaaactcacgcggatttccaatattcaccggtcccgtaaagtcatcccccgtggccatcatacgcaccattgcctcaatcaaatcatccacatattgaaagctgcgggtctgctttccgtcaccataaatcgtgatatctttattctgcaaggcttgcactacgaagttagaaataacacgcccatcatcgggcaacatatggggaccatatgtattgaatattcgcactatttttatcttcacccggtgctggcgataataatccatacacaatgtttcggcacaccttttcccttcatcataacaagaacggtaaccgataggattcacattaccccagtcagactcctgctgcggatgagaaatcggatcaccatacacttcgcttgtcgatgcctgaagcatacgtgcattgtttttctttgccagtcctaacatattaaaagttccgaaaacagcagtctttgctgtttttatcgcatcatattgataatgaatgggggaagcagggcatgctaaattatatatctcatccacatccgcacaatacggattcaccacatcatgttccaccaactcaaaacacggatgtcctatcagatgctttatattatctttgcttccggtaaaaaagttatcaagacagataacccggttaccctcgtttatcagacgcgtacaaagatgcgaacctataaagcccgcaccgccacttaccagggctttcttcatccttctatcatttatattatattttctttcgtaaagcaaaaataagcgattagttccattcctgcaaactttaaatacaatattattacttatatttgcaggcatgatagttaatccgaccaataaatgaaaaaatatccaaccattatgagcatagccggctccgattgcagcggaggcgccggcatccaggccgatctgaaaaccatctcggcattgggcgcttatgcagccaccgccatcaccgctatcacagttcaaaataccaccggcgtacgtgccatccaccctgtcccccctgtttttgtacgcggacagatagaagccgtcatggacgacatacgtcccgatgccataaaaataggaatgataaatgacattgagattgtaaaggttatctctgcctgcctgcacaagtaccgacccgcgtatgtgattttcgatcccgtcatggtatctaccagtgggcacaagctgatagaagatgacgccattgcagcccttaccgacgacttaatgcccctcacctccctcatcacacccaatctgagggaagcagaagtgttgacaggccatcctattaataatgtagaagagatgaaatcggctgccctcgaactattgaaattcggttgcaaagccgtcctcctgaaaggaggtcacctggaaggcggactaatgtgcgatgtgctgcagatagccggagaaagtactcctcacctgttcacctccaccaaaatagagagtccgaacacccacggaaccggttgtaccctctcttctgccatcgccacattcctagctttgggttatgtgatgccgcaagcagtggaatgtgccaaacgctacgtcacccatggcatagaggcagggaaagatatccgcatcggtgaaggacacggccctttaaaccacttttatcatcctgtccctatgaatattaaggaagaatagcacctagtttccaaagaaataattacctttgcaacgtttttaaaccaaaaaaggaaaaatatgaaagcatttgtattccccggacagggagcacagtttgtaggtatgggtaaagacctgtacgaaaactcggctttggccaaagaattatttgaaaaagcgaatgacattttaggataccgcatcacagacatcatgtttgaaggtacagacgaagaccttcgccaaaccaaggtcactcagcctgccgtgttccttcactcggttatttcagccctctgcatgggtgatgatttcaaacctgaaatgacagccggacactcactgggtgagttctctgccttggttgccgccggagccttgtcgttcgaggacggattgaagctggtatatgcacgcgccatggctatgcagaaagcctgcgaagcacaaccttcgacaatggctgccatcatcgcattacctgatgaaaaagtagaagaaatatgcgaagccatctctaaagaaggcgaagtggtggttgccgccaattacaactgcccgggacaaatcgttatctccggttccatcgaaggcatcaataaagcttgcgaacaactgaaagctgccggtgcaaaacgcgctctgcctctgaaagtgggtggtgctttccactctccgctgatgaatccggccaaaatagaactagaagccgccatcaacgcaactgaaattcatacaccaaaatgtcctgtttatcagaacgtagacgctttacctcacaccgatcctgctgaaatcaaggctaacctggtagctcagctgaccgcttctgttcgctggactcagacagtgaagaacatgattgccgatggagccgacgagtttacagaatgcggaccgggtgctgtattgcaaggcttgattaagaaaatagacaaagacgcaaacgctcacggaatagcataaataaatatacaccgtcattcttcctcaaaagctcaagagaatttttccaagcaatggagacatcttcggggaggaacgacggtgtatttttatcccatcttttttccatatctcgttaaaaatgattatgtttgcccatgtaacaaacgagataaattaatgaatacattcaaatacaacatagggtatgccctgagcggaggattcatcaaaggatttgcccacttaggaatcatgcaggcactacacgaacacggcataacaccgaacatactttccggagtaagtgccggtgcactggctgccgtattctatgctgatggcagagaaccctatcacatcattgaactctttgaacaccattcatttaccgaactcacaaccttttccattaacaaacaaggattgctgaagcttgacagtttcattgatttcctggaaagtaacctgcgaaccaaactgatagaagaacttcccatccccactattatctcggccaccgatttggaccacggaaaaacagtttctttccgcaaggggaaaattgctgaacgggtagctgcctcatgttgcatgccggtactgtttgcaccacagaaaatcaataatacttattacgtagatggaggaatattaatgaacctcccggtaactcccatccgcgaaatgtgtgaaaaagtgattgcattcaacgtcagtccattggtggcagacgaatataaaaagaacgtggtaacaattgctttaagggcctatcattttatttttcaagcgaacactctgtcacaaaagcctctgagtgatttgttgattgaaccctacggactggaaggatacagcaaccgagagctggaaaaagccgaagaaatttttgaacaaggatacaatacggcgaatgaaattctagaccatttgttacgagagaaaggaactatttggaaataaataaaaaataatataatgaaaacacaagaaaaaattatcatctaccaggtgtttacccgtttgttcggaaacggaaaccctcgttgcaaaaccaatggctctttggacgagaacggctgcggaaaaatggctgactttacggccaaggctttgggagaaatcaagcgtctgggtgccacacacatttggtatacaggtatcatcgaacacgccacccaaaccaattacagtcgctacggcatacgcccggaccaccctgccgtagtcaaaggaaaagccggctcaccatacgccatcaaggattattatgatgtagaccccgatttggcaaccagcatccccgaccggatgaaagaatttgagaacttggtaaaacgttcacacaaggcagaactaaaagtaatcattgattttgttcccaaccacgttgcccgccaatatggttcagacaccaaaccggcaggagtggctgatttgggcgaacaagatgatgtaaacctagcattcagcccgaataataacttttattacattcccggcacaaaactggaaggcaatatcgatcttcaccgcggtgccgccgaaccctacatagaatttcctgccaaagccaccggcaatgaccgttttgacgcatggcccggcatcaatgattggtatgagacagtgaagttgaactatggcgtggattacatgaacggacgaagcacccatttcgaccccattcccgacacttggaacaaaatgctcgacatattgttattttgggcatcaaaaggcatcgacggattccggtgcgatatggcagaaatggtccctgtcgaattttggggatgggtcattccacaggtcaaagcgcaataccccaacctgatattcattgccgaggtttataatccggcagaataccgcaactatcttttcaatggaaaattcgactatttatatgataaggtaggcttgtatgatacgctgagagccatcacttcgggttgggaatcggctacctccattcccagtcgctggcaaagcctgagtggaatagaacaccgtatgctcaacttccttgagaaccacgatgaacaacgcattgcttccgatttctttgccggaaacggtgctcgcgctatccctgccatgattgtttctgcttgtatgaatgacaatccggtcatgatttatttcggacaggaaataggcgaacagggaatggatacggaaggattcagcggacgagatggacgtacgaccatcttcgattattggagcgtggacagtatccgccgttggcgcaataacggcaaattcgatgataagctgctgaccgaagaagagaagaaactacgtactttctattccagactattaaatttatgcaacacggagaaggcgatacgcgaaggagtattctttgatttaacatacgctaacctggcaggatgggtattcaacgaacataagcagtatgctttcatgcgtaagctggatgatgagttgctgctgataatggtcaactttgacagcattccggtgcgggcagcagtcaacattccgcaacatgcttttgatttcttgggaataccttataacttagaatataatgcagtggaattgctgacaggaaatacagagaaattggtattgtcacccgacaagacgacgcctgttttattggatgccatgaatggaaagattctgaagttcaagctgtaaacacgaaacagacaatgaatagcagagaaatgtcaaaactaaaccgatctatcgaaaggggtgtgtcaaaacgtggataatgctgtcgtttagttcgtagggtcaaggtccgctcgcccgaaaacagtttgctttgtgtcttcgggcaggcaagccctgcccctactgacaaaataacaatattatcattacccctacagtcgcaagaaatatctttcgcccgaatgcagatagaatagagcgtctcatgccggcacactctctctgctgcattatcttatcgtttcaccaaaccgatttttgcgttcagcttaaaataatagactccattttcgcgctccaaataaccatatttatctttttcggtagaacctttctcaaaacgagagttattgaacagaaaatcggcaaaggtctgacggtctgccttttgataacacaatatttcaccactgccgtccaccagtaagaagccggatacagccgaatcaactccggtaaagagctttgccggacgcattcccaaggcaagtgccagcaggaattgcttcatcttatattcgtaataatgatgcttggtaatcaattcctctttaatcttcaacggattgacttgcttcatcacctccgtcagctcgctcactctggtgatgccgtccagatgcatgatgcgcagcatttcgcccaacatgcggggaaaatgcaggtctatcatactcaaattgctacggaacactttgtcggccacatcgctatacttcaagacacctcccagacgttctatcatcaacatacgtcccgccacatcgtcttcctcgccaaatgcattgattttattgactgtgggagtggcaaacttgatgccggtctgctcaaacttcaggttagcagttcgtccaccgtccagtaaaggaaacatggagctgagacgagaacggacacagaaacccgtcaaaggcgcatccgcactgtaaaaagcaacataaaaatcggtacggtcatccgtttttgcttccaaatcaaagatagccacctcatccaaaaactcctccaccccatcgggtgacataacatcattttcacgactcgctttcacagccgataaaatcagttccgccacagcagaaaagtcctcgcgtgccaccagcttatcaattttttctccacagatatgtatattttcctcactttcaataatatatcggcgggttccgtcgtgttcctcccgctgaatcatggcaacgggcaatcgttgcgcctcattcttcttcacttcaggagttcccgcatatacataaccatccgccagcaagcggaaaaaggcgtaaagttcgccccactctctctttgttgcttcaaatgccatatcgattactgtttaatgggtgcaaagataagtaaaagaagtattaaaagatgcctttttaagaaaagcaaatcttaaacaatgttatgcaacatattttttagcttcaattatttgctattatcccaaaagtccgtacctttgcaatgtgtttttcatagtattagatttaaggttaacaaaggttggagcaaggcgttgctcctttttttattttgtacggtcagtatgcgaatgtacatgaaaaatatactttcttacacaaagaagggagcaagtcaaaaagtgtattagcataatattttgaaaaaattcgggtcacttatttattcttggggatttaaatatcacatcatatcacaaactaagggaagaataaaccgtttcctatggccggtcaaggtcttttaaacggaagattattacagtctgcggcaatggactgtacagtctgctacagtggactgtacggtccactgcaacgaaccatacagtccgctgccggagactgtagtaatccgacggacagacaggcataatcgaaaggacgaaaacgcttggtccggctaatgaaacggcttaggaaactcaaaaacgcatgcaggggttgaaaaccggaggagacaacatcaggggacaggtatttgattgatatgttaaatccccaagaataatgactgctcccaaagaagctactgaacagtgccacaatactcactcccatgtttttacaggtggttttatattatccgatgatttacttattttactgcctccgcctaaacaagccacacccgatatctgttttatgaataaacaataatcttttaatataaaaaaatgagaacaaaaaacattgcgctaatcgcattaaccattatgctatccattcacatacagcggatagaagcgtgcacccgggctgtatacatcggacccgacaatctgattgtcaccggacgtaccatggactggaaagaggatatcatgagtaatctgtacgtctttccgagaggtatccaaagagcaggatataacaagggagagacggtgacatggacttcgaaatacggcagtgtcatcgctacaggatatgacatcggcacatgtgacggaatgaatgaaaagggattagtagccagccttttatttcttcccgaatcagtgtacaagcgtctcggagacaaacgtccggtaatgggaatcagtatctggacacaatatgtgctcgacaatttcgccactgtgcgggaggcggtagatgaactcaaaaaagagatattccgaattgacgcacctcaaatgcccaacggctcagcctccactttacacctggctatcaccgacaatacagggaatacggctgtgctggagtatctggacggaaagttggaaatacacgaaggaaaagaatatcaggttatgacaaactcgcccaaatattcatcacaactggccatcaacgactattggaaagagataggaggcttgcaaatgctacctggtacaaaccgttcaagtgaccgttttgtgcgtgcatcattctatattcatgccatcccgcagactcccgacgcacgcattgccgtcccaagtgtactgagtgtgatgagaaatgtatctgttcccttcggcatcaccactcccggtaagcctcacatctcatctacacgttggcgttcggtttgcgaccaaaagaacaaggtgtactattttgacaatgtattgactcccaatctgttttggctcgacttgaaagaaatagatttcagtccgaaagcgaagataaaaaaactgtctttgacacacggagaaatatatgccggaaatgccgtcaaggatttgaaagacagcaagtctttcgtattcctatttcagacacccaccttatagaaattaagaaaagactcaaaacagccggtctttccctttcagacacgggtttcacgatttcctcttccccactgcgtgaaatccgtgtcactcatatcttcctccaaagaaaacactttgtttattccttttcacaaaaaaatgatttatctttggcgaactaaattcagattcaccatgaaaaccaatattaccgataacataacgattcgggaagtacgcataagtgattcacaaaaaatatacaatgccattcatttgcaccgcgagtacttgcaggaatggctcccgttcgtcacatttctgactgcggaagaagaaaaagcatttctgagctccgtgctccgagttccgcgtgcccgtcgggacttcatttatatcattgaagagaaacaagaagtgtgcggactgataggttttcattattccgatgcagcaaacttgcgtacagaaattggttactggcttctgcccaaataccagcaccggggaatcatgaccaaatgtgtgcgccatctctgccggattgccgtcgaagaacgaggcatgaaccgcatccaaatccgttgcgccgaaggaaacactcccagcaatgccatcccgcaaagactcggcttccacctggaaggaactgaacgcgacggggaactgatgtatacaaagaagtttgtcaacctcaatgtatacagcatcttaaagaaagaaataaagcaatggaaggattaaacaaaaacaatagacagaaatatccggcaaaagcacattatctttgaatatccaaacacaataaaataaatttattatggaaataaaccaagcagctcccaaatttcaggatgcatccatcgcccccatgcataccacggagcatatcgtaaacagaacaatggtaaacctctttggctgcgagcgtgcagtgtcggcacatatcgaacgcaagaaaagcaaattagatttcgcattacctacctgccccaccaaagaggagataaaccgcatagaaaaaattgtgaatgagactttaaaaaaaaatctgccaatcaccacggaattcattacacaagaggaagccgtgggacggtttgacctaaaacgtctgcccgaccatgcctccgaaaccgtgagagtggtgcacgtgggcgactatgatgaatgcctctgcatcggtctgcatgtggaaaacacttcgcaaataggtatattcaaaatcatcagttacgattataaagaaggtattttccgtatgagattcaaacttacagaagcccaatagctgccaatatgtccttgaaaattacattttggcagcagcctgtcggtgtcaacgtttaaatagttctatcctctcttaaagtcttacccctgacctttaagaaaggttttataggtttaaaagagcggaatatagcacacgggaaatcgaactaaaggtatggtgtttgcattatgagtagtgaatgacggaatcgaaagaagccggagttcaaaagtaactaaaatgtttaaccataaaccaaaaggagattaagattatgatgccagtaagaagagccaaccaaacttggttgccaagtatttttaacgatttcttgaacaatgactggatggtaaaagccaacccgacagcaccggccattaatgttatcgaaacagaaaaagagtataaagtagaagttgccgctccgggaatgaaaaaagaagatttccaaatccatatcaatgaggacaatgatttggtcatctctatggaaaagaaaacagaatctacagaaggcgacaaaggaggcaaggaagaaagccgttatctgcgccgcgaattctcttactctaagttccaacaaaccctgattctgccggatgatgtagataaggataaaatagacgccaaagtgaatgacggtgtcctgactatcgaattaccgaaacggactcctgaagaaaaggaaaaagcaacaaaggtaatcgaagttaaataaacgataaaaccaaaaacctcccgaaacacagctgcaatgccattcggaaagtaataaagaggtgtgtcaaaattccaaagcaactgttacgttgttatcatagaggaattttaacacaccttcttgtttatatataaaaataaccaaacataaaaaaacgtactccatccttatctacagacacgcctaccttaaagacagccttttcgccctcccgaatacaaaagtttaaaagatatacttaattttttcttaaaaacctgcctgtttatcaatattacgctttatctttaccgaataaattaaaacaatattctaatttaatcatagtttattatgaaaaataccactaaccaacaccacaaagggaaaaaagcggcactacttgccttggcatttccacttgttctggcaggtgcacccgtgcaggctgcccaacgaacgtatatcgcaagtgaaactgctcttccgagtcctcaaattgtgggcatcaaaagactcaatccgacagctgtcgaagttttgtttgccaacaaccaacgcatgacactggatttttacggtgataatatcttcagagtctttcaagataatgccggtggaatcatccgaaatccggaagccaaacccgaagcacagatattggtagacaatcccagaatgtcattgtcaaagttggacattgacgacaatggaagcacaatcagtatcacaaccgggcatatcagcatacagattgacaaagccacttcgttactgaaaatcaccaaccttaaaaccggcaaggtagtagtggaagaacttgctcccgtttcgtttgagaaagataaagtaaccatcaccctgaaagaaaatccgaaagaatatttctacggaggtggtgtgcaaaacggaagattctcacacaaagggaaagcaattgctatcgaaaaccaaaatagctggacagatggaggcgtggcttctcctactcctttctattggtctaccaacggatacggcgtgatgtggcataccttcaagaaaggtaaatacgactttggtgcagaagaaaaaggaaaagtaaaactatctcacgaaacagattatctggatgtcttttacatggtgagtgacggtgccgttgctttattgaacgacttctaccaactcaccggtaatccggtattattacccaagttcggcttctatcagggacacctgaatgcatacaaccgcgactattggaaagaagacgaaaagggaatcttgtttgaagatggaaaacgttataaggaaagccaaaaggacaatggcggtatcaaggaatctttgaacggtgaaaaaaacaattaccaattctcggcacgtgctgtgatagaccgttataagaaccatgatatgcctttgggctggttgctccctaatgacggttacggagccggatatggacaaaccgaaacattggacggcaatatccaaaacctgaaagaactgggtgactatgcccgcaagaacggagtggaaatcgggctttggacacaatccgacctccatcccaaagaaggaatcagtgcattgcttcagcgtgatatcgtgaaagaagtaagagacgccggtgtgcgtgttctgaaaacagatgttgcatgggtaggcgcaggctattcattcggcttgaacggtgtggccgatgtgggtaaaatcatgccttattatggcaacaacgcacgtccgtttatcatctcattggacggatgggcaggaactcaacgctatgcaggtgtatggtcgggtgaccagaccggcggcgaatgggaatacatccgcttccatatcccgacttatatcggttcgggcctttcgggacaacctaatatcacttccgatatggatggtatctttggcggaaagaacccggccgtgaatatccgcgattttcagtggaagacatggacaccgatggagctcaatatggacggctggggcagcaacgaaaagtatcctcatgccttgggtgaaccggcaacctctatcaaccgtatgtatctgaagctgaaatcagagttgatgccatatgcttacagctttgccaaagaagctgtagacggaatgcctatcatcagagccatgttcctcgaattcccgaacgactatacgatgggcagcgccaccaaataccaatatatgtatggaaccgacttcctggtggcacctatttatcaaaataccaaagcagatgccgaaggcaatgatatccgcaacggtatctatctgcccgaaggcgaatggatcgattacttcaccggcgagaaatatgaaggcggacgcgttatcaataacttcgctgctcctctgtggaaactccccgtatttgtcaagaacggagccatcatcccaatgactaacccgaacaataacgtgagtgaaatcaacaagggtctgcgcatttatgaaatgtaccccaataaacacaccatgaccgtggaatatgacgatgacggtatcaccgaagcatataaagacggtaagggtgtaaccactttcattgaatcgaacgttactcccaaaaacgaagtgctcatcaccgtacaccgcactcagggtaactttgacggcttcgtgaaagaaaaagccactgagttcagaatcaatgtaaccgaaaagcccaaagctatctctgccaaagcaggaaaaagcaagattaagctgaccgaagttgcatctctggaacaattccaaaacggacagaacgtatacttctacgatgctgctcccaacctgaataaatttgctactccgggaagtgagtttgaaaaggtaaccatcgttaagaatcctcaacttctcatcaagctggctccaatggatgttaccactaatcagattaacgtaacagtcagcggattccgttacgcaccggccgatacttaccgcgtcacttcgggctcgttgacagctccgaaagccgaagtaaccgccgaaaatacggaagcttatacgctgaaaccaacatggactccggtagccaatgcagactattatgaaatagaattgaatggtattctttacagcaccatcaaagatacagaactgctatttgaaggattggaagccgaaacaacttatgacttcaagattcgtgccgtaaacaaagacggtcaatcagactgggcaagctttacagccaagacaaaatctaacccattggaatttgctatccgaggcattaagggtgaagtgacagccaaatcacaagaaggatttgaaatcgatcgtctcttcgactttgccgaaatgggtgatatgtggcacaccaagtacagagccaatgctttgccgttcgacatgattattgacttgagaagtgtcaaccaattggataaattccactatctgagccgtaaggacggaggcaacggaacattgttgaaaggaaccgtttcatacagtatggacaaagaacactggactgaagccggtgcatttgaatggaaccgcaaggatgaggtgaaagtattcacattcacagaacgtccgactgcacgttacatcaaactttctgtaacagaaggtgttggtaattatggttccggtcgtgaactgtatgtattcaaagttcccggaactgaaagttacttgccaggcgacatcaacaatgacggtaagattgacaacaacgacttgacttcttataccaactacaccggtttgcgtaaaggcgacggcgactttgaaggttacatcagcaatggtgatatcaacaagaatgatttgattgacgcttatgatatctcggtagtagccactcagttggaagatggtgtagacgaaagcaatgaaactgaaaaagtaagcggaagaatcgaaatgagcactgccaaacgtagttataacaaggatgaagtcattgaagtgatagtgaaaggtatagaccttaaatctgtcaatgcactgagcttcgctttgccttatgaccagcagaagtttgaatttgtcggtgtacaaccggttagcatgaaagagatggaaaactttacttatgaccgccttcacaccaatggcacaaaagcattgtatccaactttcgtcaatatcggcaacaaaccttcactcgaaggaaccaatgacttgtttatcttgaaattaaaagctaaacaaagagtaaacttcaatctgaagatgattgacggattattggtagacaagaaactgaacgtttgtaagttctaagagacttcactgcccccagcagtaattaaaaaaagctatatcaatactcaaaacagagtgtgatatagcttttttattttgtggagggttctagttcctctttcgaaaagacttacaatgaatacttatccaatatcttctctatagcttcctgcgatacaggcttagttaaataatcgttgcatcccgcctctattgccctttccctgtccgactcgaaggcaaaagctgtcaacgcaataataggaatatccttcgaataaccgcgaatcagacgagtagcttccaagccatccatatagggcatctttatatccataaatatcaaatcgggatgattctccttatacatatcgacagcctcacgaccatcccgggcacgtatcagcttatacttcttgccaagaacagtgttcatgagtaaaaaattactatccacatcttccgccactaacagggtgcgcaattgcaatgacttaatggccactttcaagtgctgttctctttccgcattttttttaaacttctcctgcttgttatacatatcatacggaatagtaaagcggaacgtagaaccttcatgaagttcagattccaccgtgatagcgccgcccatcttttctacaatcatctgacaaatagcaagtcccagtccggttccttgaacaaaagaattcaacttgacgaaacgaccgaagatatgagataatttttcttcagagatacctatgccggtatccttcacatagaaatctatataatccttcttcaacttgaaaccaaaatgaatctcaccttcataagtaaacttaatcgcattggttatcaaattggtaatgagttgcaatatgcgattcttatcctcgttaatcatcaagctgtcattctcattatccaaagtcagtgtcaccccttcctgcacacgacctttatggatttcataaacattacggcacatctcacctaaatccataggctgcttgatgtattcaaatgtccctgcctctattttagacaaatcaagaatgtcattaatcagctgcaacaatacgtctgaattctgattgatgatttcggaataaagcttctcgtcctcccgattgtcggtagtagtcatcaatcttgagaaacctacaatggcattcaggggagtgcgtatttcatgactcatattagccagaaaagcactcttcagacggtcggactgctctgccttgatacgtgcctgaatcaactcctgttctatattctgcacattagtaatatcccacgaaatgcctataataagaggcacacgccctacaagcggaatatgcgtcttcagagtctgaacaatgcgcgtctcaccggcagcggtcacataggtttcctgcatctccagccgctccccggtacgcatcagttccaagtcatcctgatgaaatttctccgcatccgacctttccggaaatatctcgaaatcggtacgtcccaatgcacgcgatgccggaattttggaatgattggcgagtgccttgttccaatacaaatatctgaaatcatcttccgggtcttttacaaacatatataccggaatattattcaagatggcatccagcagataattcagttcgcgcaattcatccctattcttaattacatccgtaatgtcctgagtgaagaaccatacaatctcttcctgcccatcttccattatgaaagtggacacctgatgcacacgttcttttacttcccccacccgggtataccgggcatgatatcccatgctgcccccgttatcacgtatttcctgcactcgtttttcaaatatctcttttgtatgaagagaaaccggcaaatcatagactttctgtacacccagttcgcctttcacaccatattcttcaatgaattgcttattggcatacaccaaagtaccatcggtagaagcagccagaatgctgtcactcaccttatcaagcacgcgcttaaacacttccagattcttttgtgtaaccacccgctcgctgatgtcacgacacatgattaacacatactcttcatccaaaggaaagatacggttttcgtaataatgatgtgcaccattaacatccagttcgtgatgggctgtagaacctttgcccgtcgcaatcactttctgaagattattataaacattgtgatatgcctcctcgggtatcatgtcgcgcatatgcataccggcaaaagcactattgggaactcccacatgattggtttcttcactggacaccacccctatacctgtcccttcatgattaaacactgtgagcatatccggcaaagactccagaatcctcactgcatacttctccttaaaactctgattcgtttctttttctttcaaagaggtcagttcctctttgagccgatgattttcgtttcgtaacctctcaagctcctgctccaataattcccttgttttctcttgccccaacataccaaataagtttataattacttatgggtcaaatataaacactttccatgaacaaaagaaagaatcatcggaatatttaccgttaaattcaatcttactaaatatccaccgcagcggtaggtataattacctgacgctacgatggataaataatggacgaaaaactgattacttgtattcttcccaactcttgatggcaatgtcgtctatggtcatggtgcagaatgcattgataaacgcacttgccaaacgagcattggttatcaagggaatattcaagtcgatggcagcacgacggattttatagccgttgtccagttcgccggcagtcaggttcttgggaatgttgaccaccatatctatctccttcttatgaagcatatccagtgcttgaggctgtccttcttcgctgggccagtacacgcgggtattctccacaccgttctcggtcaggaacttggaagagccatcggtggcataaagtttataccctttcttctgcaacatacgggcagcattcaaggtatcggctttctgcttggcattaccggtggacagtaacacgcccttttcgggaatgcgatatccaacggaaagcatggctttcaggacagcacacgaggtatcagaaccgatacagcccacctcaccggtagaggccatatccacacccagcaccgggtcggctttttgcaaacggttgaatgagaactgactcgctttaattccgacataatccaattcaaaaagatttttgttaggcttctctaccggaaggccgagcatgactttcgttgccagctcgataaagtttatcttcagcactttgctcacaaaggggaagcttcgcgaagcgcggagattacattcgattaccttgatatcgttatcctttgccaaatattgaatattgaatggtcccgatatattcaattctttggctatctgacgggagatgcgcttgatgcggcgaacggtctccacatatagtttctgcggagggaactgaatggtggcatcgcccgagtgcactccggcatattcaatatgctcactaatagcgtatgccacaatttcgccattttgtgccacggcatccatttccacttccttggcgtgctcgataaactggctcaccactaccggatgctttttcgatacattggcagccagtttcaggaaacgttccaactcttcctgattagaacatacattcatggcggctccgctcagcacatatgaagggcgaaccaataccgggaagcccactttgtcaataaaggcattaatatcttccatggaagtcaatgcactccattcgggctggtctactccgatacggtcaagcatggccgagaatttatcacggtcttcggcattgtcaatgctcttggcacttgttccgaggatgttaactccttgtccgtccaggcggagagcaagattattcggtatctgaccaccggtggaaacgatgactccatgcggattttccagttcgagaatatccatcacacgctcgaaagtcagctcatcaaagtagaggcggtcacacatatcatagtcggtagataccgtttcgggattgtaattaatcatcacgctgcggtagccttccttacggatagtctgtaatgcctgtacgccacaccagtcgaactccaccgatgaaccgatgcgataagctcccgagccgagtacgacaattgatttatggtcacccagatatttcacgtcattggcaacaccgctataagtaagatacaggtaattggtctgtgccggatattcggcagccagcgtatcaatttgcttcaccaccggaaggatacccgcctgcttgcggtgagttcggacatacaggctgccctcttccatgtcgccatcaaacccgatggcacgagcaatctggaaatcagtgaagccctgcacctttgctttacgaagcaaatcaacaggcatatcggccatctgcttatggttgtttccccattcatgcaattccttggaggtattcattatgttctgcaatttttgcagaaaccatttatctatcttggtcagctcatggatttggtctacggtataacccgcacgcatggctttgctgatgacgaagatgcgcttgtcggtcggctcgcgcaaagccttgtccacatcggctattaccagttctttattctctacaaagccgtgcataccctgaccgatcatgcgcaatcctttctgaatagcttcttcaaaggtacgtccgattgccattacttctcccaccgatttcatggacgagcctaattcacggtctacaccgtggaacttgcccaaatcccagcgtggtattttacataccacatagtccaaggccggttcgaagaatgcgctggtggtctttgtcacggaattcttcaaatcaaacagaccgtaacccaaaccaagtttggcggcaacaaaagcaagcggataacctgtagccttggaagccaatgcagacgagcgcgaaagacgggcattaacctctatgacacggtagtcctccgattcggggtcgaacgcatattgcacattgcattctcccacgataccgatgtgacggatgatgcggatagccagctcgcgaagtttatgatactccgcattggtaagagtctgcgaaggagcaatgacgatggactctccggtatgaatgcccaacgggtcaaagttctccatattacaaacggtgatgcagttatcataacggtcacggaccacttcatattccacttccttccagcctttcagactcttttccaccagcacttgcggcgagaaagagaaggctttttcggccagaacattcagttcttcttcattatcgcagaaacctgagcccaagcctcccaaggcatatgcagcgcggataatcaccggatagcccagttccttggcggcacggcgggcatcttcaatcgtttccactgcctcacttttgatggtcttgacatctatctcatccaacttctttacaaagagttctcggtcttcggtatccatgatggcttgcaccggagtacccaacacgcgcgtgttatatttttcaaagacaccggctttataaagagccacaccgcaattcaaggcggtctgcccaccaaaagaaaggagcacaccgtcgggacgttccttttcaatcaccttttctacaaagtaaggagtgacaggaaggaaataaatccggtcggccaccccctcgctggtctgcaccgtcgcgatattggggtttatcagaatggtttcgataccttcctccttcaacgctttcagagcctgcgaacctgaataatcgaactctccggcttcaccaatcttcaaggcgccggaacctaataataatactttctttatttcgtctttcatatatgttcttttttatcgggtgcccgatgacggcaaccagttttataatagcttcacgaattcatcaaacagaaattcggtatctgtaggtcctgacgcagcttcgggatggaactgtgccgaaaaccaaggcttgaatttatgtctgataccttcattagaaccatcattcatattgataaacagcggttcccagtcatttcccaacgtattattatcgactgcataaccatgattctgactggtgatgaagcaacgctccgttcctaccatgcgtaccggttggttatggctgcggtgtccatacttcagtttatagatggtggcacctcccgctttggaaagcaactgattccccatacagataccgaagatgggcttgtcgctcagagccatcgccttacgaatattctgtacagcctcatcacacgtatccggatcgcccggtccgttcgaaataaacaatccatcgtattccattcctgtgaaatcataattccaaggcacgcgaatcacctccacgccacgcttcagcagacatcggataatattggttttcacaccgcaatccaccaaaaccactttctttttgtccgctccctcattgtaacgaatcacttctttgcacgaaaccttatccacataattaatgccttcgtaacgggcttcgggctgattatcgggatcgtcatcaaacacaattttccccatcatcaccccatgttcgcgaagcacctttgtcagttcgcgggtatcaatgccggtaatgccgggcacttgctcgcgcttcaaccagtcggcaagactttcttttgcattccaatggctgtactcctcactgtagtcacttacaataatggcttcggcatgtatgcgttcactttccattaaaacagcaagtccgttaggcccgacagtgaaaggaggaacaccataattacccaccaacggataagtcaaggtcatcaactgtcccgcgtatgaaggatctgtcaaactctctggataaccggtcatagcggtattaaacaccacttcacccgctaccggtttctcataaccgaacgacttgcccgagaaacggctcccgtcgtcaagaatcaatgttacatttctcatttaatctatcttgaattttgttctcttagaattgatatatcttttctatatagtctataaatgcctgatttaccagctttacaccgcccggtgtgggataatctccactgaagtaccagtctccggtgtgcgacggacaggcttcgtgcaatccatccaaggtctgataaacaatctccacctttgcccgtgttcccttcggagtgagcaattccaccatcttggcagcaatctcctcattagtgaacggtgcgtaaatttctttcacataattcaccatctgctctttgggcaaccccgtctgattcttcgacttatggtaagcacgcgcgatgacatctttcatatcgcgctccttcaagagttcgatggcagccttgaatgcgataaactgatccatgctcgccatatcgataccatagtaatcgggataacgcacctgcggagaggaagatacaatcacaatcttcttgggattcagacgatcaagaatactgatgatactctgtttcagcgttgttccgcgcacaatgctgtcgtctataatcaccagattgtccacatgaggtaccaggcttccgtatgtaatgtcgtacacatgagctgccaagtcattacggctgttaccttcggcaatgaatgtacgcaacttaatatcctttatcgccaccttctcgctgcggatgcgccaagaaaggattttctccaattcctcgtgaccgggattatgccccaattcctctatctttcttaccttcagctcattaagataattatcgaatccttcgagcataccataaaacgccacctccgccgtgttcggaatgaaggagaacacggtgtgctccacctcataatctatcgctttcaggatagggttcaccaacttctcacccagcaatttcctttccttataaatatccatgtcactgccccggctgaaatagatacgctcaaaagagcatgccttcttttcctttgcccggttgatttgcgccagacgcatctttccggctttattcagcaggatagcctgccccggctgcaactcgttgatgctttcgacaggcacattgagtgctgtctgaatgaccggacgctctgaagccaacaccatgatttcgtcatccatgtaccaaaatgcaggacgaataccccatgggtcgcgtacagcaaaggattctccgcttcctgttattccgcagatgacgtaacctccgtcccactccttgctcgatgtcttaagcacattggccaaatcaatacgctcctcaatggcatgagtaatgtccacgcctttcaatccttcggcctcgcactgcacatagaggcgctccacttcacggtcgaggcggtgtcccacttgttcgagcatgatataagtgtcggcatacttgcgcggatgctgcccgtcagcagtgatgcgtgcaaagatttcatccacattggtcatattgaaattaccacacaacgccagattcttggcacgccaattattgcggcgcaggaaaggatgcacatacgatataccactcttcccggtggtggaataacgcagatgccccatatacacttcccccgcaaaaggcaagtatttcttggcatattcggcgtcattcaattgttcgggagtcaaatccttgaaattgccctgcacattgccaaatatctctgttatcgctcccgaccccaaggccctttcgcgaaacatatattcttcaccggggttggcttccaacttcacgcacgccagtcccgcaccttcctgtccccggttatgctgcttctccatcagcagatatagcttgttcaagccatacatccaagttccatacttctcccggtaatactccaacggtttaagcaatcgtatcattgccacgccacattcatgctttaacggttccattctctctcctttaacctcattattttatactaaaaaaactctcgttactcttttccaaagatatcttcattgtttaccattgtcctccgcacttttcccgcttaccggtacatcttgattttatcaacggtttcggacaagcgaatgttttctgctgtccgggtacgattaaaaacaaaaataagtctaagtaatgggaaatacggaaatattcaaataatagaatcaaaaagacggaattgggactacggctgaagataaatccctgttgttgaagtgtttttgagcggaatgcgtagttttgtgtaatacttaaccttcttcctatgtcaatcaatgcaatgcctgcactgccatagccccgatgttcccaccgtttcgggctttttatgaaggcagagtaagcatctcgtttctcaatgcagcctactgttccacacataatctactaaaatatatgttctgattcggctgcaaagatacaaatatcaattaacataaatacaataaaaaaccataaataattgacgaaagcaataaaaaagcaagaataaaaatcgaaaagaaatattttactcattttattaataaatatgaatacttacattcttaaatacatgaagaagtctaccaataaatccgacatcaattgacataacaaaagcggataactgaaaaattatccgcttttagtttcttcgtttcaaaagaaagatatatatttgcaacgctttttcagaaaagcaccccgcgcttgcaaaaaaaacagttgccgaaatggctcagttggtagagcaattcattcgtaatgaataggtcccgggttcgagtcccggtttcggctcatcaaaaagcactgattatcaataatttaatcagtgctttttctttcctaaaacgctgaatgaataaataaaactatatttctacaaatatatttgcttaacataccctttagattgaaaactgtttccttgtccattattgcaagacatagctgtttctctccggaatgcttgataagaaagcaagtcagagaaccaacaagctcttcttcgacgcgactcatggtatagccttttgtcctgcttttacccttctcttccttaattaatctcttctttgtattttatcaccgccctataatgcagtttatgtgccaatgctataaactcatcatttaatctttgaggtatacacgactcaccggtaatattatctgtgccatcacaataaatactgacccgccccaccagatacatgaagtgctttacgtctatatcctcactacccagcgttctgacaaaaaaatcacttgagtagtactcagggtcttccattccttccatattttcctttctatattatatgtaacaaaggtcgggatttaattggaataaacaaataaaatctccgatactatttccctttatcagaaaattgtatcggagattcaccaaagcactccattaagaataatgcagaatttacttcactataaagcctcttttatccaaataagccttaaaacggcgaaggtattcttcatcgggaccggcaaaaaaagaaacgcccgaagctccattaccataggcttcatccaatgctttctcaaaatcatctttgatgtcgccaaacattaaccctgcatatacctttgcccgaccattgacggtttgcacgctttcctgcaccgaacgaccgatccattccgctccttcgtaatagaacttattataaatcatcgggaaataagcatccaacgaccaattgccccaatcctgacgaaccatcttccgtgccatggacggtccggggaatacggctgccgaaataaacttatggtcggcttttacagctttcgttatggcttctaccacatgagtgaccgcatccaaacggaagtttatccagctctgattctccatcggatatttcagttccaaaggatcttgcccagttttcgccttgaacagcgcccgacaagtatcacaatagcagtagtcgtattcgggcaattcttctttctgttcgatgccatagtttttccacaagctgaccggcagcacgacatccggcatacggacgtaatccaaatgaactccgtccacatagggtttatgagcctctttcacgtaatcttctgccaaatagggagccactcccgaatgattggggcaaaggaaacgataataatccacataagcaggcttatcgtgactcgactctcccttgcggttgacagcataccagtcaggatgcttgtccagcagttccgcacggttcatcgtccacttccaatagtgggcttccaagccggcttccttgcacatgcggtaaatgttttcatcataaccttcaaaaagcacacccgaaataccacattctttcaacagtttgaaccactgctgccagtctgccgccgaacggcctttaggaaagcctgtccatacccagttcttcacttcgcgcggagctattttctctatatggaaacgtccttcattattaatgacataacgcactccctctgccggattcgatatagcgatgcgatatgtgttccgggtagcctccactgtgatttccgcaccggcaggaaggtctttcagctccttttccgtaagaaagaaactgtctttggtgcgcagatagttatgctcctttccgtaatattcctgttgggcatagaacatggcccacagcaacttatacatgggttggttgtaaggatagacaaactccgtcttgtccgttcccacccgagaatcggaaaagtaaagatacccccaacggtcgggcatgtgcatgtctattttgccggtagcactccacacccagttttcttcaggtccgttcggcttcagccactgcacgcgcgagaaattgatacgccacgtatttcccgccttcaggggattattgaaattcatggtcaatgcctgatgaggaatggccatttccacactccaatatttgtccttatcctttggcttattcaatgttccctcgcaatgaacagccatctgcatccccggacagtcccactgcaccatgaagttaccaccggagcgataaggtttatccaacatcaagtcgaatatcacgccacgggcattggtctcgatttcaaagtaattatgtccgtcactatccgggtcaataaacacctcgaagtcattatcatagtaaataatggtatcgcgccgggtcagacgcgcctttatatcttcttcttcaagaacggcaccaatatacagataatcgtcatcccaaagcattttggccgttgtctcatatttgggagcggggaatccctctccgctgatgtcgacaaaaggagcggtagcttccgccttctgccaagagctttcgttcaacttaccgtccatcttcagtttgccgtccgcacgatagcaaacatacgtgcggggagttgtcaggaaacgttcatatttctcatacaggctctgggctccggcagggagacaagacagcaacagcaggagcggataaaagtatttcattcttttcattattgttccaaggcttcagattaattactttcaatcacacgccccacgcctctgtacagtttgacaggaccgtccaaaagaactgccaataccgtgatttggctgtccagcacttgttcgggcacattgatatacagattgccgggcacatcactccagtagtttttattatgcactttataactgagcatggctccgttgcccaccacccacacgcggttcactttattgaccaagcctttcacttccaccactccgttcggtttgtaaggcagatacagataaagaatatctcctgctttgttcagcgtcgtgtagccttggaaatgttcggccggaatacccgcacgggtatcataaaccgcttctttatgcttctttgtccagcggccgaattctttcagtacagccacctgctcttcgggaatggtcccgtcttctttcggaccgatatccagcaagagattgcctccgttgctcaggcaatcgacaaacgtacgaagcaagatgtaaggtgatttatagttgctgtcggtatgctgatatccccatgagtcgttcatggtcatacaaagttcccaatatttgtcttccggacgaaccaccggcacaccttgttcgggagtggcataatcaccgtatccctgaatgcgggagttgataatcacattcttattgtccgaacgaagcaaatccacaataccttttgaattccaagcttcggcactctgctcccagtcgccgtcaaaccaataaaggtcgggcttccatgtcttgttcagctcagccaactgaccgaaattgaatttattgaactttgcccaacgtgcagggtcgtccttataacgtacctcggtgcgcgtcttgttaggataatcgggatgcgaccaatccagcaaggaataataaaagccgagatgcaagccctgcttacgcacctctttcacaaacggtgctatcaggtcacgtccggcaggagtgctctttacggtgctcaagtctcccactttggtatcccacaaagccacaccgtcatggtgcttggtcgtgataaccgtgtacttcgctccactctcctttatcaaatccacccatgccttcgggtcgtattgggaagcagtgaatccgcccgcctgattcatatactcatcgtatggcaggtaattattaaagaacgaccagctttcggaaactcctttgacggcatagattccccaatgaatgaaaatacccagctttgcctgtgaaaaccattccatacgtttgtctttctgttcggatgtttcttgctgaacagctgcctcctgcgcacgcaatggagacaatgccaggagcagaccaagaaacggcagtgataatcgataatttttcatatacatactagttttaattaatatcggttagcaggatagttagtataatctgtaactttctgaacaaagataacgcattttgccctttcaggcttaaagtttacagactttttcttttaaattcctatctttgcagtgctataatcaaaacttatgagaacaaaaaagaaaaaacaatcttccaacaagacattgcctctgctcattatcgcagtactgataggactgatggcctacaaataccggctgttggacgaaaagttcttaaaaggtctgcccgatatcattcctacggagcaaacctctgcccttccgtcctccgccccggccgatgctttggaaattccggtcatgcaatcgcgcaccggaggccagcttatcaagagaaaaggatatacgctgtcatacaatgccgactataagacaccgcaatgggtagcctgggaactcaccgggaaggaaacaaaagggaaagaagaaagaacaaacaaatttttgcccgaccccgatgtgcgcggagcgaaagcatatagcaacgattataccaaatccggctacgaccgcgggcacatggcaccggccgccgacatgaaatggagcaagcaagcgatggcggaatctttctacatgagcaatatctgtccgcaaaaccccaacctgaaccgcggagactggaacgacctggaagagaaatcgcgccaatgggctaaaaagtatggagcggtctacatcgcttgcggacctgtatatgaccacggcaaacccaaaagaataggaaacaataaagtcgccgttcccgatgctttctacaaagtaatcctcatcaacgactcaaagaccccgcaagccatcggctttctgttccccaacaaagcgggacataagccattgaaaaagtacattgtcacggtagacagcgtggagaaaagaacaggcattgacttttttcctgcattgccggatgaggtagaaaacaggattgaagcggaaccggcaaaaaagcttccttaaataaatacgtctgttccacccggggaggcattgccacctccccatcttagtataaagacaatgcaacctttgagtggtaataaaatatgccggcaaaaagctatttgttctttcagccggcattcatacttatttttaggatatcaaataatatcagttattgtttggcatcataaatgctttttatttcagctgccgaaagacggcgagtgtcataaacgcggaaattgtccactgccatgttggttccattcaaggtattgctattagacagttttatactgcctcccattatgaacttggttcctgaaccatagctgttacctgacgattcggcttcactgaaaggattagcgtcttctgttacgacatctacaagctgaccgtccacataaaggttagttgtaatagtggcatacgttgttttattgaagtccgaagtcagtgccacgtgatgccatttcccatctgtaagcgtgggatgcataaatgtaccagattttgcatattgataaccattattataaagtgtaacaataaatttcaaggcaccttccttcatactaagtgtaaacatcggtccgttttgatgagaagacaccatatagaagatgttgccatcgccgaaatctttaccccaaaaactgatggtcatgtcgcgggagtcgataataggcttagctactacgaacgaactattgttggtgcggttaaacttcactgctttagaacctgccgcaacgccttcgacaaaggtcggggagttggaaccgaagccgtgaatggcattctctgtagcatcgttaaagtcatcgtcgaacttgtaataaacgtacataccttcgggaatgactataccgtctgtaatgctacctttcacggcagttaccgccactttttcttcttgtacaccgtcagaaaccgtaatagtggcattcagtgtttgtggcataatagagcggttcagtttcaccgttacttccgatgaaccttgtgccggcactttgccggaagttgtggaaacggaaaggcattcatcagacacattcgtgatgctccaactcagttccgcgttgcccgtattgccgatgttcagtaccagttcagccagctcttcgccaaaatccagttttttcggagagatggagagtgtagcctttgccttgactgccttcagggtgacaggctcttctttcgttccgtccgaaacgatgaaagaggtgttcaagtcaccggtcatcttacttctatccagcttcacctgcaccacctttttgccggcaggggctactgtaccttcactttcggagacggtgatgcagtctgaagtgatacctttaatcttccagtcaaggttaacctcgcctgtattctttatctctaatgtctgctcctgtgcagtatctccgaagtccagcgttgtgggagacacgctcatttcggtttttttttcgcctttaggcgagcaagagacagagatggggaacgaattgccgaaagcggagagattcaccaccacggattttgtttcccccaacttgtcacgattgacagagaaaacgatgctctgtgtcttgttgctgccgattcgtccggctttcggattggcagacagccagctgttgctacctaattccagtgtccactccgtttccgtatttccgttgttagtgacggtgaccgacatttcttcctgggtagttccaaagttcagagaagagggggttatcgtaatttccgcatccttcttttcaggtgtaaggtgtatgtctccagaggtagcctgccccgccaacacatttaccgatttggtattcgttgtgtatcccgctttctgtgcctgcacctgatactgctgtgcttcgagtccaaggaattcgtatgtgccgtcactgcccgtagtgcgtgccagtccgccgggcgtcaacgtgatggttactccttgcagcacttcgccgtttttgttgtcagtcacttttccgtagatggaaccggtagtgtcttcttcactactggtacatgctcctatggccaacaaaaggagcattactactgtctttgcaattagtttgttcatcattatttctgttttaattgatattgttattccattgccgggtatactttaccctcgctgtttttcttatatatccatttgcggtagagggtaggggcattgtcgtttacccattcgttgagagcgtcaacaagatctttgttatccatcgtaataatagggcaattagtagaatgacgtgtataataaccacaatctgttttctcccatcttccattactgcctgttggattttccgtaccgacattatcggaagaaacactattcaaaggttgtttggtatctgcatccgtaacaatgcccgagaaactgccgtataaatcttcttctgagctggtacagttcatcaataatcctattgataaaaaaaatacatcccactatgtactgagtcatctttttcataattgaatgttttgaaaataatagttattcattattttagtttgacaatctctatcggcatccccaccagctgtggcattcccattcccaaatcagcaccgatgtacgtggggtcgcaaagcagatacttcgcaccgtccacggtaatatagtcgcccttcgtatccggattgctaaaacggacggccgttgccagatgcctgcccggataatagacaaagactaccggcattttcagcagatgacgtaccagctgtgcaaacaagatggagcggtcttcacaatcggaatgagaagaagcaatggtctcttcggcaaagaaccatttttcatagccgaactgttcttcatccgttttgtattgaaacgcatattgcacaaagtgcaacagatgattgacggctgcttcctgtgtcatactctggatggcaggagccaattgccgctccacgctttccaagaactcaggatccggggcagcttgtccgtagaccgcaaagctgacacaaggcaacgtggcgtaaaagtccactaagttcttattatatgccaggcagtaatcgttccggtggtcattcagcgtcttggtgcgtacatcggcagtcagacgcggagattccggcaaggaaacatctactgtccttcgggcaatggcatgattcagcgtatagcatttcactgatgaaagagagcggtgcttccggtcaatgaccgagtagcgaataccttgctccgtggggaatgtgaagtaaagtgcattgtacgcctcacaattgaaggccattaaagggagcaactcctgccctatccgtcctatcttggccttgcaccccagctgattgagtgtaaacacagaaaatatcacccgctcgttttcactgtcttgcgggcagtaagccttgaaaacatcttcgataagcaagtacagcccccaaccgttcagtctcaatagggatttcagttttccgatatgggtggtccacacctcgtagggcatgacggagagcgcattccagtaagaggaaacgtgcggttcgtctgcaccggtcaggcggggaaagcgtgttgtaatcttaggcaatgggatgatagtcccgaagaaagaagcctccacttccattcctttaccgcctttgaaaggattttgcggcagaggaggattcttacccacatccggcaaaggcagaggaactggtctaggaattggcggaagtccggtttcccctcttaccggctgcttcattggggtaggacgccgcttggaggggtcgaaagtctcgggcggaacaggatgcctgatgggttgttcgggctttatcaggggacagtccggccatgcctccgccaagtagcgaccaaactctcggttgacagaatcggaataggttttgaaatcggcttcctccttgtccgaataggctttgaatgcagcttcttgttcaagggcatatcgttcaaagtcattctgcccgcagaggtcgttccacacggtgagcagcattgccagcagatagaatctttttttcatagctattgttttatacattaacttgatttagaaacggagtgccagagcaatgcctccgctttggggcgatgcatagggagccatgcgcaattgggcatctcctaaggcaattcctttcttcttgcctttggcggcaataccgtctatcacgttccatacgtagagcacggcggcaccggcaatgaatccatttcgcacgttagcacaattgtcacgtttgtcggcatagctgcggattttcccggcatcgtgcgtggattttatcttggagtcgtaggaagcacgcatacactccgttgctacgattccgcctacacaggcggcttcgcttatgataaaaaaaagccccttccccatactgcctttgtgcagctgtgccatgccgggcacaaagacgcgggccgagaagggataacgtccggtgagctgggcattgtagcccttcatcttcttgttgaacgatgtatctttgaagtttgcggtgttcagcgaatagaagtcatccggaccgttcacgttacgctgcacttgtattagaatgtatatcttcacccggttggcggacaagacaataggttctgtagaagttacgatacgtctcttcatacggttgaattttactacggcattgattccgttcattgccacggcattgatatcttgtgccgtaatgcctactacgcccagttcatgcaaagacttctgcagagcatctgcccaagccatgttggtggcttctgtctctgtacggccttcgcctacgccccagttcacaaagtaattggctcctacgggtatttgaggcacttgttttacccagaaggggcgaagttctgttacggcttgggaaaaggcattcatgccaatcagcatgagtgccgtgaggaatgcaagttttttcattcttctttattagttatacagttaaatgatttgaaagccggaagcgtatgtacgtcattggctacctgacacaatacataaactcgatagccgcgcctggtaacaagcgattcggtgcattggcataccttgtttatggggattttcacgtaacgagaggtctccatcaagagactgtcaccttgcagtttttccagtttcttcacatctacaggaattcctatggcaaaagcactctccatgatggccatgacaaaagctttcctcccggcctcttcctccgtcagccctgtcccttgagacactctgtaataataagtatgtgtgcgtacgggaggcgacagtacccagtcgggaagctgctgggcatagccgaaaagggtcttgctcagcagcaacaaaaagagcagatagcgtttcattatcctgatactatttcattgcatccacttcttccttctgcttggctgcactggctgccaattccttatccatcttctcgaagaattttttcttatcgtagtctaccttgcggacttccaactcttcggcaagccctttcttggcatcttccaacaatacatgtactgctacatagcccacatacccaccggtagcactttgcgtaaacttgcggcatacggcattagcatatttgtctatcacttttgtacctatggctttagcaccgccttccaatgaactttcatacattttcttgctactcggaacattggtatccttactgtaatcttctatcgcattctttatcatgcccacatagcgagatgcaatgtcggcaatggctacgcggttggcgtcggtgatggctcttgcgcggtcgggacgatcttcagcaatgccaagacctgccatatattcgcccggtttatcataggcatcatcaatacaaaatgtggtaagttctacttcaccattgggcaatctgggggtagtaggtgcagaaacagttgtgttttgggcaggtacatatacctttttcgtacaagaagtcataaacatcgccaaagtgcaggcacagcatgcaattgcagaaattaagccattgtgtttcattttttccggggtttaaagtccacccttttgtagactgtcttataaatgtgttgagagcttatagactccccggattcagcaatacataaaaaaagcgtgggagtctgtacttctgcttatcccacgttcaggccttcgcattgcccaccttcaaggataagcaacgcagctagcccacgccaagatggatatacagaacaccgcgcagagcacaatgtttagacactacacctttagtggacgttccccgttgccgtatcatcttgaaggtttcaaagttgcgaagtttgaacgtagacgataacgtttggtaaacgcctttttcttaatatcaagatcccaccaaaccccactgggccagctggatgttgcaaagataatacaaatttctttaaggtatatggtaaaagccttttttttgcatccgtacctcctgttttttagggagtttccacaatcatacacaagatttcagcttaataacccaaacgaatcaatagatatttcatccgacaggctgatacattcttcacagccgtccgttgtcttcattaatcatcggcattgacctgataaaccgtgccactgatttatgaatttccggcaccgattaataaatcagtggcagaaattcataaatacatcaagagtcgaccggctttatgtatggaagccaattgcttttcaaaggtaaagatgacagagtatcatctgacgaccggacttttttctataaactcttacacagaactcacgtatatttacctatctttgcaccgaaaacaaattgacagcaatggataaaaagaaacgtaatattttagtaatagttatattgataattatgcttgccggagcaggaagtgccggaacggtttactattatttcttctcccgacagttcaacttatcaaaaactgcttatatctatattgacagagatgataatttggattccatttatagcaaaatagagtcgacaggacatcctaaaaccatgtatggcttcaaattccaggcagaaagaggaaattacggagaaaacatacgcacaggacggtatgccatccgtcctgaagacaatatgcgctatctttatcgccgcctttcgatgggatatcagactccggtcaatctcaccatccccggcgtacgcaccttggacagactggcacgcactgtcgcccgccagctcatgattgattctgtggaaatagcccgattacttgccgacagcagttattatactcaaatgggatataccaaagagaccctccctgcccttttcattcccaatacatacgaagtgtattggaacatgagtgctgacgcttttatgaaacgtatgcagaaagagcatgctgccttttggaacaaggaaagacggggcaaagcagcaaatatcggtctctcgcccgaagaagtggcaacacttgcctccatagtggaagaagaaacggccaacaacgcggaaaagccgatggttgccggactttacattaatcgcttgaacaagggtatgttgctgcaagcagaccccaccgtgaagttcgggttgcaggagttcggattaaaacgtatcctcaacaagcatctggctgtcgattctccttataatacttacaaatacgccggcctccctcccggaccgatacgcataccgtctattcagggattggaaagtgtattgaattatacgcaccacaatttcatttatatgtgtgccaaagaggacttttcgggtactcataactttgctgctacgctgtcacagcacatggcaaatgcccgtcgataccaacaggagcttaataaaagaaggataaaataaaaaccgccctacttctttaagaatcttttatattgccctttagcacgtgttgccttaccatattgcaccgcgtgcaaaggacaaatatgatagcatcccaaacattgggtgcagttattgccccattggggcttatcggttacttctatattatgtaccgaacaaactttctcgcattttttacaagcaatgcaggcatccgttgcataaaaaggtttgggagacattaaaaaggtattgaaaagcggtctaagtagatatgtcttggtaaacggcaacgctccttcgtggcaattgaaatgtttcatgtgtatcctaccggccagttcgccattgataaagtcaagacgtgccattgcattctgtactttctgttcctccacatcctcggcatcaacatcaaatcccggtaaggaaacataagtattgggcatcgtaacagagtagcctgccacgcagtgccatccttttctccgaatagcagatgaaaaaacctgggcagtacgccccgtatcatctccacaggtgcaaacaaaaaaaagatactccggattcttcatctttaattgacggataaaacgaagcactattccgggaggaccccatgcatacacagggaaaacaaagccgactttctcaccgtcttttaaggcatactctttatttttatttatttcttcagcaatggccaacaactcttcttgctgagcttttgcaatttgccgggcaacccaagccgaatttcccgtaccggaaaaataaaatatcataagcgtttacattaatctttcagaccatttattttctaaaaaagaagcgatgctaatcttttgaattagcatcgccttataatgaagccgcaccagtgatgcgatgaaactccgaatgacaggttttgagtgctctctccctttgtaatccaccggcataaatgctacccgaaggcgtggcccgccattggaagatgaagcgttgtctcggttttcagattagtttgatgagtttcccaatccaactaatgcggctcgcttttcatctctttctgtatgacaaatatacagcctttttatgatataaccaagagtaagaagaattttctttgttaaaattcataaggaatatagtaactatctgtcattccgattgattggctattcatctctatttaccatagtcgggaactgattctccctgtcacatataaaaataaaaaaagagccacctcttatgagatgactctttaattataatatgtcttgtaataacaatcttaccgacagttatatttaagcagcttttgctttagcaacaacagccttaaatgcttccggatgattcatagctaaatcagccaacactttgcggttgatttcaatacctgctttatgcaatgcacccatcaatttagaataagacattccttccagacgagcagcagcattgatacgctgaatccacaaagcacggaaattgcgtttcttgttcttacggtcacggtatgcgtaggtcaaacccttttcccaagtgttttttgctactgtccatacattctttcttgcaccaaaataacctttggtaagacctaaaattttctttcttcttgcttttgaagcaacatgatttactgatcttggcatagttttaattctttttgaatgttagcgcccctgtttcacacagcgaacttaaagctaaagacattcggttaatacttaaaataatacgattacgcttttttctttagattacttcatgcaaagaagttctttcacctgatccaagttagcattagctactaagcctgaatgtacaaggtttcttttttgctttttagttttcttagtcagaatgtgactgtgaaaagcgtgctttctcttgattttacctgttccggtaagagcgaatctttttttagaaccggagttagtcttgatctttggcatcttgttttaattttaaataattattattcaaataaggtggtaacgcactataccggcgcgttacgcactctttttattcttgtgttccttccgctttctttggagcatcagcttttttaggagagcctgctttcttcggagccaaagaaattgtcattctcttaccttccaacaatggcatctgctctaccttggcatattcttccaggtcattggcaaaacgaagtaataacacttctccctgttccttaaaaagaatggaacgacctttgaagaatacgtaagctttaactttatctccatcctgcaggaaaccgatggcatgtttcaacttaaagttataatcatggtcatctgtctgaggtccgaaacggatttcttttacgtttacttttacttgtttagccttttgttccttttgacgtttctttaattgataaagaaatttagaataatcaataattctacaaaccggaggaacagcattgggtgaaatttcaactaaatcggcttcatgctcttcagccatctttaatgcctgagctatcggatatactgccggttctacatcatcgcccactatgcggacttctttggcacgaatctgttcattgattctgtgttgcccttttaaactgtcattcttcattaaaaaactattagttcctgtttgtttcttcttatttaaattagttatttctttatcttaacgcaaaagtccatacaaaagtttaatcatgtattcttttgcaaacggctgcaaagttaccatttatttatcatattagaaacttcttcggcaatattttttccgaattcttcaattttcatggttcctttatcgccttcgccctgtctgcgaaccgaaacttcaccgttagccgcttctttttcacctacaatcagcaggtaaggaatgcgcttcatttcattgtcacgaattttacggccaatcttttcgttacgaccgtccacaatagcgcggatatcgtattttctcaactcggctttcacctgctcggcatagtcattgaacttatccgctataggcaggataacgacttgttcgggagtaagccacaaggggaattttccggctgtatgctcaatcaacactgctacaaagcgttccattgaaccgaaaggtgcgcggtgaatcattaccggacgatgcttttggttatcagagcccatatattccaattggaaacgttccggcaagttatagtctacctgaatggtacccaactgccaacggcgaccgatagcatcttttaccatgaagtccagcttaggtccatagaatgcggcttcaccatattctatctttgcagtcaatcccttttcctcacaagcttcaataatagcctgttcagccttttcccaattctcgtcactaccgatatatttttcacggttcactttgtcacgcaaagaaatctgagcttctacgttttcaaagttcatggacttgaacacaatattgatgatgtccatcacacggaggaattcttccttcacctggtcgggacggcagaacaagtgagcatcatcttgtgtaaagctgcgcacacgagtcaacccgtgcaactcgccgctctgttcgtaacggcatacggttccgaattctgcaatacgcaaaggcaagtccttataagaacgcggggagttcttgtatatcatacagtgatgaggacagttcatcggtttcaagaagtattcttctccttcttccggtgtatggataggctggaatgaatctttaccatacttggcatagtgaccggaagtgatatacagattcttgtttccgataggcggacacattacttcctgatagtcgtaacgagcctggatacggcgcaagaaatcctgcaaacggatgcgcagtgcagtacctttcggcaaccacatgggaagtcccttacctaccatatccgtaaacatgaacaaatccatttctttacctatcttgcgatggtcgcgttttttggcttcttccaacattgccagatattcgtccagcatctttttctttgggaaagtaataccataaatacgcgtcatttgtttgcggtcttcctgccctctccaataagcaccggctaccgaaagcaacttaatagctttgataggtgcagtagacaccaagtgaggaccacggcaaaggtcagtaaacgcaccttgtgtataagtagtaatgtgaccatcttccagttcggaaatcaattcacatttatatgtctcacctctttctccaaatttcttcaaagcgtcttctttggcaatactttcacgcaccaaagtctctttctttgctgccagttcagccatcttcgcttcgataacgggcaaatccgagtccttaagggtagcttctcccgaatctacatcataatagaaaccattttcgatagccggaccgataccaaactgaatacccggataaagttcttgcaatgcttctgccagcaagtgagcacttgtatgccaaaaagcatgtttaccttgttcatcttcccatttataaagaacaaagtttgcatcttcattgataggacgtgacaagtcaatagtctcgccattcacaccgcaagccaaaacatcttgcgccaggcgtgaactgatactttctgcaatctgcagacctgttactccttcgttgtattcacgaacagagccgtcggggaatgttatctttatcataattattacgtttaattcttccttgaggatgcaaaaataacgaattctttttgacttcctctcttttttgcaaaaaaatgttattcttttctctctgtgaaacgtttaataatattgtacgcagagaataagcctaactcaccggctttactcaaatcttgaattccttgacggttattacccaaatagatatgggttaatccgcgattataatatgcttcggcaaatttggaatccagttctatcgccttgtcataatcgacaatggcagcacggtaatctttcagtgacgaaagcacattgcctctgttatagtaagcgtagacaaaatcgggagctaactctatcactttatccaaatcgcgtttcaccatttcataatcaccggtcttggtcttctgttcttccgcatttttgtcattgtattctttcgccaccttttgatactccagctgtttgaaacgaatcaaagcacggttgaagtaagccgggaagaatttgctttcgcacataacagcctgattcaaatcctcgatggcattgtcaaagtcttgcacaagatagaagtccaaagaacgtgcaaagcgcttcgtcacatcattcggactggctacaatagcagccgactgctcgtcgatggatgcaaaatgttttttcacttgttcttccgtcaatggtgcttcctcattcgtgataagcaaacgttcaggcaataccttgtttgagttcagctcttctatatatttatgatagttaacctgacgcttcacatcattatgtttttcataataagtaagcacgaacataggttgcggaacaatggtcacattcttatcctgtacacgtccgcgatattcacttttatacttttcttcaccttcttcgttatcggcaactacaatctttcgataattgttcatatttttatcagacttcttgcgtgtacggtttccgctctccgaattatccgctgtctgattattctgacttacaccgttttgtttatccaactgagctttgagaactttaaactcatcagcatcagctccttttatatctcccaccttcttgcgcgcctgagctctatactgataaccaatcacaaagttaggatattcatttatcaccgtagaataatccttaatcgcccctttataatcccccgtctggtcacgaagcaaaccgcgattgaagatagccatcatattatcaggttccatattgataacaaaatcaaagtcctcgatggcacgattgtcatcacctacctgggcacgtagcaagcctcggttataatgaccgataaagttattcggatctatttcaagagcaatatcgtaatcactcattgcgcccctcaggtttttctgatgataacgcgccaaagcacgattgatatatacacctgcattacgtgtcgaaagatgaatagcatggtcaaaatcggcttcagcatctttatatttctgttgctgaagtctgagaatcgcacggctcgcccatgtatccggatcataacggtctatctcgatggcatgcccgaaatccttctcggcagcaatcgtatctttttgtttcaaatcgacttccccacgcatcaaatatgcctttgtgtaacgcggagagatggtgattaatcgatccaagtcattctttgcacccgagtaatctccctgctttatcttacacaaagccatattgtgccatgcacctatattttcgggatcaaactccagtgctttcatataatcttcaatggcaccggcatagttatcctgacggatacgtgccaatccccgcacctgataagcgctgactacaaacggattccgttctatagcttccgagcaatcgctttccgcaccttgaaagtcatcaaggtttatcttagccagcccccgataaaagtaaggatcggccaagtaaggtttcgcattgactacctgattaaaatactgaatggaaaggacataatcctcaaaatagagagcattgcgtccaattgccattacacggtccgtattaatctgggcaaaagccagaccgggacacattattaatatatataggtacagaatccgttttatcatcttatttcaaagttttcaccttataagagcaacgtgccttgcctttcagcatagcgcccaacttgccttttatcatctgcttacgcagcgtagaaaggtggtcgataaacatcttaccatccaaatggtcgaattcatgttgcatcacacgtgccggataaccttccacccactcatcatgttctttcaaatcttcatccagataagtgacatgaatacggtccggacgctttactgcttcatggataccgggaagactcaaacatccttcctccatcgaaacttcctcttcacccacttctatgatatgcgggttgatgtatgcatgacgaaaacctttcagttcaggatattcatccgacattacatcaaggtctatcgtaaccacacgaatgggaagtcccacttgaggagctgcaagccccactccgtctgcacgtcccattgtctcaaacatattttcgattaactctttcaaattaggataatccggtgtaatatcttccgcttctttgcgcaataccggttgtccataaacataaattggtaatatcatttctcttttattttatatatttctttgattccaaataggattgtaaaataatggtagcactgatttcatcaaccaaggctttattctgtctatcttttttcttgagtccgccatccagcatggcctgatgcgccaaaacagaagtgaaccgttcatcaaccagttcgacaggtatattgggaagttttttctttaactgattaatgaacggaacaatgttacgcatattctcagattcctgattattcatttgcttgggatgccctacaataattctttctaccggttcactctccacatacttcagaataaagtccattaactgatgggtgggaacagtagtcaggccattcgcaataatctgcaaaatgtctgtaaccgccactcccgtacgctttttaccataatctattgctaatattctactcatattgagcacaaaaatacaaatttattccatacctgtctgatatataaagataaattatagaaaaagccttatcaatagaccagcttcacattatctacccaaaaagtatttccgggagaacctacatatgctccaccgtgacttgaagagaactgcaatagcatgtgtgtaggtttttcatcaggtgaagcccatcccgtttctttaacaaggacactctcccctttactgttacgggcataaccaaccgatctcaatcccataaactcaggattatatcgagggtcttgggttatatcaccatatagaatctcataagtagcatcattttcccatccatcagaatccttgtcatacttcacaaccatcgtccccactcgttttgctgtgatattcccttgagcatcctctgtacgcttttgaagataaaatacagtaatagcacagtcctgacctttcactacttcttttttgctaaagcccgtcaaacggatacgatttttctcaccggacattttaactttataatcataacgaagcgctttgggcttttctgtaaacggtatgccccaattcatgtttttcaccccttctttcgtactcgtaataggctctttcatatcacccaaataaatggctccggcagccaatacggttatattgaccatgcccagcactttcattctttcaatatgcgtctccaagcgggcacaatagccatgataacgtttttccttatataccgtgttattagttttgacaatccccatcaccttcgccatcacattggatgtcccccaaggagaccctcccatattttcataagccacattaccatcaacctcctgagtcggagctatctcataaagaagtctggtatttccacctataatcgatgactcatgaatcttacgtgtcacccattgttccatatcaccatatttaataggaacttctctttcttgagagaaaccattaaacggtatgacagccagcaaagcaagcaatgacattctactgtaatacttcatatccaactagtttttattgttgttttagaattaacaaagttataaaaaaaagcggcaacttcgcagttaccacttttaataaagaagaatagactatattttcttcttaatttaccaaaaagaaattattaatatactctataaagtaaccatgccttctggaagtcgtcacggttaggatatttcgctttaaattcttctttagcttgtgtagcttgtgcgcggtcatcaaaagaaactgcaattacacgatacatgtttctttcggggttgtaaaccactttagcactataaccctgcccgtccagatattgtttcagaccttcagcatttgcttttacgccaaagcttccacaaacaacactataagccttcaaaccatcacctgaaaccagctccactttttcttcacgaaccgggccggctaccggagcaggagcaggtgcagttgcaacaggagcagctactacaggagcagcctctacctcttcggctgcagcaggagcctcagccaattcctgttgttttgccttttcgtatgcttttttgtaagcgctttcgcttgatttacaagaggagaatgccaaagctacgcacaatcccatacccaacacaactaattttttcatgattattccatctttataaattaatactctagtttaatcctataataattgttgcaaaagtagcaatatatcaacagcattcacatctaatacgcagttaaattaagttaatcagcctataatcgtcaatttcttactaagaaacatccccaaatagcaacaactttcaattttatttgttagttttgtaatgttcaaaaattaataagactatgaaaagtttaagtattttagctgcatttctgggcggagccgttgtaggtgcagcagccggagttttatttgctcccgaaagaggagaagatactcgtaataaaattgttgacgctttgcgtaaaagaggtatcaaactgagccgtaccgaaatggaagacttggtagatgaaattgctgcagaagtaaaagaataataaggtatcatacaacttaccttgtcattctaaacaaaattgaagaatctatatacatatattatatgtctatggattcttcattttacctctttaccgattgacacacagccatcatacacacataaatggcaatatttaatgtaaaaaacaacagcgaatgtttgcaaacgataagaatatagacaacctgcaacaactctttgtagaactgaaaaaatatgcagagctgcaaaaagattatgtaaaactgcatttagtagaaaagctgaccatattggtatcctctctgattctggtattggtattggttattctaggtatcattgccctcttctacctttcttttacattagcttatgtattggctcctcatgtaggcggattgatggttagttacggcatcatcaccggatgtatcatcctactgattatattaatcatattcttccgtaaacgtttgattatgcaacctatggttaactttctcgccaatctgcttttaaacgatgactgattatgaacaacaacgattctaaacatacaccgattatcaccctggaagagatagcccggcgaaaagccgaaaaacgggaggaagtgctcaaagcgaagacacaaataaccgaaactttgcgcgaattatttgtacctgaagaaaataagggtggtatagaagggattatgcaacatgtaaataccggaatagccgtttatgacggagtaatgaccggcatcaaaataatgcggaaagtaagaagttacttcaccaaaaagaagaaatagaaaatctataaattaacatacctattaaacaaatcaaatgaaaagacaactactgggagtggcagcttttatgctggcattatctgcacatgcacaagacaatccgttgtggatgcgttattgtgccatttcacctgatggaacttccatcgcatttacttataaaggagacatttacacagtaccggtcaacggaggcaaagctgcacagattacaaccaatgcagcgcacgacactcatccggtatggagccccgatggaaaacaaatcgcatttgcttccgaccgcatgggcagtatggatatattcgtggtagacagagagggaggcatcccaaaaagattaaccactcactccggcaacgaaacacccgtagcattcaaggatgcagaccatatcctgtttctggcaaatgtaatgccgtcagccgaagatgcccagtttccatcaggacaattccaacaggtatatgaagttagcactacaggcgaccgtccggtcatgttctcctccatgcctatggaagatatcagcatcaacaaaaccggcaatgctttactctaccatgataagaaaggttacgaagatccctggcgcaagcatcacacttcttctatcacacgcgacatctggctgtgttcattggacggaaaacgcagctatcgcaagctaacctcttttaatggtgaagaccgtactcctgtatgggcttcagacggaaagtcattctattatctgagtgaagaaaaaggttcattcaatgtattcaaacgtgcactggatggaacaagttccactcagctcacccaccataccaagcacccggtccgtttccttactgctgccgacaacggcacactctgctacggatatgatggagaaatctatacaatgaaagaaggaaccgaacctcggaaagtacaaatatccatcttaacggacaaaaatgacaaagacctgattcgccaaatcagacgaaacggtgcaacagaaatagctctgtctcccgatgctaaagaagtagcattcattctgcgcggcgatgtttacgtcacttcagtggaatataagacaacaaaacaaatcaccaatactccggaacaagaacgcgacatcaacttcgctcccgatggaagaagtatcgtgtatgcttcggaaagaaacggtttgtggcaaatttatcaggcaagcctgaacaaaaaagaagagaaacaattcacttatgctacagatattaaagaggagaaactgaccggttcagccattgcttctttccagccccaattcagtcctgatggtaaagaaatagcgtttttggaagaccgtaccacgattcgtgtgcttaacttgaaaagtaaagatgtccgcactgtaatggacggtaagtttgaatattcatacagtgacggtgatcaatggtatcaatggagtccggatagcaaatggattctcaccaactatattggcataggtggatggaacaaccaagatgtggctttggttaacgcatcaggcaacggagaaatccataacctgaccgaaagcggctatacagacacgaatgccaaatgggtgctcgacggaaaagcaatgatgtggtatagcgaccgtgccggataccgcagccacggcagttggggagctgaagcggatgtttacatcatgttcttcgaccttgacgcatacgaacgtttccgtatgaataaagaagagcttgcccttatcgacgaaagcaagaaaaaagaggatgataaagagaaaaaagacgagaagaccggcaagaagaaagacgataaaaaagacacaaagaaagatgaaaagaaagaagaagtcaaacctttggttttcgacctcgaaaactgtcgagacagaattgtccgcctgactgtcaactcttctcatttgggagatgccgttctcacaccgaaaggagataaactatattaccaagctgcttttgaaggcggatatgatttatgggaacatgacttaaaagagaataagacgaagattgtgatgaaatctgtcggtggcggtgccatgtatcccgacaaaaaaggtgaaaatgtattcctatgcacaggcggaggcatcaaaaaagtcagcgtaagtaccggagagcctaaaacagttgaatttgaagctttcttcgattatcaaccatacggcgaacgcgaatatatcttcaaccacgtatggcaacaagtagaagataaattctatgtaaaagacctgcacggggtagattggaagggttatcgtgaagcctattcacgcttcttgccttacatcaataacaactatgatttccaagagatgttaagtgaattgttaggcgagctgaacggttctcataccggtgcccgttattatggttcaggggcctctctttccacagccgctttaggtgtattctatgacgagacttacaatggagacggcttgaagataaaagagatattggccaaaggaccctttgccatcaagaaaactgacgttactccgggatgtatcattgaaaagatagatggcaaaccgattttaaaaggtcgggattatttcccgctactggaaggtaaagccggtcgaaaggtattgcttgccatgtataatcctgccaatggaaaacgatttgacgtgaccatcaaagccatcagtagtggcgaacagagcaatctgctttacaaacgctgggtagaacgctgccgtaagaatgtggataagctgtcgaacggtcgtataggctacgtacacgtcagaggtatggacagccaaagtttccgtgaagtatacagcgaattgctcggacgttgccgcaataaagaagccgtaattgtagacacacgccacaacggaggcggttggctgcacgatgatttggctaccttattgagtggtaaagaatatcagcgctttgttccacgcggacaatatatcggtagtgatccattcaataaatggctcaaaccttcctgtgtattgatttgcgaggataattacagcaatgcacacggtttcccatgggtatataaagaactgaaaatcggtaaactgattggtgcgcccgttccgggaaccatgactgccgtatggtgggaaacacagattgatccaactattgtattcggtattccgcaggtaggctgtatggatatgcgcggacaatatgccgaaaaccaattgcttacacctcacattgaagtgtataatgctcccgaaaaggcactcacaggagaagaccaacagttggaagcagccgtacaggaaatgttgaagaccgtaggtgaaaagaaataaaagcaactttctacacgttagtacgtgtgaccttatacatacgtatgtatagcctcacacgtactaacgtattaacttatacatactaacgtgtaaccccacacatacgaacgtgtttttcttttttatatatgtattccatactcatgcttcacttcatccatcacaaatgtactctccagcgaacccagactatctatggttcccaagacatttaatataaactcctgataatatttcatattgggggcatgtatcttgagcagataatcataacttcccgaaatattatagcattccgtcacttcaggaataccttgtatcatacgggtaaactcagctgcaatatcccgattaagcctcctgagtttcacactacaaaataccacaaaaccttgattcagtttttctgcatcaagcactgctatatactttttaatgtatcccccactttcaagacgcttgagtcgttcaaataccggagtagaagacagactgacgcgtgcagccagttctttagtggtaagtcgtgcgttttcttgcaatgtacgaagtatctgcaaatctgttttatccaatgtatccatagtgcaatattcttttaaagtatgacatccaacagtaaaacaataattttattctatatatcacaacaaatatagatatattttccatttttccacaatatattgttcgatattaccatcaattataactttgcagccaataaatcaatcatcagtttaactaaaaagaatacaactatggcaactaagagattacattttgaaacattacaactccatgtaggacaagaacagcccgatgtagcaacagatgcgcgtgcagtccccatctaccaaaccacttcttatgtatttcacaactcagctcatgcagcagcacgattcggcttacaggatccggggaatatctatggacgtctgaccaattccactcaaggagtctttgaacaacgtgtagcagcgttagaagaaggagtagccggacttgcggtagcttcgggtgcagctgctattacctacgcatttcagaacatcactcgtgccggtgaccatatcgttgccgccaaaacaatttatggaggaagttataatttgctggcgcataccctacccgactatggtataaccaccacctttgtcgacccgaatgacttatccaattttgaaaatgcaattcaggaaaacacgaaagcactgttcatcgagagtttgggcaatccccattctaatattatcgatatagaagctgtagcagatattgcacaccgtcatcagattcctttgattgtagacaatactttcggaactccttacctcatccgacccatagaacatggagcagacattgtggtacattcggcaactaagtttattggcggacacggtacttctttaggaggagtcattgtagattccggtaaatttgactgggcaacttcaggaaaatttccacaactgaccgaacccgatgccagttatcatggaatccgttttatcgatgcggcaggagcagcggcttatgccactcgtatccgtgccattttattacgagatacaggagcagccatcagtccattcaatgcctttatcctactgcaaggcctggaaactctttctctacgtgtagagcgtcatgtagaaaatgcactgaaagtggtggaattcctaaatagacatcctaaagtaaaaaaagtaaatcatccgtcactgcccgaacatcccgaccatgctttatacaaccgctacttccctcatggaggcagctctatctttacaattgaagtgcaaggagggcaaacagaggcccataagtttatagacagcctcgaaatattctctttactggctaatgtggccgatgtaaaatcacttgttatccatccggcaagcacaactcattcacagctaaatgagcaagaacttaaagaacaggagatttatccgggaacagtacggttatccatcggaacagaacatattgatgacctgctggccgatttggaacaggcacttgataaaatttaaaagcacgaaagcagactttgtatgaggatgtgtcaaaatgaaaagatttatcgttttgcgtcaataacaatagaaggataactttatgattttgacacacctccatctatcatggatacatcatttttctttgttcaagttgtttaatatctttctccttcaatcctattttatctaaaagtttaggaagattatggtcatttaagtaataacgggggcgagtgacataccgcttactggcgacagacaaactatcttctttataatcggtttgtatgccacccaacgacaacattgaatgaaaaacagatgcattccctgccaccggcttttcacgattcatacacacagcctcatattgaacaggatatcctttacgatacgcctcagacatccaaatcaggaacggaacatgcaactgatagtatgaaggtaccggagacgcatgcaaaaacagtttccggtcatcatcaaaaatatcctctccatgatcggaagtataaagcatagccgatgaagcattcgtgcgttgcaacatttcaatcagtgacgccaagaagccgtctgtataacagattgtgttatcgtacgcattcaataaatattcacggttctcatatttcgcatcggtcaggctatccggcctgaacactgccatatccgaaggataacgttctttataattaaaatgggaaccatacatgtgcaacacgataaacaatttccgatgtccgtcatttagttgtttatccactaacttcaataattcatcatctgatatattcgtttcctcaggtgcatcttcttttataaatttccattcatccgcctccattccgaagaaatcaataaaagaatgattaggccgctgattggaaaaaaaagctgtatgaaaccctgcttctttaaaagcagtaatgatacccttttcccgataaatacgattgtaattttcagcagaagctcccgaaaggagcattggcacacttttatgcgttgtatttgattgggtaagtacatctgtaaatgcgaccaagccttctgttttatccaacagcggagtggtattccgttcatacccatacagcccaaagttacaagcccttgcagtttctcccactaccaacacatatatctctgcctcatctttatcgtgtgtggcttgtgcaccaaaagtaaagtcctttgaactctcttgataaccggcggtttcaccggcacgctctattgccaaagtcagattatagcatacgttgaccggatacatatcgagtttcaatgcataatcctcatggtctgcatagcacaatgcggtcaggatgactcctactcccattgtcatccgggcatatctccgctggcgatatataaagtattgatccagtttcttattccctgttatcgaaacaatacccaaagccaaagtgggcaaatataccacaaatacgccaatcacagcaggcaacaagttatctagaagctccatagcctcaccggaattggttgtcagcaaattcaaaaacatatcgactgctataatggactgtccgaaaagataaagcaaaaccaattgaaaagcagcaaagaaaacaaagggaaacaatatccatattatctttccgggtttccggctcagcgtcatcaccatccaatataccgataccggcaaaataatattacatatacgtaccaataaaggcatttgctctgtgaagaacaatgccacattaggaatagctaatacaattataaacagaaaaaataattgtctcggctcacaacaccattgatagatctctttaaaacgcttcatttatattaaataagaaccccgattgtccgttctttccaaacccataatcgaggcgaacattcacattctttttaaattcccaacggtatccgataccataattaggcaaaacgcgattgacacgcaacgcactgaacttattaaacaccgttcctgcaccaatccaagccactataccattacgtttccaaatatgttggcgtaattctatctgcccttccattttatgtttatcacgatagcggccctcgtaataaccacgcatcgagtaagaattgcccaacaaagccatcattgaccaagacgggttgccaaaattaaacatccccctaaactctccggcaagcaaacctcctttccaaacaggatgataatagctggtacgcaagtcggtggtgctgaaagcgtaatcatttcccataaacttgggacgaaaacattgcgatatattcagataatatcctttatgaggattagtcaatacatcacgtgaatcatacaccaaggagaatccggcaccataattagttgtagtcaaatccattccttccaacaattcgggacgttccaagttctttccatgcacataatcataagctaccatcggtcccaaatacaaattgtctgtcagtttaaataaaaaactagcttttatctgtgcctgccaacggtccatatccgtttcgttggcatctacatttcccatatcatatcccattccccaaaatttggaagggaaagaataaaagtataaggtataatccaaacgatatttatcttgtggaaaaatatgggtaccacgaattcccagcaaataaaaacctaccgtagatacatcgccaaacagggaaacattggagggaggaagaatagtatcattcttatccgaacggtaaagcccggcagctaccaatccaagtcccaacttggtatctgtactataatgaggtccaccgatgatactgaagtcaaacttcttgtgcttcttattcttgttcgcatcattaaagtagtcaagaaacttattgaaaaagcttcttttccgtacagtgctgtctttgtgttgtatcgtatctgttggaaactcaaacaactcactgtgtctgggagttgcaaaagatatgcccgccatacatacgaatatccatgttaaaagtaacaatctcttcataatgtattcatatataagaaaaaagcagatttggatgcaaagataatccaaacctgctttaaagtggcattttaaattataagattttggtctgaaattacttatttctgtcctaaataccttataccggttgctttcctataatctgccaatgctattttctgctcataatatgattggataagatttgtatatgcctgtacccaagtcaactgtgcagaaagtacatccaaaatagtcagcctaccttccgtataactaaatgtattcaaatccaaattctcttctgctaacttgcagttttccttagcaatatctatctgacgggtattttctgtcagactagtccatgctttggctacctctttcgtgatttggtcttgtttatcttgcaaagcatactgcttaccaagtaaaatcgctttttgtgcagccgtcgacttaaatcgcgctccccagtggaacaacggcaacttgacagaagcatacacattactattaaacattgtttcgcccgaaatgttcaacatttgtgtcccccaagtctccttaaagccgatagacaaggatggattatattttgcagcagccagtttaacctgtcttttttgataatccacatccaactgagaaatagcataatcaggacgaacattcagtgcagcatcagcaccgacataagctggtaatggtaactcaacgaaaatagaatcaaccaaacctacttctttatccggttccaatcccatcaacacattcatgttctgcaaagctatctgataagactgataactgctggaacgttgcaactctgcctctttcaggcgagtctgcatttgtatcaaatctgttttactgatataaccgtcatcatacttatcttgtaacactttggtcaactgactgataatttccacatactgacacatcgttttatacatctctttctgagccgcagtaccccaataactggcttctgcagcataaataagattatctgtggtcaaatctaccgacttgtcagctatctgagactgaatttgtgatgccttataagtatgataaatacttcctcctgcataaataggttggacaactcccacttcggcactgtaagaatcatgctccataggaacagccattccgccaaaatccatatcatatttatttatacgatattgataactacccgtggcatccactgcggggaagaaagctgttttcgcagctttcattgctttctgcatggctgtacgttgtgacacactctgcttcaaagtctgactataatccaacactttctgttcgaactccgtataatttacggtagtctgagctgaaaccgtgccggacaagcacatcattccaagtatatatataagattcgttttcattatctgtctgctctgattttaaagaatatacaataagtcaccggaagcacgaagatggtaagaatggttgatacgaacaaaccacccataatggtagctgccatacctgcaaacatcgcatcacccaacaaaggaagcatacccaaaatagtggttcccgacgccatagttacgggaacaatacgtgttttggtagcctcaaccacggcaggtactgcccctttgccatctttcagttgaagtccgatttcgtctaccagtacaatcgcattcttgatattcataccaatcaagcccaacaagcccaaaatggcaaagaaatcaagagatttaccgaacaacaacaatccccataccacaccgatgaacaccaatggcaacatcagcataatcaataccggtttgcggtaattgctcgggaaaaggaataataaaacgacataaatcaacaagaatgtcaacggaatattctttgccaaagcagcattacttacatcttgtgtctcctgttcaccaaagtatttcatcttataaccttcgggcagttgcatctgttcctgtacggcggtcaacacctgcttaaaggcagccatcgtattggcaccacgcttcggttcacactgcatcatcatgcaacgttcacggttgaaacgacgcactacgttataatcataacccaaagaaaaattatcaatcacctgctccaccttaactgaatttcctttagtgctgaataccggaacactcttcacatcattcaggttcatattttctgcatcttcatccttcaataagataggaagtgaaatatccccctcacgatactcgcccaacggcaagccattggtagcagtacggaacgaattggcaacctgttgacgggtaataccaaggcgcaaacctttctgttgtgagaacatcggtttccataccggcactttatcaccccagttagaacgtatatccgtcaccatatcacattcatgcgcaatcttcttcgcacgctccaccaaggcggtcagcgtatccggattttcaccgataaatccgatttcaatggcagcttcgggcaccggtgacaacgcaaacaatgccgaacgggtaatgatattcggaaaattctgagtcatgtgttcatagaactgttgttctacttcggcagcatcttcagggtcttttgtttccaccatcacattggcatagttagacttcggaccgaaagaagaacttgccagatagtaacgcaacggagtaccacctaaagtcacagaataagattttactttttcattcttctccaaatactcttccaccttcatcacgtcttcgtctaccgcatgaatactaaaaccttccgggaataccaaatcggcacggaaataaggtttattcatcttcggaaagaaactctgaggcataactgccataatgaccagagaaagcaccaaagtaacaacaacagtagtcagtgttataaaacggcgcttaatcaataaagtcaagagcttctcaaacttatgataaattttggtatcgtatggatccttaccttcactaccgggagtagcctcttgcaaaataaagttaccgaaagttgtagtctggcataaagccaagatccaacttaatcccaatgacacggccaacacgataaacaacggttttacaatttcagcaaccgatgcaggagccaaatacaacggcaagaatgaacaaatagcaataaaggtcgctcccagcaatgcccattgaggcttgatagcaccttctatcaaagaaagataacgggattttccgcgcttgattccgatttgggcattgtctgtcaccacaatggcattatccaccaacatacccatggcaatgataaatgcagccaaagaagtacggttcaaacccactccccacattaacatgataagcaaggtacctcctacagaaaacaatagcgaactaccaatcaacataccggcacgcgatcccatcactacaaagataatcaaaattacgatgaccaatgactctatcagattgagaataaatccattattagcttcatccgcaatcttgtcttcgggatagagagaagacaattctataccgataggcaacaattgttctatctctgccaagctcttatccacggcttcaccaacagcaaccacattatcctttgcaccactggctacaccaatgccgatagcacgtttgccattgacacgcatcaatgttgaaggtggatcataataaccgcgttccactgttgcaatatcccctaaacgtacttcacgtccatctttgctaacaatcagctggttctcgatatcttcaagactagtataagtaccttctgtgcgcaagcgtaactgataaatatcggtagcgatatctcccgtattgacttgtacattctgtttttgcaaaatccccatgatagaagtcgggtcaatacccaaagatgatagtttggaagtagatatcttcacattgattacttctgtctgctcaccataaagcatcactttctgcacaccctcaatcggagtaagctgcgtacgtatatgctgtgcccagtcacgcaagtctttgtatgaaaaaccttcatcggctgtcaatgcataataaataccatatacatcaccaaaatcatcgttcaccgtgatagtagatgcaccgctaggcagcttcggctggatatttgccaccttacgacgcagttcatcccattttaccggcatataatcagggtcgatagtaggctgtaactcaatagaaatcttagacagcccaaaataagattccgatttaatctgatatacatcagtcattgactgaatctcacgttcaatcggttcggttatcaatttctccacttcatgcggattcgcacccggatattgggtaacaagaaccgccgtctttatcacgaaaggagcgtcttctttctttggcaatttaaaaaaggagataactccacctatcaacaaaatagccaaaaaaaagtagacaaccttctggttctctaaagaatattttggaatattcatgatttgtactctcctcttttattcggttaatattttgacttgctgaccgtccactagataagaagctcccgcagctactacttgttcaccggccttcacctctccggtcacaattaaatcattacgtcccacaatggttccttcgtcataaatcttacgcttctctactttttgggtagaaggattataaatgaatacaaccttattattcagattgttatcaaatactacagcagataacggaacggtaattcctccttttaccgtttcattttcaatattaactaccacacggcaagaaaagcccaccgataccttatatttcttcaagtcaaattcggggtcatcaatataaaggaatacaggaactccggcaccgtcttgcgatgcttccacatactcttttacctttgcctgaaataacttgcctttataagcatcaaattctacaaaaatacttccgtgagaagtcacataggcaatatttgtttcgggaatggtaaattccacttgcaactttgccgggttaatcagacataccacaccttgtcccggttgtacacgctgataattttccacatatttcttttggataaatccatcaaacggtgcacgcaactttgtatcattcaatgtgttttgtgcattttcaaaagcagatttagcattggtataagatgcctgagtcgtttcaaactcctgcatagatatggcatttttcatcaatagcttctctgcacgttgcatttgcgatgacactttctggaaggaagctctctttgcgtcataatccaacttataatctgtcgggtcaatttcagctaccacctccccttttttcactctctgtccttcgagtacattcattgccaccaacggaccggacattttaaacgcaagatcactgaattgatcgggcgacactacgcctgaataggatttttcaattttatttaacgacgcaacttccgccaatttcaccggacgggggcctcgttcctgagcaggttgctgtccgcatgaacagaacaataccacactcactgccacaatagacaattttctacatttcatactgttaatcttcacattagttttcgaatgcaaagttctcacatttattaaatgtgcacaagtgctaacagtaagatatattagtctatttttaagcattttctttgtaatctgcttaaactgtcctatatttgtggtgtataaccaaagtcttctttatttttatgaagtacactgacgacattaacatctttaaactgaacaaagatttcacagctgaaattgacataaccggtactttcggacatatctaccactaccctcagcgcatgaatggttgtctatttattctttgcctgcgtggtgagtgtgacataactatccacctgtctgaacacaagatacaaaaaaacgacattgttaccatactgcccgaaacattcgtccatgttcaccggcaaagtcccgactgccgtttatacttagccggattcaacaaagaattgctgaatggaataaactttttcaattccaccaagaattatctttcggccctgattgatacacctgtcacccctctgcgtcccgaaacatccgaattgttccaagactactttatgttattgataaaaatgaaacacatagaagcaaagcccaataaggacttgctcagctccatgctgctcaccatactgcatggcgtaggcaatattcatcaaaataccaatgtgaccacccgcgctttcaatcgcggagaagagattgtaaaacgtctggttcaatatattatcaaacattatacgcaagagcgaagtgtagccttttatgccgatttgctccatatatcaccacaacacctcagcaccaccgtaaacaagataaccgggaaaacggttactgacattatcgccaaactagtgataaccgatgcggaagcaaaactgaagtccaccgacctcactattcaggaaatagcgtattcactgaacttccccgatatttcattcttcgggaaatactttaaaagatatacaggaatgtcacccaaacaatatagggaaaatgtagaatgaatttgtctgcctaattgtattcacaaaaaaagacatgtccgaggagggggggggagatgctaccccctaaaagaaagagaaacgaagaccggtcaatacataataactatacctgtcggcacctcccacagtatgataccttaatttcagttcggtaaaatgcagccttcataaagtgagtacattgctttcatcagcagacagatactaatatggcaacacttttactttatccaggcaggaatataccgcaactgtaaatattgctcgccggtctgtatataattcccctcaaatgcccaatcccgaattcggtaaactttcaatctcttcaataaatagtcttccactctgaaagattgtttcttacagaaagaaagaaccttcacactaccatcggcaaacacattggcacgcactttcactgtcctgatagcaactccggcagggatagaacgcccttttttatagtctacccacaaaatagcttttgccttttctccctcacaacctccggcgccttcatcttttccggaggctgtggtagaaactccgtttttacatgcagaggctaccaataaacacaataccagcaataaatagttcagtcgttttttcataagtatattaatctttaatctcttcaataggagtcacatcctctataataggagtctgaatatctttcttttggcggaaacgaataatgttcaccaaatccgaaagtccataaacgatactgctgacccccaatataataaaaggcacagtggcagccgtaaacggattgaacaaaacaacaacaccagcaataagcaccagcacgggaacgacaaagaaacctcccggcacaaccgtccaactacgggcagcagacaggtttacaatctgactgatacctgccaacacaagaacagctcccaacacatacatcagaataccgacaaaaaatgccggcataatcatcagccaaagaccaaacagcagactacccaatccggctataggaaaagacattccattctgctttccacgagtaagataaccaaagacagagaacagacctggtaccaaaaacaaagctccgatagtaatcaccaaatacaggatagcagcttcgggccatgctaccaataatacgcccaatactaatgcacagatgcatcggattatagaataattcattgttttcattgttacatattatttatactattacactttttcaataatcaataagcgaatatacagaatatttctgaaaaagaataagaaaaggcagggaattaatccactgcctctatttgttctgtttccggtaagccctgatcattctcgtcttcgtcaatcaatatagcccaaaagagccaccacaacaataatgcagccaataccaccgctcctattcttatccaaagtttacgtttcatcttatttcctttttaatgatttattaactgatgcattaagaaccatccacacagccgaaatgttcatagataaaacccaattaaatgaataagattatgaataatggaaaatttttcgcaggactggcactaggtgcgttggtcggcagtgcattgagttgtttcgcccacagcaacagaggacgcaaactgagaagagacatttatgacaccattcaggacttggaagaagatgcgtatgactttgcacatcgcgctaagcataaagcagagaaagtaagcggagaagtggtggaaaagatgagtcaacaggccgaagctgtgaaaggcaaattgaacgaagttaccaataaatagaaaaaaaagtaagtttttctttggagataaaatcaaaacgattacatttgc

SEQ ID NO: 6699 - DNA, 25970 bp, Unknown
  gut microbiota DNA sequence
taaatacatgttggtggcgtctcttgcaactgaataagtcgtaagagaaccagtccatgtgtatatacttaacattctaaaaggatattcagaaaaggtctgtcgtacttacgacaggccttttttcgtttatgcaatatacaaaaaatagatactcaatcacaatgaaaacttatcaagtaaacaatgaaggttattacggcgagttcggaggagcatatatcccagaaattcttcatcgctgtgtagatgaactaaaaaacgcttatttaaatgtattggatagcgaagacttcaaacaagaatttaatgacttgttgcatgactatgtaggacgtccttctccactctatcttgcccgtcggttaagcgcaaagtacggctgtaaaatctatctgaaacgcgaagacctgaatcatacaggagcacacaaaataaacaatgccatcgggcaagtattgcttgccaaacgtatgggaaaaagtcgtatcattgccgagaccggagccggtcagcatggagtggcaaccgcaaccgtttgtgcactgatgaatatgcaatgcattatttatatgggtaaaactgatgtagaacgccaacatgtcaatgtagagaaaatgaagatgctaggggctgaagtccgccctgtcacatcgggaaacatgacactgaaagacgccaccaatgaagcgattcgagactggtgctgtcatccagccgatacgtattatgtaatcggctctacggtagggcctcatccttatcccgacatggtggcaagactgcaatctgtcatcagtgaagaaatcagaaaacaactgaaagagcatgaaggacgtgagtatcccgattatctaatggcttgtgtgggtgggggaagtaatgctgccggtactatttttcactatatcgatgacgaacgtgtacaaatcgtattggccgaagccggtggaaaaggtatagaaacaggaatgtcggcagctactatccaactgggaaagatgggaatcatccacggagcaaaaacattggtcatccaaaacgaggacggacagatagaggaaccttattctatctctgccggactggattatccgggtattggccccatgcatgccaatcttgcccgacaaaagcgggccattgttctgtccatcaatgatgatgaagctatacgcgctgcattcgagctaacccgtttggaaggtattattccggcattggaatcggctcatgcattgggtgcactcaataaaatgcagttccgtcccgaagatatagtggtacttactgtctcaggacgaggagataaggatacagaaacctatttgaataacaaaccagaagaaacgaaattatgaaaacatttatctatacaactaagcacaaaactatgttgggagaccttcatactccggtaagtacttatctgaaagtacgggacatcttccctcaaagtgcactgatggagagctccgattaccacggaagtgaaaacaaccgttcctttatcggactaaaccctgttgccagcatcggcattaaccacggagtcgccacagccacttaccctgacggcagcacagaagagcataccattactgccgattacaaagtagatcatgccataaccgatttcctgaaccattttaaagtacgcggagaatataatcattattgcggtctgtatggatacaccactttcaatgcagtacgttactttgagcacattaatgtaaaagacagttgcgaccccaaaaatgacgctcccgaaatgctctatatcttatataaatatctgattgtcttcaatgacttccgcaatgaaatgcttctgctcgaaatgcttcaggataatgaagaaagccatctcgactatgtagaaaaagctatccataaccgcaactacactacctatgattttcatgctgtaggcgaaacaacgagcacgctgactgatgaggagcataaagccaatatccgaaaaggtataatccactgtatgcgcggggatgtattccaaatcgttctctcacgccgattcatccaacgttatgaaggtgatgacttcaaactctatcgtgcgctgcggagcatcaatccttcaccttatttattttacttcgactttggcggatttcgtatcttcggttcatcccccgaaacacattgcaaaatagaaggggggcgtgctaccatcgatcccattgcaggaacaacccgccgcagcggaaataaacaaacagatgacgaactcacaactgccttacttgctgacccgaaagaaaatgccgaacacgtgatgctggtagatctggcacgcaacgacctgagccgtaactgtaaagatgtgcaagtagaattctataaagaacctcaatattatagtcacgtcatccatttagtaagccgagtcagtggtgaattaaacccaaatgctaactctatcaaaacattcatcgacactttcccggccggtaccctgagcggggctcctaaagtaaaggcaatgcaactcatcagccaatacgaacctcacagccgtggagcctacggtggctgtatcggtttcatcggactaaacggcacactcaaccaggcaatcaccatccgcaccttcgtcagtcgcaacaacgaactttggtttcaagccggaggtggtattgtagcaaaaagtaatgaagaatacgaactacaagaagtaaacaataagctgggagcacttaaaaaagcaattctcctggcagaacaaatgtaaaaaaacactctattatgaaaatagtaattatagacaactacgactcattcacttacaacctgagtcatttggtaaaagaactcggtgcagaagtcaccgtcatgcgcaatgattcctttaaactggaagaattaaaagtattcgataaaataattctttcacctggaccgggaatcccctctgaagccggactactgccggatgttatccggacttatacagggaaaaaacctattctcggtgtatgtctgggagagcaggccatcggagaggtattcggagccaaactgatcaacctgagtgaagtttttcacggagtacaaacaccgataaccatagaaaaagacgattatatatttagagggttgccacaggaaatacccgtcggaagatatcactcgtgggtggtagatacagacgaattccccgactgtttggaagtaacagctatgagccgggaaggatatatcatggcactcaaacataaaaaatatgatgtacatggaatccaattccatcccgaatctgtgctgacaccgaatggaaaaacaataattgctaatttcctaaacgcataaaacaacaattcaaacgatatgaaagctatattatcacgcctcttcaaccatgaagaactgaatcgtgaagaagcaaaaaacttgttactcaatatcaccaaaggcaggtataatgactcacaaatagctgctctgctcacagtattccagatgcgtggcgtcaaagtagaagaacttatcggttttcgtgaagcactgcttacaacacgagtacccatagacttttctgcctacaaacctattgacattgtaggtacggggggagacggaaagaatacattcaatatatctacttgtgcttgccttattgttgccggtgccggatatcatgtggcaaaacatggaaattacggtgcaacctcaataagcggagcaagcaacgtaatggagcaacacggagtgaaatttaccaatgacccatcgatacttactcgcagtatggaagagtgtggcatggtgtatatgcacgcccagctgttcaatcccgccatgaaaagtgtcggtccggtacgcaaagccctacaagtgcggactatcttcaatcttctcggaccattggtcaacccttgcctaccttcctaccaattattgggtgtggcagatcttcctcaaatgcgcctttacaccaatgtattccaaaagcttggcatcggttttgccgtagtcaataatctggacggatacgatgaaatctcccttacggatgagtttaaagtaatgaccaaccgttacgaaactatttacaagccatcagaactcggcttttctctcgcccgccaagaagagctctatggtggaacaacccctcaggaggctgcctgcatcttcgacaacatattgcagaaccgtgcaaccaaagcacagaccgactgtgtgttgattaatgcctcttttgccatccaagctatggaaccggccaaaccaatagaagaatgtgtcgccatagcccgtgaatcattggaaagcggcaaggctctgaaaacattaaaacgttttatcgaattaaacagttgacaacccggtataaaagtaaagctatgacagatatattagatgaaatcatcgcccacaaacggttagaaatcgaacaacaaaaagccgctatcagccaagagttactgataaacaactgcaatgagcctatgccgagaaggagcatgcgcgccagcctttcggcatcaccttccggcatcattgccgagtttaaacgccgttcaccatccaaaggctggataaaagaaaacgcacaggctgatatcatttctcctgcctatgaaatggcaggagcttccgttctctctatcctgacagacgagaatttttttggcggcaatctaaaagacatccgtgccgcacgtccccaagtgagccttcccattctacgtaaagacttcatcattgacgaatatcaactttaccaagcttgcatcgtaggggcagatgcagttcttctgattgctgcggcactcagaaaagagcaatgcagtatgttggcggccaaagcgcacgaactgaaattggaagtacttctcgaaattcatagtgaacaagaattggaatacatagaagacaacattgatatggtgggagtgaacaaccgcaatctgggaactttccatacagacgtggaaaactccttccgactggcagagaagttacctaaagaaatgttacttgtttccgaaagtggcatttccagcccacagactgtccgacaattacgtgcagccggctttcggggtttcttgattggagagaatttcatgaagacacctcaaccgggaaatgctttgaaagagtttatcagcaagttataaaaatcatattgacaaaatgattgtaaaagtatgtggcatgcgcgagcccgacaacattcgtgccgtagaacagaccggtccggactggatgggatttatctttttcccccattccagccgtcatgtctctctccgtccggcttacctgccggagcgatgcaagcgtgtaggcgtatttgtcaatgaagtaacacccgccatcctacaaaaagcggaagaattcgaccttcattatatccaactgcacggaacagaaacttccgaacaatgtctcaacctgaaacgtgccggactgggggttatcaaagtgttccctattgcctcaatgagtgatttgaaatctactgtctgctatgaaaatgtctgcgactacttcctgttcgacacagcctgtaccggttatggcggttcgggaaaaacattcgattggcaagtgcttacggcgtatcatggttccactccttttctgctaagcggcggactaaagcccgacagtctgcattctctgaaagaattccgccatcctgcatgggcaggcatcgatctcaatagtggattcgaaatctctccgggcaaaaaggatacaacgctattaaacacatttatcaaacaaatcaaatctaacatagaatgaacagaattaataatttattcagcacaaaacaaaaagatattttatccatttatttttgtgccggttatcctacctcagacggtactgcaaacgttatcaacacactggcaagtaaaggaatcgatatgattgaaataggtattcctttcagtgacccgatggcagacggccccgttatccaacatgcagcaacgcaggcattgaaaaacggcatgacactacaactcctttttacgcaactgaaggatattcgccacaaagtacagattcctcttattttaatgggatatttaaaccctatcatgcaattcggcttcgaaaacttctgccgtacctgcaaagaggttggtatcgacggagttatcattcccgaccttcctttcaaagattacatgaatgagtatcgccccattgcagaaaaatatgatataaaagtgattatgctgattacacctgaaacaagtgaagaacgcatccggctgattgacgaacatacagatggatttatatatatggtatcttcggcagccattaccggtgtacagaaagatttcggtacacagaagcaggcatatttccaacgcattgcagctatgaagttgcgtaaccctcgaatgataggtttcggaatatcaaataaacagacattcgaaacagcctctgccaatgcagcaggagcaataatcggaagcaagttcgttacgctacttggtgatgaaaaaggagatgctgaagcagcaaccgacaagttgctcaaagcattaaacaacgagtaggagaagcactatttaaacaaatgcatggagaaacagcaaaaacattttgttatttctccatcttaattttgccatatttccacatattccgtatctttgtgccataatccaatcagatatacttatgataaagagtgaatatccttccgttttgctaatatatacaggtggtacaatcggtatgattgagaatcccgaaacaggtgctttagaagccttcaattttgatcaacttcaagagaatgttccggagttaaaacgtttcaattaccgcatttcttcctatcagtttaatcctcccatcgattcttccgacatggaaccttctttatgggcaaaactggtaaaaatcatcgcttacaattatgataattttgacggttttgtcattcttcacggaacagacaccatggcatataccgcttctgcccttagtttcatgttggaaaatttaagtaagccggtcatcttgacaggtagccagcttcccattggcatgttgcgtaccgacggcaaagaaaatcttatcacttccattgaaattgccgctgccaaacaccccgatggtacagccatcgttcccgaagtgtgtatcttctttgaaaaccacttgcttcgcggcaacagaacgacaaaaattaatgcagaaaactttaatgctttccgttcatataattatccatcacttgctacagccggtattcatattaagtatgaatatgaccgtattcataaagcaaatcccaatgtggctctaaagccccactatctgtacgacaccaatgtcgtcatcctgacactctttcccggtattcaggaaaatatgatacgaaacatacttcatacccccggattgcgggcagtggtgcttaaaacatacggttcgggtaatgctccacaaaaaccttggttcatcgacttactgaaagaagctaccgaccgtggtatcgtcattatcaatatttcccaatgttctacaggaagtgtagagatgggaagatatgaaaccggacttcatttgctcgatgccggagttatcagtggatatgacagtacagtagagtccgttcttacaaaactaatgtttcttttgggtcatggcaaaaatgaaagtgagatacggcatcaaatgagtattccggttgccggtgagtttaccatacctacaatgtaacacatttgtaatatttgtttcattaaatagtaataaaaacgctccatctttgcaatgcgaaacaagaaaagattagttttgtagtaaataaaaagaggaacgacatgaatgattaccgcattttagtagttgatgacgaagaggatctctgtgagattcttaaattcaacttggaaaacgaaggatatttggtagatactgccaactctgccgaagaagccttaaaaacggatctcactaaatacgatctccttttattggatgtcatgatgggtgagatctcaggtttcaagatggcaagtatgctcaaaaaaaataaagccaccgccactattcctatcattttcattactgccaaagatacagaaaacgataccgtgaccggcttcaatttgggagctgatgactacatttcaaaacctttttccctgcgcgaagtaatggtacgtgtcaaggcggtgttgcgtcgcacagcatcgggtaacgaaaaagaagctccgcaacaactggtttataaaggattgatacttgatatgaccaaaaagaaagtaagtattgacggtattgaagtctctcttaccaaaaaagaatttgagattctgctgctcctattgcaaaatcagggacgtgtgttttcccgcgaagatattttagcaaaagtctggcaagaagaagtatacgtactcgaccgcaccattgatgtaaatatcactcggctacgcaaaaaagtcggagaatatggaaaatgtatcgtaacacgtctgggatacggatattgctttgaatatcaataaataaagtctgctttatcatgacacttgaactatccagccatgtattatcgttcagcaagaagctttttctttctgtcattgtattgtttcttgtctttgccatttgctttatggcatttcaatatcgcagggaaaaggaatacaaaatagaactgctcaacactcaattacagaattataatgaccgtctgaatgactttctccgtggaaaagacacattgaatttgagacttttagataaatatgtacacgaacatacgttggatgaattgcgtgtcacccttattgataaagaagggaaagtgttgtatgataatatcgaacagaatccgctgtacttcagcaaccatctcaaccgggaagaaataaaggaagctatcagccaaggaagcggctattccattaatcgccaatccgaaagtttaggaggagagtttttctattcagcccaatattatccgaacactaattatataatccgttccgcattgccctatagtgtcagcctggtgcgtcatttaaaagcagattcccattttgtatggtttacgcttatagtaagtctcgtgctgatttttatcttttatcgttttacacataaattggggatgtcaatcacacagttgcaacaatttgctttgaaagctgatcgtaacgaaccgatagacaccgacttgcaaggagcatttccgaaaaacgaattgggtgagatttcccaacatatcattcagatatacagacgactgcatcaggcaaaagaagatttatatatcgaaagagagaaactgataacccacctgcaaatatcccgtgaaggattaggagtttttacccataagaaacaagaaatactggttaataatctctttacccagtacgccaacctcatttcggacaaaaacctgagttcgacagaggaaatcttctctattccggaacttcagccgattactgatttcattgccaaaaataaagagcgcacaatcagcaaagaagagaaacgaatgtcgattgttatagacaaaaacggtcgtattttctcggtagactgtattatttttcaagacgacagctttgaaatttctatcaacgatgtcactcaggaagaagaacaggcacggttaaaaaaacaattaactcagaatattgcccatgaattaaagaccccggtcagcagcatacaaggatatcttgagacaatagtcaataacccgggactgccacgagaaaaaataaatacgttcctcgaacgcagttatgctcaaagtaatcgcctggcacatttattacgtgatatttctgtcttgacacgcatggaggaagcccccaatatgatagagactgaacaagtcaacctgacagttatgatgcaaaacatactgaatgaagttgccttggaattggaagaaaaacagataacagcatccaattttctaccccatggactgactgtatccggcaacgcttccttgctctattccattttcagaaacctgacagacaatgccatcgcttatgccggtacaggaatatcaattacagtccgttgcttccgtgaagacgaacgtttctactatttcagtttctcggacaccggtataggagtagctcccgagcatttaagccgcctgttcgaacgcttctaccgagttgataaaggacgctcacgcaaattaggcggcacaggactcggacttgccattgtaaaaaacgcagtcattctgcatggcgggactatctttgccaagaataatcccggtggggggttggaatttatctttacgttgtgtaaagaataaaaggacgcctttcctattatttgaaaagccttgcccaaaaacctttaggagcagggcgtttttcattatgcagattttgatatacctgctcataacttaagcgattgtgcaccatttcataaatcaccccccaatcaggcaacccgcccaaattacggtcatcaataaataaatccgccttcagtttacgcgaataataccggcttttatctttctcttcggcataattgctattgactgcataaaattccagtccccgctgacggcaaaactccaccgcttcttccaataaacgaccttcacgaacgctccataatataaggaaatgacgttcttgctgcaattttttcaatgtttctatggcaaaaggaatttctttacctattgcgggatacttatgttccacgattgttccgtcaaagtctactgctataatcatagttactctaaattatgtcacaaagataaggcaaaatttctattcctccctttacaaaaaccaaaagaattaattgtttttctaaagataagcagtatatttgcaatgtattggtttgtttatctttagtcaaagataaatgattaaaagggaatcaggtgagaatcctgaacagtcccgctgctgtatgtttcacaaaacgcataagcaaactccattaaccactggaaagcatttccgggaaggtgcttatagcggaaacaagtcagaagacctgcctatacactttcacatcctgaagctttcgaggaaagagcttggaacattgaacataaaggatgattagcatccgctatcttctccgtttcgctatcccaaaagagatgatcaggtaaaagagattttttataagaataaactctgccaagtttatttgagtgccagcctgatgggaatcacgttggcattttttttatagtccaagtaagcacgaaatcgggatgagtcagataacgcacccgataatgccactgttcctctgtccgatattcctgcgcttccaaacacccctcctcttccatgacaaaaggaaaaatatgcaaatgccggataaagtctacaccttccacccccatcaccttgaacaatgtttctttggcagaccagtgaagaagcaatacatatacttcatcaccttgattcatcgttttttcttcgtccggccgcacaaaacgagaaacaaccctacgaacccttaccccatatctctcaatatcgattcctacttcttcagtcggatgcagggcaacagccacataaccattcgtatgagatatgctgatatatgcacttccatctgccagatatggcttcccggaaggaagataaaccaccttcttttcttctccgcacaatgttttcagtaatacacgtacagccagccattcatatttccgcatatcagaggtaaaatgctccaagtctttctcgtacatagaaatattgccaagcaaagccaataactgctccaccgtttcctctgttttccaaaccccgaccaacagtccgttttcttgaattttccgatataacggcataatgattacttcgtttcttccgccacttggggttcgtcaacaatcacttttactttcaagattcgacgggtgttcatttccaacacttcaaaatgatagttttcataatccaaatgttcatgcaacaccgggaattctccctttatctcaagtaaaagaccggctaaggtatcggcatctccttccactctctcaaatatattcgagtctatcttcattatcttatagaaatcagatagaagagttttagcctcaaaaatataagtacggtcattcagtttcacatacgtgcgttcttcatcatcatattcatcattgatttctcctacaatttcctcaatgatatcttccatggttacaatgcccgatgttcctccaaactcgtcaacaacaatggcaatatgaattttatttgcctgaaagtcacgcagcaaatcatcaatcatttttgtttcaggaacaaaataagcaggacggatcagtgtttgccaacggaaattatccatcttgttaagatgaggcaacaagtccttgatataaagaatacctttgatattatcacgtgactcggcatatacaggaatacgtgaatatgcattatctacaatacacttcagcacctcggcataaggagtattgatttccaaatccaccatatcaagacgcggtgtcatcacctccttggcagtctctccaccaaaacggataattccctccagaatgttgctctcctccgatatttcattcttatcggtcaactccaacgcctgcgacaattcgtcgactgaaatattatagttcttcttcgccacacatttattaattaagaatgaagagcgaaccaacagggcagacaaaggagaaaataatgttttcaagaaagaaatgacaggagcagccttacggcaaaacttcaaagtatgctgtgccgaataaattttgggcattatttctccaaacagaagtaataagaaagtaagaatgaccgttataaccagaaattcaagtatgacagaatttccccaatggatggtgctggcaaagaaataattgcacagcatgattatcgtcacattcacaaaattattagaaatcagaatagtggctaacaagtgttcagaatcgtccagcagagcactgatacgcctgtcggaagaagtctgcccttcctctatttcactcaagtcaccgggagacagagagaagaaagcaatttccgaagcagacacaaagcctgatgcatacaataatataacagctaatacaatagctataattgctcctatagtaggagaagtcacggtcacaccgtcaaacaaatccgccaagcggcataaatacgagtcagggtccaaggaatctggttttagttaaacatccggttctttaaaattaaaacggtaaatcatctgtcacgctgctattggcggcaggctgttgcgatgccggctgtgaaacagcttgcggcatatatcctccttgctgctgagaagcagtacggggagtcagcatttccatgttatcagcaaagatttcaacgatagtacgtttgataccattctgatcatcgtaaaaacggctgcggattttaccttcgatataaagcttatctcctttgcgaacatacttttcagccgtttgcgccaatcctctccacaaaacaatattatgccattcggtacgttcaggaacctgagtcccatttgccaaggtatatgcacggtctgtggtagccaaagaaaaagtagctacagcaacaccattatccaaatatctcacatcagggtctttacctacgttccctatcaattgcactttatttaatgacattctcttcttccattttaattatcaggcttcaaaattagcgaaaaaaactgatttaccaagcgagaaacagcaaatttatgcaaatcttctatcctaattctctgatactgtgcaaaagaggcagaatcttcgggcagaataacctcataaaaatttgcataaatcacccgatgggataagacatgtttcactcctttttgtaccagccggactaagggagtctcgccttcagccaacatttccctccaccgggataaagcatagaacttttcttcgggcacttcattctccgtttctatcaaaggaagctcatacagattcttccagatatcattccctgtccgtttattgattaatgtatgcgcgcccatgcgtacatagatataattaaagtaacgatttgccacctttgtcttatgctgtttcacaggcaacgtatccaccacccccttttgccgggcgacacaagtatcaacaaaagggcagaacatacagttgggcgaagcaggagtgcactgcaacgcgccaaaatccattatcgcctgattataaatccccggttgcgctttatccaacaactccgccgccacttccgcaaaaatcctcttcccttctgcagagtctatgggcgtttcaatccccaaccagcgcgaaagcacccgataaacattcccatccaccacagcataaggcattccataagcaaaagaacaaatggcagccgcagtatactctcccactcctttcaaagccagcacctctttatatgttttaggaaaacctccggcaccggccatgctacgcgcagcagcatgtaaattacgggcacgagaataatagcccaatccttgccaatatttcatgacctcgtcttcatcggcagccgctaatgaaaacacgtcagggaaacgttttacaaaacgttgatagtaatcataaccttgagcgacgcgcgtctgttgcaatataatttccgaaatccatattaaataaggattcttcgtcctgcgccaaggcaaatcacgcttgttgtcttgataccattttattagtatttctccaaaattatccatgtctaacgttacaaatcagcacaaaatgtgcgttaattctgcaaaaataaggcaagaaaaccaaagctgacattttttttaggaaatttattctgaatatatttcttaaagagctagaaaagctatatatttgcagtccaaaaaattaagatataagtataacaataattattagcgaaatgactaaagcagatatcgtaaacgaaattacgaagaaaaccggtgctgataaacaagcagtgttgaatacactcgaagctttcatggatacagttaaggaatctttgtcaagagaggaaaatgtatacttgcgtggttttggaagttttattgtgaagaagagagctcagaaaacagctcgtaatatttcaaagaacactacgattatcattccggaacataatattccggcttttaagccagcaaagacatttacattatcagtaaaaaaataaacaactagagtattaacccataaaatttgaagctatgccaagcggaaagaagaaaaaaagacataaaatgtcaacgcacaagcgtaaaaaaagactaagaaagaacagacataaaagcaaaaaataatttgtagtctgtctgacgacaaataaagaacaaaccttgcaaagcaacaaaatgtctttcaggtttgttctttgtttaatgagaaaagtgaataatttaagaatacaaaagtgacaagcgaactagtagtagacgtacaacccaaagaaatttccattgcgctcctggaagataaggcgttggtggaattccaaaaagaaggaagaagtgcttctttcaatgtgggaaatatgtatttgggacgggtaagaaaactaatgcccggactcaatgcctgcttcgtggatgtcggtttcgaaaaagacgcttttcttcactatttagacttaggacctcaatttcattcttatcagaagtatctgaagcaagttttaagcgaccgcaaaaaactttatccaatttcaaaagctactatgctgcctgacattgataaagagggaactgtttcaaccaccctccaacaaggtcaggaagtaattgtgcaaatcgtaaaggaacctatttcaaccaagggccccagactgacctgcgaattatctttcgccgggcgttatttggttcttatccccttcaatgacaaggtttccgtatctcaaaaaattaaatcgagcgaagaacgcgcccgcctcaagcaactgttgcaaagtatcaaaccgaaaaacttcggggtgatagttcgcactgtggcagagggaaaaagggtggccgaacttgatgccgagcttaaagtcttgctgaaacattgggaagagaccattacaaaagtacaaaaagcagccaaacttcctgcactggtttatgaagagaccagccgcacggtagccatgttgcgcgatttatttaacccttcatacgagaacatttacgtaaatgacgaaacagtgttccacgaaatcaaggattatgtatctctcattgcccctgaacgggcagaaatcgtgaaattgtacaaaggacagcttcctatcttcgacaattttggaataaccaaacaaatcaagtcctcattcggtaaaacgatttcgtataagagtggagcttacctgattattgaacacactgaagcgcttcatgtggtggatgtcaatagcggtaaccgttccaaatccggtaacggacaagaggctaacgcactggatgtcaatctgggagctgccgatgaattggcgcgccagttgaggttgcgtgatatgggtggtattattgtcgttgactttatagacatgaacctggctgagaacagacaaaagctgtatgaacgcatgtgccaaaatatgcagaaagacagagccaaacacaatattctccctctcagcaagttcggactgatgcagattacccgccaacgcgtgcgtccggccatggatgtcactacagatgaaacctgtcccacctgcttcgggaaaggtagcatcaaaccatccattctttttacagatacattggagagtaaaattgattacctggtcaataagctgaagattaagagatttacactgtacatccacccgtatattgctgcttacgttaatcaaggccttgtgtcgctaaagcgtaaatggcaaatgaaatacggattcggaataaagattatccccgatcaaagtctggcattcctgcaatataagtttaccgatatgcatggagaagaaatagacatgaaagaggaaatcgaaatcaaataaaaaacggggagcgaataaatgaagtcgctccccatttttttattcccaatattaattggtatctttgcttacaaatactaaagtcatgattatagaagatttacagcatttatatcaaacatacacaggtgtagctgccgagacaattaccgaattgccttcttccggttccaacagacgttatttcagactcaccggaacacagaatttaatcggcgtttatggtacttccatcgaagagaacaacgcttttctctatatggccgcacattttcgcaaaaaaggtcttcctgttcccgaagtctattgtgtttccgcagataagacatgctatctgcaagaagacttaggtgacacattattattcaatgccatcgaaaaagggcgcaccaccagtgtattctcggaagaggagaaagaacttctccgcaaaactatccgtctactgccggccatccaatttgcaggggccgacggatttgatttttcccattgttacccgcaaccggaattcaaccaacgttctattctttgggatttgaactactttaaatactgttttctgaaagctaccggacttgaatttcaggaagacaaactggaagacgatttccagaagatgagcgatgtactgctccgcagctcttcagccactttcatgtatcgcgatttccaaagccggaatgtaatgattaaagatgacaaaccatggttcatcgattttcagggtggacgcaaaggcccgttcttctatgatgtcgcctctttcttatggcaggccaaagcccaataccctgacactttaaaaaaagaactcttggaagaatacattgacgcgctttgcaaatacaaaccggtagacagagaatattttttcagccaactgcatcattttgtacttttccgcaccttgcaagtattgggagcctacgggtttcgcggatattttgagaaaaagcctcatttcatacaaagcgtaccttatgccatagaaaacctgcggcagttattgcgcgatgagtatcccgaatatccttacttatgctccgtcttgcgcgagctgactgaattgaaacaattcaaggacgagctgaaaaaacgccaactgacggttaaagtgatgagttttgcatacaaaaaaggcatacccgacgaccctacaggtaacggaggcggttatgtattcgattgccgtgccgtaaataatcccggtaaatacgaacgctacaaaccctttaccggactggatgaacctgttatccgctttttggaagaagacggagaaatctttccttttctggaacatgcatacgcactggtggacgcgtcggtcaaacgatatatggagcgagggttcagcaacctgtctgtatgcttcggctgtaccggcggacaacaccggtcggtctattcggcccaacatacagctgagcatttaaaccggaaattcggtgtaaaggttgtcttgattcaccgcgaacaaaacatagaacaaatattcgaatcgactttatgaaagctatgatttttgcagccggcttgggaagccggctcaaacccctgacagataccaaacccaaagcgctgatagaagtagccggaaagcccatgctggaacatgtcatattaaagctgaaagcttcgggctttaatgaaatagtgattaacgtacaccattttgccgatcagattctagattttctgcaggctaatcataatttcggtgtcgacatccatatttctgacgagacagaagaattactggacaccggaggaggactggaaaaagccggcaagtatttcatatccccctgccatgaagataaaaacggtatcctgctgcataatgtagatattttatccaactgcaatttacaagatttaatccgcttccaccaacaaacccctgatatatacgccaccatgctggtaagcagacgaatcacctcccgctacttgctatttgatggcaacaatcttttgtgcggctggataaataaaaccacaggcgaagtgaaacctgccggattaaaatacgaagaaggaaagtatcgggaatacgcctatagcggtatacaagcaatcaacccgctattgctgaacaaaggcatgaaaccggggaaatattctattatcgatttttacctgcaagtttgcaaaaacatcaggattcagggctatcctgtcgacaacctacaattgatagatatcggaaagccggagacgctcatcaaagcagaagaatttctaaatcaactataaaaggactttaataaaaagcacgtttcacgcataacagggcattattccactcatgctcaacgatttgcggtgaaacatcaaataaattaaaaggcggaagtttttcgtgacagcaaccctcccaaaagaccttgttcttttcaaaaaactcttccgtctttaaaaaaaacttcaagttcttctaaaaaagaccttgaagtttttcaattattccctaaatactttgaaagataaatcttcttaccaaaggtttaatttattcttttgtgcctcttccaaagaaacagtcttcacctgttttgcactattcttgctgcgaagttcttcatactctctgtttattccctccacaaattcttggcgagactcagcattcagcaaacgggctgccaccaatgcattctgtgaagcatctttcatgtgaataaccggccctccataaacaggagcaatcttcagagcagtatgaagtttggaagtcgtagcaccaccaaccataatcggaatatccagtcctgcacgttgcaattcgacagccacatgtgccatctcctcaagagacggagtaatcaatccactcaagccgatgatatccactttctcttctatggctttttgcacaatcgtttcggcaggaaccatcacccccaagtctataatttcataattattacaagccatcaccaccgatacgatatttttcccgatatcgtgcacatcacctttcacagttgccatcaacacctttccggcactgcgcactccttcctgcttatcggcttcaataagcggttgcaaaatactcacagcttttttcatggtgcgggcagtcttcaccacttgaggcagaaacatttttccggccccaaaaagctcacccactttgttcattccatccatcaacggcccttcaatgatatccaccgcttttccgtatagcggcaacgcctccgccaaatcttcttccaaataatcaccgatgccttttatcaacgcatattgcagacgcatctccaccgtttcctcacgccataactcctgttccgccggtttgccgccggtttcggtattctttaaagcttccgctgtttcaatcagcctttcggcagcatcgggacgacgattcaacaccacatcctctatccgttccagcacatcggcaggaatatcggtatagagcaccgaagtggccggattcacaatacccatatccatgccctgccgaatggcatgataaagaaatacggcatgcattgcttcacggatataattattaccacggaaagagaatgacaagttacttaccccgccactgacatgtgctccgggaagattctgctttatccaaccggttgctttgataaaatcaacagcataattattgtgttcctcaattcccgtagccacagccagcacattagggtcgaaaataatgtcatgcggattaaagccgacctgctctgtcaagatacgataggcacgcgaacaaacttcaatcttccgttcgaaggtgtcggcctgtcctttctcgtcaaaagccatcacgaccgttgcagctcccagttttttaatcagacaggcatgctcgataaatttctcctctccctctttcagcgatatggaatttacgatagatttaccttgcaaacacttcagcccggcttctatcacctcccacttagaagaatcaatcatcacaggaacacgtgcaatatcgggttcggacatcaccaaattcagaaaaacagtcatttcttccttggcatccagcagcccgtcatccatattaacatcaataatcaatgcaccgtcttctacctgcttacgtgcaatgctcaatgcctcttcgtatttcttttcgtttatcaaacgaagaaacttacgcgaacccgccacattgcaacgttcgcccacattgataaaattaatttcgggtgtctgttcaagcagctccaatcccgaaagccacatccgctcaggcttacctgccggaatgtgagggcgtgccttctgcaccaatggaacatattcggcaatatattcttcagtcgtgccacaacatccgccgataatattcaccaaaccctcgtctatgtattccttcacttccgaagccatatctccgggagtctggtcatactgccccaagctattcggaagccctgcattgggatacgcactgatataataaggagcacgcgcagccagcccttccaaaaaaggtttcaactgtttggctccgaaagagcaattcaagccgatagaaaaaacaggagcatgctgaacagacgcaagaaaggcatccagagtctgaccggaaagcgtgcggccggcaatatccgataccgtcaccgagagcatcaaaggcacttctcgtcccaccgcctgcattgccgactcagccgcaaaaacagcagccttggcattcagtgtatcaaatatagtctctatcaggagagcatccactcccccttccagcaatgcttccatttgctccctgtaggcaccgaccagctcatcataagtaagtgcacgcattgcaggattattcacatcgggactcattgagcaagttttattggtgggaccgacagacccggccacaaagcgcggtttatggggagtctttcgggaatattcgtccgccatttcacgagcgattccggcagccgacaaatttatctcacggcacatatcctgcatatgataatctgccatcgacacccgctgagcattaaacgtgtttgtctcgatgatatctgcacctgcttccagatacttgcgatgaatatcttttatcacatcaggacgggtaaggcacagcaagtcattgttgcctttcatctgaccggcaacttgtgcaaaccgttcccctctaaaatcctgttccgataagttgtatttttgtatcattgtccccatcgctccgtcgaggatgagaattcgttcgtcaataatttgcttcaatgtagccattcacaatatatactatctcttaaacattctatccatttcacgcctgtcatccttttctctcaaagattcgcgcttatcatattgttttttaccttttgccaaagcgataactaattttgccagtcctttttcattcaggaacaaacggacaggaacaatagtaaagccgggattctttcctgcctcttccaatttacgcaactctttcttgcttaacaacagcttacgttcacggcgggctgtatggttattatacgaaccatagaaatattctgcaatatgcatattctttacccacaactcaccatgcacaaagtagcaataggtatctaccaggctggctttacccatacggatggattttatctcagttccggtaagcacaatacctgctgtgtacgtatcgataaattcataatcgaacgacgcacgtttattttttatatttacaggagtcggtttcatcaattcaaaataacagataactcattaaataccgccgcaataagcgccggacaaacaattacaatcaccgaagcaatcaatgtgtatcgggtcagtttggcttcttccactttcatcagtgtgcgtgccccttcatataccacaaacacggtatagaactggagtatccaatgcaaaatggagattgagaacaaaccgctgataatatcaagcacaaatgtcaccaccatggcataacccacaaactgttggtttagttcatactgttcgcctcggttcagcaatttctttcccaattgatttacagcataagcagccaagaaatatcctccaaagagagaaacaaaaatggcgcaacaacgggtcattgctatctgaaaagcagatacacctgctgtatttccaataaaagtacctataaaaacggacaagccgcacaatcctatcatgggataaacaaatgtgccaagcactttccgcctatcctcttctgtattgatttctgcccaagccttagccggagaggaaatcagcaacaccactctattaaataaatctttgtagttcaatgcttaatctatttacctttgttatacttcaatgagttgcaaaggtataaaaaatccccttttcccaaagggaaaagaggacttttctacttgcaatataatgatttatcagtatccgtaaggagctctaaaatctttagtagccattcttacttctttttttacataattttcaccacctctatcctgcatagctctaagaactacatctatagaatctgtttcagagaaatggctataaagttctgacgagaaaggaaaactgcataatgcacgagtagaattataagaatcgctttccccattgtcataatggaatgtcaacgtcagtttttcattatcaacaatatcctcttctctataactcatattaaaataaaaaggtgaagatgagttataattaaattgaggaataaatgttatatatcccttgtaaataccaactcccccataaaaatcgataataggatcttgattcttatacaaagtatcagctgcttctacatctctcgtagtattaatcatattggtacctccatataatggagtagcagaaacaatttcaaccttatactgtgtattttctgacggctcaggcaacacttcatccaaatgtttaaatgccacttgagcacgcttcaccttactccaatcaccaaactgtttcatattagcagctgtaggaaccaagattccacctccatctgcgtataatttatagccaagaaactcatcacctgtaacagttacaagcaatataccgtcataagcactttcactgttagtgtccaagcaagaactaaaggataacacagataccaatgcagcaaagaacactgccaacttcatttttttcattttcttctctttattattagggtttgcaaaattaattaaaagattcgagtcgtaaagggaaacttcaactcttttttgttgttttaatgattaaatgagctccaaacccaaatactgcacaacattctttcatattaacctttattaatacataaacaaactcactccactatttcagcaaactgttctatattattatccacatactcggcaatctgtgctgtgacaagttcctccatatccataaactgctcttccagttcatcaaatacctcgtattgctcatacattgccataaattcttcatcatcgcagtctttttccaagtctgcacggttttcatcataaattttcttggcagtataaatcaactttgagaattccttcgccccaaaaagacgcattgatttagcaaaaggattatcaaaaagatacggtccatagccattttgaatcaactgaataaagcccccttcattaatctcttcacgaaaaaaatgatagcctagcaaagaatgttggtaaccattgagcaagggcattgtttcagcattaatcacaccgcccgtcacttccaaatacttatcggtaaaaactttaataaattcgtccataccttcctcagcaccctgtcgaagcacttcgtccttaatttctattttactcgtttccatctttatataatatatataggtacaaagataagtgattcggtggaaagaaaaaagattttggcaactctagtttgcaaaatattgtctcacaataaatttatttaatttaatatcaaaaagtggcacgcaacaggttgcagaaaagaataaaaggactaactttgtaggcgaaaaaggtaactaacctttttcacgtggttacgaatatttattttattaccaaaaaacgtaaagaatatgacttattcacacgaagtagaacacatgtgtgttgtgaagaaaggtcctaatcacggaccggctcctattcctgaagaaggaaagtgggtaaaatcaaaagaaatcaaagacatctctggtttgacacacggtattggctggtgtgctcctcagcagggtgcttgtaaactaacccttaacgtaaaagaaggtatcatccaggaagcattggtagaaactatcggttgctcaggtatgactcactcggctgccatggctgctgaaatccttccgggcaagactgtattggaagcattgaacaccgacttggtttgtgacgctatcaacacagcaatgcgcgaacttttccttcaaatcgtttacggacgtactcagtcggctttctcggaaggcggtctgattatcggtgccggtctggaagacttgggtaaaggtcttcgcagccaggtaggtactttgtatggtactttggctaaaggtccccgttaccttgaaatggctgaaggttacatcaagaacgtattcttggataagaacgatgaaatctgcggttacgaattcgttcacatgggtaagttcatggacgaaatcaagaagggtactgatgctaacgaagcgttgaagaaagttacaggtacttacggacgtgtaactgaagagcagggagctgttaagaaaattgatccacgtcacgaataattataaggaggaaagaatatgattagagaagtaaaattcgaaagccaagaccgtcgtatcaaacagatcattgctgctttgaacgaaaacggcatcaaagacatcgaagaagctaacgcaatctgcgaagctgccggacttgatccttataaaacttgtgaagaaactcagcctatctgtttcgaaaatgc

SEQ ID NO: 6700 - DNA, 102728 bp, Unknown
  gut microbiota DNA sequence
ttctgtagccgacgaccgtaaagtaggtatcggtcacggtaacctggctgctatgttgctgcgcgaagaaactaaatgtttcgcattcctggcaggtcacgaatcattcgctgctgccgaaggtgctatcaaaatcgctgcaaaagcagacaaagtacgtaaagaacctctgcgttgtatcttgaacggtttgggcaaagacgctgcacaaatcatctctcgtatcaacggatttacatacgttcagactgaattcgattatttcacaggtgaactgaaagtagttcgtgaaatcgcttattctgacggtcctcgtgcaaaagtaaaatgctacggagccgatgatgttcgcgaaggtgtagctatcatgtggaaagaaggtgtagacgtatctatcaccggtaactctactaacccgactcgtttccaacatccggttgcaggtacttacaagaaagaacgtgttcttgcaggtaagccttatttctcagttgcatcaggtggtggtacaggtcgtactcttcacccggacaacatggctgccggtcctgcttcttacggtatgacagacactatgggtcgtatgcactcagacgctcagttcgccggttcttcatcagttcctgctcacgtggaaatgatgggattcctgggtatcggtaacaacccgatggtaggatgtactgtagcttgtgctgtagacgtagctactgctttgagcaagtaatataatacattgctaacatataaatccctgtaactgataaagttatggggatttttttattttatctatatggcataaatagatgatacttcttccctattctactgctttgttttcttctctactctctttataaatcatggtgattaggtgattgaattgtggcaaattgaccttgaatttatctgtttaaagatggatgatggtgtggctgattatcctctaaattgggtaaaaacgaggttatattgtgaccaatttgtgaccattttcttgttttctgacaagtggtcacaaaatcatagataatcatctaataaatagaaagatacatcacatttaaaggacttccaaatgtctaattttaaatgattaaacaatggtaagaagttcattttctattctcttttttataagagaaagtaaagcaagaagaaatggtagtgttactattgaagctatgattactgtaaatggtgaaagatgctctttctccacaggtaaacaagtggctattgaaaaatgggataagaacaaacaacaggtaagaggcaaagatgaagaaactgtaagcctcaacaattacctaaaggcagtcaaagctaaactgtatgggaaagaagctgaattattagacagaggattcgttattacagctcaacttttatatgatgcttactttgataaagtagcgtgcttaaaagaaagaagcctattaagtgtattagaagaacacaatgcagagcgtaaagcaatgattaaaaatgaaaacatttagattaattggaatggctttatttgccataatgatgtgcgtaaactttacagcttgcagtagtgatgatgatgaagagaattttgaaagttcattgataggaacttggttttgaagttgacagtgaagaagagcagagatgctatacattcaattctgaccatactgtgatttgttgggcaaataattatggtgcggaaggcgagaaattcaatcttacttggagcgcaactaaaactcatgaatcaaatgtttcatagctataaaattttaatgtttaacacatataaggataaccattagcaaagatgatacaaagcaaaagaaacagaatattaacaggtgtaattccgcacaaaaattgctttatatacctactctgaattttagcaccgctataaaatatcagaatagaaatatagcttatgcttgaatattgaacaaacggaaaactatactatatcagtatatacaatatcattacatagataaaaaagtgattgaaacaagttcaacttatcctcaaacagtattgttaatacaaatagaatcactacatttgctatattaaaaagcagaacatatgcaactgatagagaacaatattcataaaattatagacctatgcaaaaagcataaggttcacaaactgtttgtgttcggttctatccttaccaaccgctttaatgataaaagcgatgttgatttagtagtggatttcaataaaaaagaagtagaagattactttgataactactttgattttaaatactctctggaggaattattgggcagagaaatagacttattggaagaacaaaccatcaaaaatccatatttgaaaaagaatgtggatgccactaaaactttaatttatggatgatttaacaaagaaacacctacaagatattctgactgctattgaagaaatagaaagtttcttcggcagtgagccaaaattatatgatgatttttacagtaatctttgccttagacgtgcggtagaaagaaacatcgaaattataggtgaagctatgaacaggatattgaaagctgataaagacatagctattactaattctcgcaaaatagtagatgcaagaaattacattatacatggatatgacagtttatcagtagatatactttggagtatgattattaatcacttacccaaactgaaaaatgaagtaactacattactaaattcataaggtttgtgacttattcacgactacttaacaatataacagtaactaataactggagagttcttttaaatacttgaatatctaactgtaacacaataatttatgagagattagaaagaggttacagggatgctgtatcgccacttcttatggtatgacagacactatgggccgtatgcactcagatgctcagttcgctggatcttcatccgttcctgctcacgtagaaatgatgggattcttaggaattggtaacaatcctatggtaggttgtacagtggcttgtgctgttgacgtagctcaggctttagctaagtaagtaatttaagttacttttatataaggagagcgcttctttgggagcactctcctattttagtttaaaacaataaacatttggaaaagcgcttccattcatatacttataaaaaagatatttgagcttttggctcttattctctcaatctgaaaatcgccaatttgaagtcctgagaataagtagatgaaggttcacgctctatcgggcgtgaactgttcgtacttatttatggacgaaggtgcttggcggttcccaactaactacatacagacaaaaacaatatgtataagatattgcgtaaatctcatattgataccgagttattatgccgtataccccaaatattgaattataacttttgtcattcatttatttcacttatggcaagacgatattatgcctatttctaaatatatacggatggtataagttcatcggattagacatccgaaagtatgattaaccgaaaagaattatgtatctataaataaaaacgaatagactttaacatccgtatagttcgttacagtaagagccagctccttgttcatggcgataggcgtaaactccgtttcaagaatgtacgtgattgccgaaatccggcaaggagagaaattcggctgctccttgccgttgtccagacggaagaaactcagcagggtgttgagcatttcgcgcatacggtcggaagattaccggatattacggacatatcgctcttttttatccgtatcattctcttttcccatcaacgcggtataaccgattattgcgtttaaaggtgtgcgtagctcgtgggtgatggtatgtaccgctttcttgcgggaggttatcagtgcctcgtttttctctaccgcttgttatagctgtttgattaaatttgtcgtttcccgtttgtaccgcttgatacggttagtatttcggtgaattatgatatatgaaatgaccaataacaagaagacaaatcctgtcaagccgccgatttgtataaatgactgctcacgcatggcggctatctcagcttttcgcttttgcaggtcggcttgtaccttactatctatctggcgaatcaagccttgtaattgtcggttaagttctgcattccgtgcagcaaggctgtcagcgtgtactgaaagacggtggctttgccccctttgctctgctatcatattccgattgagggaacggagcatcgtagtggtcaccgtaggtttcacttcctcctttttgccgaagattcccaagaatccttttcgtttcggtttcttgggctgttcctgtacgcttttctgcacgattgcaggtacttggtgggcaattttctcattaaaggcttgctgttcatcaagtagcttaactataccgcgcatctgctgttccttgtcttcgagaagatagcgtacactgtcaatatgctccgccggatagatagccttgaaacagcagagcatactgtccattgccatacgtctaacgcggtaatgttccaaatcttcatcatcccatcccaacaccgtttcacccaatagagaaaaccctattagccgaatgtagatattatttatatccttccagaatgcatcagtttacaggttatagaattctaacgtttccatctcctgccattcattataccaaatataaacgatacagctaattaataacgtaattaatagataaccggaagctattattcttcgaattaatatcatttattttgttgatttacaagtatgactcatttttttataattacaaaatactctaaacattataacaattacaaaaagaaaatcatcgaattgcccctaaatactattggaaagattacgtatgtaaccattgaagattttttataaaatccacaaaacacttcaaaccttctgtcagtgtattacgcgggcaggcgatattccagcgcatgaacccttcaccctccgcgccgtacatcgttccggcattgagccacaatccggcttcggcgaccaatcgccgttcgagttcctccgaggacatacaaagtttgcgacagtccatccagacgaggtaggttccctccaataccgtaacaggaaattccggcagatgctcacggcaaaactcccgcatatagagataattggcgtgcagatattcaataagttggtccaaccattcttccccttcattataagctgcttgtgtagcgattaccccgaacggattgacatcgcatacctcattgtcgttgatggcccggtcgattttcgcccgacagccggcatcggcgcagacgatgtttgcaatttgtaatccggcgatattgaacgccttgctgggagatatgcaggtgacggaatgccgcaggaaatcttctgagacagaagcaaacggcgtgtaacggtgttccggaaaaaccagttcgcaatggatctcatccgaaacgaccgtaacgccatgacggatacagatttctccgatacgtaccagttcttcgtgcctccacacccttccggcagggttatggggattgcacagcagcatcaccttcactttcggatcagcggccttacgctccaggtcttcgtactcaatcgtgtaagtattgtcggcaaagcgcaaaggggatgacaccatttcacacccgttattgcggatggacgaaaagaaacagttatagacgggtgtctgcaccagcaccttgtcacccggcacggtcaacgccttgatgattgccgataccgcaggcactacgcccgatgtgtaaattatccattcacggtcaatcttccaaccgtgacgttgcgcgaaccagcccgtaacagcctcatagtagctgtcgggcacacgggtataaccgaatatgccgtgttccacccgtcggcgcaaagcatcgacgatggcgggggctgtacggaaatccatatcagccacccacatcggcaatacatgttcactctcggcactgtcccatttgtaggaaccggttccccgtcgcgaaatctgtttatcgaagtcgtatttcatatcttcgccttaatccgtaaaacaggtccgttcgtcccggagtcggatttcacaatcggcgggagccttgatgttctcgtctatggttattgaaccgaactcgtcggccacgatgcgtcccgacatcgggttcttgatattcgtgatggctccgcgaatatcggcttgcaaggtgctgtactcgaatgcccggtcacaatccggtccgaaggtgcagttctccaatatgaggtcgtgagcgtagcagagcggctgttcaccggtgatatgacagttgaccagacgcaggttcttcgaatgccagccgaggtactctccgttgagttcggaatcatagatagtcacattctccacttcccagaacgcatccttcgttgtaatcttggcattatgaatttccacgttcttcacgtactggaatacatatttgctgtcactttccagtccgtccacataaatgtcgttgctgaacatgaaaggataagtgccgccatgcagtttgaggttcttgatgcggatgccgttgcaacgccagaacacctcatcggcatcgttcatcgttacgttctcgatgtctatttcgttcatctcgcggaacatcttcggcgcgtcgataaccgtatcggtcattttcaggtggtcgcaataccacagggccgagcggcctccgacatcgaaataacaacggtcgattttgaagccatgtacatgccagaaaggataattaccctcgaaacggcattcgaacgcttcgatgttgctgcactctttaatggccgattctccggcacggataaccacattctccagacggaggtcatgggattcgaacaagggacgttcgcccccgaactcagtatctttaataagtttcatttgagatattgttttagttattactggtttcaaaagttacggtcacattgcctcgtccaagagccgaagccagccctgacggattatcaagccgtcctaaacggatgtagctgtaagacgaagagaacgtttcatagaaaagaacgagacaattggaaccgtagagcatcaaatccccgttccggattgtccccggccggttactgtctgtgggcagattctctgacaggtaatggtatttctcgttaccgttcatctcgttcatcgttaccgtcatcggcagcagagcggtaaaggcacgtgccgtggcattgtcttcaagtgttacggcgaagctgcgaccgcctacacggactgtaatgtttctgttcatttcgttttctccttcattattttcatgatttccattgccattcccgctatcgtcatttccgtttccggaattgtcgttgttgcccggttcttcgggattaggaacgggagtcaccggattttctgttataggttcatcgtcaggactgcaagcagtcagtacggatgtggctgtcacaagcagcaagaccatgacaataatacatctgttcatatcttattctattttaagatttataattccgatccccttttataggctttttcaagatgctcaggtactatttgacgggctatattctcacaccccgtacaaccgcctgccagataagtaccgacctcttttcctcccaacacgccgctgatgatatggaaataactcaaagcctggtcgaaaatatgctcgttattgtctcctgcggtcataagcagcacggtttcgtttaccttatcgctcttcgggaacgtcttgtcccattcctgtgtcaaattcagttcttccatatttctgctactttgattgttctgttccgtgctttccgtcagaccgaaaaggcagaggaaagcggcagttaaaattgttatgcgtttcataatcgctgtggttttgatgttcattgttttttgttctcttttttctttgcaaagttacaggagattacagagaggcttggtagatggattacagatgttataaccccaattacagaagtctgtcgtttcatacctttttcatccaccgttcccgtttcaggcggacaaggaaaatcataccccggaaacacaactcgacgcacatggcaatccatacgcctttcagtcccaacgtaggagcgagcaatgcggccaatgacagacgcaccgcccagatgctgaaaaaattcatcaagcatggaacaagcgtgtcagccgccccgacaaagacaccgtaagcgacaatcgaagctgcaaacatcggctcggcgaacgcctcgatgcgcaaggccatcacgcccaattcccggatctccccaacgggtgtcatcaatccgataatctggggcgcgaacagatacatgagtacacccatcaatcccatgatacccattcccatcaatacggtgatgcgggcgaaactgcgtgtcagcttccggcgaccggcaccgatactctgtccgaccagtgtcgtggcggcatccgcaatcccgtaaccgggcatatagcaaaggctctcggcggtgatggcaaatgagttggcagcgatggcgaagacacctaacggtgccacgataaccgtcgtcatgatttgcgcaccgcaaatgacgatatgctctatacccatcggaagaccgatatgtatagcctttttcaaggtcgctgtcctcggccggaaactcccttgctctcccgtcagtttcaattcatcggaacgcatccaaagataccgcagcaatatcccggcaaccaccgcttcggcagcagccgtacccaacgccgcaccttccactcccaatccggcacccggcatcgtgaaagagactcctgccacgtgccattcgcgtgaagggaaaatcagaaaaaaattgaaaacgacatccagtatgcacatcgccacacctaacaaactcggcatgtgcatattgccactacaacgcaacataccgcctgcaaggaaattcatctgtaaggcaggaaggaagagcgaaaagataaagaagtagagcgacgcatcccggtggatggaaacatcacctcctaaccaaccgggaagcataccgctgattgccgcaccaagtacggctaataacaggctgaaaacaagtgtggcggtcaatgattgccgcaacacggcacgcgccccctgcatgtcgcccgctccgattctgtgcgccacctgtacggagaatccggtggcagccgccacacacagcccccaaaagagccatgtggtcgtcgataccagcccgatggaagccgaagcctcggctccgaggtgtcccaccatcgccgcatcgatatactgcatgacaatggaggaaagttgtgcgatgacagcaggaacgctgagcagcacggtcaggcgtagctgttgccgcagcgtcatcggtttaccgtcacggattgacgcaagcagggcgtttgttttgtcaacctgtgtcttcacccgttctcttctttgatgagtttgaacacctttccgtaagtgagcatccgccaaatccattccaacggaccgaattggcagaagtacaaccagacactactgaacagtgcctgtacaatccatactccggcagcaatcagaactacataaaccaatcccacaccggcaccaaagccgaacccgatgccgtagaaaagcaacataccgaataccgactgcccgatataattggtaaaggccatgcgtcccggcatggcggagaaacggaaacctttccattgcggacgccgaaggtaacaaaggcatataccggccacgtaggcgaaacccagcggaaaaacgctggtgaaatagagtacggcgtgcgtgcccaatttccacggacgaccattcatcgcactccacgcatagatgaacgacagcggcaccccgacgataaatccgtaacaggcgatgcgtttcagttgcggcatgaggccggtcaaatcggcataaaggcggttacgcccaatacaaaagcccaacaggaacagtcccgtcactttgaagtaacggttcccgtcgataaagatgtattgcagataacgcacgatacggtcgattccggccgtaggcatgacatccgcagcttcaaccgaaagaaaggaatacaacgaaaactcagggaagttggccagcgcgatacccaacagggccaatccgcgcagcacgtccaatatgacataccgctcggatgacctgacagggatggctgtatggttggttactgattccggttccataggctattgcttttcgttcctgtcaatgtttcggatatgccttgccggtacgcctcctacaaccgtgttggccgccacgtctttcgtcaccaccgatccggcggcgataatggcgttatcacccacggtcacaccccgcaggatggtagagttggagccgacccacacgtttttgcctaaccggataggggccggatacatcgccccccggtcttcgggagccgtgccgtggttgagcgtggcgaacaccacattatgcccgatgagacaaccgtcgcccaatgtcacgccgccatgatcctgaaaatggcaacaggcgttgatgaagacgttgcgcccgatggtgatattcttgccgaaatcggtgtagaacggaggaaacatcttgaaggtctcgtccacgggtttgccgagcagacgcgacatcaacacacgcaactcctcctgtgaatggtacgagttgtttatatcgcaggtgatgcgccgggcttcgtcgctcatttcgtccatcagccggtaaatttccggcgtattgagcgcaccgccggcctcgatatgattcagaaaatcgtccagtgtcataatcctctcctttccttataccagtttccccatttcgtatgcctcctgcaatttcgggtttcctttgatttctcccacatgccatactccgccgcaaaacagggcccccttcacagtcggattttccaggcagtcaaggaatcccatgaaattggcaacaacgcgatccataatcgcttcatcctcttcggcggctgtggctataaaatagaatttcttgttactcatctcggtataaggtccgcagcaacggtctatcatcattttcatctgtgcgctcatggcatagaaatagaccggtgtgcccattacgatgacatccgccgcaagcatctttccgatgatttccgcagcatcatctttctgcggacatggctttttatcccggctgcatacgccgcaccccgtgcagggatgtatgttactgtcgcgcaggaaaatcttctctacccggtttccgctctctatggctccgcgcatgaattcatcgcagagcgtgtccgaattgccgccacgacggggactggacgataaaatcaaaatattcttcgacatggtttatctgttcacttgtttttcaagtgcaaaaatagcgggaaccataagacaggacggtagatgaattacagatattataaccccaattacataatttccggggagaatgtgcgaaatctgtatctgaggttatattatcagtaattgaggttatggcaaaatccgtataatcctctacttttgtgtgatgaaagaaaagagaaaatgaaaatacagagatatggataaaatactcaatttagacaatgtagaccagtacaatcaactgtacggtatcgaaaccctgcacccgttggtcagcgtggtcaacctcaatgaagcgacatgcggggtggattttatacgcctgaactatggtctatatgccctgttcctgaaattggaaaagtcctgcgacatcaggtacggccgccagaagtacgactacgaagaaggaaccattgtctgtttcgccccgggacaaacggccgaaacgacttccacggtcacaaacattcagacaaatgcctacggaatcctgttccaccccgacctgcttcgcggcacatcattgagtaaaacgataaagagctacacgtttttctcgtatgaggtcaatgaagcgttgcacgtatccgaagaggagcagacaatcatattggactgcctgaacatcatccggaaagagctggagcatggcatagacaaacacagcaaaaaactgattgccacttatatcgaattgctgctcggttactgcatgcgtttctacgaacgccagtttatcacgcgcagcaaaagcaaccgggatgtactgacccgtttcgaatatctgctggatgaatatttcgagggagctgccgccgagcgtgacgggcttccctcagtgaaatatttcgccgacaaattatgtctctcgcccaactatttcggagacatgctaaagaaagagaccggtaagacgccgcaggaatatattcaggagaaagtaatcgaaatagcgaaagaccgtattgtcggcacccgagatactgtaagccaaatagcatattcattgggattccaatatccgcagcacctgtgccgtctgttcaagaaacgggaaggatgcacaccgaatgaataccgcgcaaggatgattagctgaaagggcagatgaaagaggagatgaaagatacgttggacataaagaacgtgtgcgaatgcaaccgccgtttgggatgcaagacactgcatccccaagcaagcatcatcaatctggaacatccggatttggaacaggaggccgtgaaattcgagttttacgccgtgctgcttatcgaggaatgtacggacggctgttattgctgcggccgcaaatattacgactactccaatgccacgatggtatttctcaagcccgggtatacgtatccttatacatacgtatgtgtaaaaaccggcttcctctcacacggttccgtattgttctgaaaatctttattctctgcgaaaaagacaagtatgttttaaaaaaggaacaagtcatctcactcaaaagatgcagggcgtgacaccaaaacttggtacaagattttgtggaacttgatacaagatccaacagaacttgcatcaggattccgaacacttcgggcgaggaaaggcgtagcattctcataccctcacctttatcaccacttccttgataaatacaccgtttcaagggtgagaaatgaagtgagagatacctcaaaaggtgagagcagttgctctcacaagaccccaaaatgtcctgttccgcatccgggaaaaatattattcacggataaagataataattttaatctaaaaccatgaattataatcaaactactttatattctataactggtaaagtgttaatgcttccaggttggcatggatatttctattggaactatggtactaaagagttgaactttagagatggagattatcatttagatggtaagttatcgacaacatattccgctaaagtagaagaaacagcatttgaggaaactcttatgctgctttcttttatctcttcattaatttaatatcaaaatatcgcagctaagctattacattttaacaagaatgattacctttgtcttaaactcataatcaagcaaattatggaatatatcaacgattttcacaaagaatggatagaacgtacccgccaatcaataacctcttggagcaaacagcctgcatcaccagaagaagtaaggaagcagcaggagaaactgaaccagcagagggctataagagagggcaaacagaagaactgataaagtttgccaatgacaacagtctatggattgacttatcacgcctcaacattacttatatggatagaggtggtgagaatgaagtgttccatgatggtaatgtgtctgttgtcaagctaaataactttgaatacgcaggggatgatttggagaacttcttcatccgcattacagcacataataagttctttagtaatgtcccctatcaaatgataggcttcgcttataacagcctacaagagttctgtgctgttctcacacaaccttatatattggctgaacgggaagctacggaagacgagataaccacctatatgcaagcacttggctttgaaatggactattacgacgaataccataattcggattatgaagtgtttgatgcagttcccaataatgtgctttatggcatagacggagatttatacttcattgacacgcagattagattacggtcttaactctattaggagtactctcatctaaagggtaacgcataggcatttgcccatgatgcagccctttttgataattcgttcttttatttactaacaaggagtttacccattgctattatagcattgattaataacagcttgcaaagacttacagggatgctgtatcgccacttcttatggtatgacagacactatgggccgtatgcactctgacgctcagttcgccggttcttcatcagttcctgctcacgtggaaatgatgggattcccgggtatcggtaacaacccgatggtaggatgtacagtggcttgtgccgttgacgttgctactgctttgagcaagtaatataatacattgctaatatataaatccctgtaactgtaatggttatggggatttttgttttaatactccactttcctgttatctgcttatgctttcctatggttcttcgtcttatatcctttgtcagagacaaaccgttcaatattgctttgccacgtgggtggttaagcctagtcacctacgtggttaacattaaccacccacgtggttagacttaaccacgaccgtgacgaagtagctccgtacttaaatgacctacttaaacaacgaacgcatgaagataaaagcatatacttattagaacttcatagctccattaaccgattcctcccccaattgcaaatcatctattagtacatcaaacaaattcttgtttaataccaatacattaattatatttgcagcaacttagagcaaaaagaatcatggaatggcagaacacaaagccacagaaagctaaattatcaaatagatgtatgaccgggctttaaaatgaattacccggatgagtttcattatgaaacttatgaaatatgctatgttattcctaacaatgtgctttatggtataaataatgatatttattttgttgatacgccaatcagattaaaagagtaatagttcttatccgatttgcatgttctcaatcccatcagggatttctcttaacagaactgatattagtagttaatctataatacagtttttataatgtataataaaagaataaacatttggaaaagcgtttccattcttatacttattaaaaaagatatttgagcttttagctcttattctcacagtctgaaaaccgccaatttgaagcacacgagaataagcagatgaaagtttacgctctatcgggcgtgaactattcatgcttatttgtgtgcaaggtgcttggcggttcctcagactgaaaataggttatgaatggttccgcctttttttattgcactatgatacacatcggaaaacttatcgaagaggaacttcaccgccaagaacgctccgttacctggttcgccaataaactttattgcgaccgaaccaatacatataaaattttcaaacgacaaagtatagacaccgaattgcttttacgaatttctcaagtcctatacgttaacttttttgaatattattcgcgagaatgccaaaaccgtgaaaaacaatcaacacttatgtagtattcttggctacgggaataataactacttcacacaagaaagacatacctttgccccggaatcataaatatagaaatcatggaaattattatcggactcattattgctttcatcctattagcttttttatatggcatactatgccttatcattaaaaaatggccagtgttgatatggattgtcggcatcggaggcggagtcattcttgctataatcacttcctggtggataggagcaatcggaggtttcatcctaattggtttcttagctgcggcagaggcatcgggaggtcataaatgcgctcattgcggaagctatgacacagatgttaccaaaaaggaagacggttttgaatattggcaatgcaacaaatgtcatgggataacatacgattatataacaaagtaaccgccttccgcaaatgaggtttacacaacttcaatattgaagaaaaaaacaatattataaaaaaacatcatagattacagatattatatatcgaactatgacagctaacatcctataagaaccatgcaaaagaaagtcttcagatacgaaaaagaaaaaagatgcacctgcacactttacatgacggaatcttgcaatttgaattgtgtctattgctatgaacacatcaaaggcaaagctattataccactagagattgctcaagaagccataaagtctaccttcaaacgtgctgtaaaagaacagataaactatgttgaaatattattccatggcggagaaccatttatggcatttcaacatatcaaagtgatatgcgaatggctatggcaacaagcatggcctactaaatacatttgttatgcaaccactaacggcacccttatacatggagaaattaaagactggctcaacgaaaataaagaaaaattcattgtcggattaagcttggacggaacacgtgaaatgcataatcggaaccgttctaattcttacgataagatcgatataaacttctttaaagacaattggcctgaccaaggtgtaaaaatgactccctctcccggcaccttatcttcattggcaaaaggaattatctatatacatgaattaggattcaaacgcaataattgtacttttgccagtggtgtagagtgggacaaagacgaatttagacaaaatgtagattacaagaaaatattacaagagcaattaatggaaatcgccctgtactatttggatcatcctgatatacaaccggtagaaatgataaacatgaaatttatagccgtggcagcaggtgtgaatagcatggtcgataaattatgtggagcaggtacaatcatgcgatgttggacaccggacggtcaatgtctcccctgccatttattctatgaagtaagtaaagaaaaaggagaaaagttagggcacatagatctgtcttctccttgccatctatcagatacacgatgcaaaaattgcattcttgagcctatatgcccaacttgttacggtggaaattatataacttatggtgatgtaacaaaacgtgatccatacacgtgtgtaattactaaaatacgtgccttagccagttcctggatgataggtcaaatgttagaaaatcctgaaaagttccgagctttaagcgagcttagcaatgaagagttggcgatgactgccaaaggagtgatattaacgcaatccttcttggaagaaacaggatttatgaaagaacttcagaacggttaattgtccttccctgaaataggacaaatcatttaaatacttaaattatgaactttaaattagctaatttgtcgaccattaatcaaaaatatggcaagacaatagaacaaatgaaggacgcaacttgggaaatatatgccaatagttgcggatgctcaggagattgcggttccaactggatgcagtcataaaacaatgagcgtgtcaaaagtcagacaatttatcttcaaggttatcaataataagcttaataatattatccaccttttgacacagctctatatacttaatcaactttaaatctaaaaacaaatgaaagagcaagcagatcgggctaatgatttcattgactttatagccaaaagtccaaccaagtatcacgctataaacaatataaaatcaaaactactgaaacacaatttcattcctttgtctttcgacaataaatgggaattgagcccaagtggaaaatattttatagagcaagacaattcagcattaatcgccttctgtatgagccctcacgattttaaagaacaatctctgttcgaggatgggatacgattagtatgtgctcatacagattcaccgacatttaagataaaaccggtggctcaaatgataaccacaccgggtcactacatgcaattaaatactcaagggtatgcatggcctatcctgtcaacttggtttgaccgtcctctgtcattagcgggaagagttgccttaaaaagcaagtctccttttaaaccgaccatacgcctaatcgacatacaagaccctatattattgattcctaatatagcttttcacctgacgaaagggaaaacagaaagcggcatatccaaacaaaaagaaatgttgcctataatgggaatggcaaatagagagacaaatgaaaatgagctattcgaacttatggccaagaaactgaatattgataaagagaatatccttgactatgaattatatctttatccggtagacaaaggacaactagtaggaataaatgctgatttcatagtcactccccgtcaagatgacttgataatggtatatgctgcttcagaagcattaataaattcccctgcaaatgatacaacaaagatgatagcttttttcgatgccgaagaagaaaccaattcgacacaaggaggagccgacacacctttcctcagaaatacgctaacaaaaatagtcaaaagcataggaggagatgaagaaaatctgataagactgataagccgttcatttgctgtatcattagattcttcttttgcaatgcatcccaactatatggaatgcagtgacccgacatgtactcctattatgaataaaggagtagttataaaatacgatgcaaatatgcattatgctacaacagctttttcttcggctgtttttcaggagatatgccataaaaacaatattccctatcaaaaagcagccgcaaactctgacttaagaacaggaggaacaataagtgcctttatgcaaacgcaagtagaaatgaactgcgtagaagtagggattcccacttgggctgtgcattctgcatacgaaagctgtggcacaaaagatttctataatttgattcgctcactgatttctttttggaatcagatacaagaataaggttaattgtccttccctgaaataggacaaatcatttaatttttttgattatgaatttcaaattgactaacctgtcagccattaatcaaaagtatggcaagacaatggaacagctgaaaggctcgatttgggaagtatgcgcaaacagttgcggatgctcaggtgattgcggttctaactggatgcgcagttaaacggttccagcaccaagctaattaaagggggatgtcaaaaccaaaatggtctatcacatcataaatgtttagacaccccccttaataaagtaatcttttataagtgattaataatatggaaaccgatataccaatcggagcaattatccccccattccactctccataaaaaaacaggaaatcttccgggccaattaatatgattttccaaataaattctttatatttgcaataatcctatggcgataaccttaaaacaatataatcatgaaaaagattctattactattggttttatgcctcaatataagtattgttctcgggcaggagtacaaggcatgggagaagcatgatatagaaggtatttatatcatggcaaaatctaaagacgaagcaaagaattataataatgtgctcagagaaggagccgattattatattcccaccgaacaagaagaccaagtgttgttcatcagagtcagtaaaagaatcactccgaaactttataaactaaaggatggagaaatgtatattctgttcagcttcccgccctttctttttgattctgacgaaggaatgatggaaataaaagggaataaagggatattttataaaaagcctgcactgtaaaaaccgatatatgattttcaatcattatctttacagggttcaaaaactccgtgaatatgaatttattaaataagttcatacaaaggatatgctcgataccccgatatggtcgctctagtgcggccggcacaaaatgaagaggagaaagttttaaaaaaacgattcaccgaaatggcagtcctcagcttcagtgtggcagctgtgagtttcttaatcggctatgccctgaaaacagttacaggaatagaagcttaagtaagctgcatcagtttacaatctttttcccataattttcatatatatcttaaaaaacatagaattccactgcactatccgaattattatactaattttgaacaaatttctaaccttaagaacaaaacttaatatgcaaaaattagcattcagtctattactatgctgctttacattacaaagctatgcaaaagtagaacctctgaaaggctttcattatgcctcggaacaagctccaaaagggaatgaatgggaatcccctgaaaatctggcgctgaacaaagaacaacctcatgcctatttcttctctttccaagataaggcaagtgcccggaaagtattgccggaaaacagtgcttactggcaatcactgaatggagactggaaattcaattgggttccaaatcccgaagaacggcccaaagacttttacaaaacagaatttgatgtctctggatgggataatattccggttccttcaagctggaatatttatggtatccaaaaagacggaacacaaaagtacggaactcctatttatgtgaaccaaccggttatttttcaacacaaagtagctgtggatgactggcgcggaggtgtgatgcgtacaccgcccagcaattggactactttcaaggcccgtaatgaagtaggctcttaccgccgcgaatttacgattcccgaagattgggacggaaaagaaatcttcattaactttgatggtgtggattcattcttctatctttggataaacggccaatatgtaggtttctcaaagaactcacgcaacactgccagtttcaatatcaccaaatatctggtgaaaggcactaacgtggtagccgttgaagtataccgcagttcggacggttctttcctcgaagctcaggatatgttccgtttaccgggtatttatcgcacagttgctttgcaggctgtacctcagttgcatgtacgcgacttggttgtaactcctgacttggacgcaacttataccgacggtgaactaaaaatcaatgcagatatccgcaacctcggaaagaaagctgccaaaggctattctatggtatattcattgtatgccaaccagctgtattccgatgacaataccgaagtgaacaatgccggcatctcgactccggtagctgtggtggaagccggtcaggaagtaacagccgaaactactctgaaagtacagaagcccaataaatggtcggctgaaaaaccatatctctatacattggtgggagaactgaaagataaaaaaggacgtacactcgaaactgtttctactcatatcggtttccgtaaagtggaaatcaaagatactcccgcatcggaagatgaattcggattggccggacgttactattatgtaaacggtaaaacggtaaaactgaaaggtgtcaaccgtcatgaaaccaatccgggtgtgggacatgccatcacccgcaaaatgatggaaaacgaaatcatgatgatgaaacgtgccaatatcaaccatgtacgtaattctcactacccggatgatccgtattggtattatctgtgtaacaaatacggtatttacctggaagatgaagccaatatcgaatcacacgaatattattacggaaaggcatctttgtctcatcctatcgaatggaaaaatgctcatgtggcacgtgtgatggaaatggttcatgccaatatcaacaatccatccatcgttatctggtcattaggaaatgaagccggcccgggtcaaaacttcgtagcagcatacgatgcattgaaagttgccgacaaatctcgccctgttcaatatgaacgtaacaacgacattgtagacatgggttctaaccagtatccttccatttcatgggtacgtggcgctgtgaaaggggattatgacatcaaatatcctttccacatctcggaatatgcacactctatgggtaatgcttgcggtaacttgattgattactgggatgctatcgaatctaccaacttcttctgcggtggtgccatctgggattgggtagaccaagctatgtacaattacaccaaagatggcaaacgttatctggcatacggtggtgacttcggcgatactccaaacgacggacaatttgtaatgaatggtatcgtgtttgccgacctggaaccgaaaccacaatattttgagaccaagaaagtataccagcatatcagcgtaaaagctattgatgaaaagcaaggccgcttcgaaatcttcaataagtactattttaaagatctctcggaatatgaaatcagatgggctttgtatgaaaacggcaaagaagcagaaaacggtgttctaaatactgaaaatatcgctccgcgtacccgccttcaggttacaataccttacagatataataatctgaaagcaaatgccgaatactttgtgaaggttcagtttgtattgagaaacaatatgccatgggctgaaaagggttatgttatggctgaagaacagcttcccgttaaaactgccacaggtatagctcctatcaatgaagtaacggacggaaacggaaagcctgtaatggcaaaacagtcagatccgcgtttctctaccatcaagggtgaaaactttgaagctaagtttgacaacgaaaccggaactatttacagtttgaactacggtggtgaaaccattatcgctgacggaaacggtccgaaacttgatgctatgcgtgctttcaccaacaatgacaactggttctatgccaactggtttgaatgtggtttgcacaatttgaaacatcaagtcacagcttctaaagttatcaatagaaaagacggtgctattgtattgttctacactgtggaatctcaggctcctaatggcgccaagattcttggcggaacttcaagcggcaaaaacagtatcaaagaattgaccgaaaaaccgtttggtgaagacgacttcaaattcactaccaatcaggtatggacagtttaccgcgacggttctattgaattgcaggcaagcatcacttccaatcgtcccagtctggtattaccacgtttgggatatgtaatgaaagtgcctcaacgctatgaaaattatacatactatggccgtggtccgattggaaactatcctgaccgcaaagtgggacagtttatcgaaatacacaaatctactgttgccgaccaatttgtcaacttcccgaaacctcaggatatgggcaatcacgaagatgtacgctggtgtgcattgactgacaaagccggcaagggagccatctttattgccacaaaccgattgtcgacttctgctttgcagtattcagcactcgacatgatattggcaggacatccttatcagttgccgaaagccggcgatacttatctgcatctcgacctcgccgtgaccggtttgggtggtaacagttgcggacagggtggcccgttgatgcatgaccgcgtatttgccggacaaaataatatcggtttcatcattcgccccgctgcacaagatttatcggctgctgcacaagtagctcctgccggtgatattcctttgaccatcactcgcggtcgcacaggtatggtagagctttcttccatcgacaaagatgctgctatcctttatactatcaacaaaggaaagaaggctaagcagtataccgaaccgatttcaatgcgtgacggaggtacagttacagcttggtttgccaataatccttctatcaagactaccacaaccttcaagaaactggaaaccatccagactgaagtaatctacgccagcagtgaagaagtgggcgatggagatgccaagaatctggtggacggtgaccctgctacatattggcacagtatgtactctgtaaccgtagccaaatatcctcattgggtagaccttgatgccggtgaagtaaaaacaatcaaaggatttacttacatgcctcgtcaggacagctataacggtaatgtcaaagaatacactatccacgtaagcatggatggcaagaattggggtgaaccggttcagaaaggaaagttcgccggcaacagagatgaaaagaaagtcatcttcagccaaccggtgaaaggacgctatatccggtttactgcattgagcgaacagtatggacaagattatgcatcgggtgctgaacttactattctagccgaataacaaattacgttccgattaataaagaaagagatgtgtcaaaatgaaaaattgtttcagttttgacacatctctcttttttgattaacttccatatctattctacgtaaacgaattggtacaattcaaccgattatctacattggcaggtacctacttaaacaaataaaaatgaaaacacacatcattatactatggattaccgcttttggaatgacagcctgccattcccgtccgcaagctgataccgctgaggagacaatcccacaagataccatagcgatactggactttgcctcagcaatcagcaaagaagttccagatacgttcacatggaacagtgtggcaaagaaggttacttatatccccctctcctcctcccatcttatggacggacaccccgcgataaactatcttggtgacgatatgtgcatcctttcggaagggaaggaacaatggatacatcgtgtagatttcaaaggcagctttttaagcagtttccgacacgtcgggaacggtcccggagaatatgtttacctatcttccgtggtctatcacccgaaagactccaccattcgcatttttgataacggaagccataaatacattatatatagtaaggaaggaaaactgttccgtgagattaatttggtcgattccgagttgaactacctgctgcatgcggaaggagacacttacttttgtagcggtagcttcagcaatgggaaatcggaaatcatcgtatcggacacggcactgcgagtgaagtcttccattctgccctttgacccaactgacgattacgtcacacggggaggcatcatgctgacaacaagcgtacagcggtgtggccccaaactttgcctgttcaatcatatttatagcgacagtgttttcctgctgactcctgacgggctgaaaccggaatttattctgcgcaaaggcaagtatgcaccgtctctggacgacgtaaagcagtttatgaagtggaataaaaatgattctttcgccaaaggcttctccatcaagacttttcccggatattacctcgtgcagtactcgtacaaagacaagtttttcggcgagatatggagcaaagagaccaaccagattgtttcaagaactgtcctgacccgacccgatatgttttcatcatacaggggaatcccctatcgtttcccttcgggcacaaccatcaaactattgccggcctatatcaatggaaacaaaatagctttctttattctggcagacgaagcggcaggcgaaattccgggcgtcaagataagcgaggatgataatccaatagtgatgatattggaactataatgattcgctttccatcggcttaacgtgaggacgcatcgttgatggctgcctccaactcatcataaccggccaaaggattgtcggtaaagacacttcggatggtcaattccgcatcaaccacatagatacgcggtatgcccgacttggcaaagagatggtaaaccgtccggtcttcctgagcggcataaggaaacgtgaaatgctgctcctgccaataaccggcaacagacgcggcatcttccgcccggctgatggctatcaaaggcatgtgtggatgatgctcatagatttgttgtatcacgggaagttcccggcggcaatctttgcaaccggtgttaaagaacacgatgaaggaaaccttccccctcaaactttcatgggtcactacccttccgccattcatggtgacgctgaacgcaggcaacttgtctcctgcaaccaactctatacttcctgtatcggaatcatcaccgtccgaaatacaagaaaccatcgccatacaactgcacaacgctataaagaatacactatttatcaactttttcatcgattttcttttctgcaaagataaaaggtttttcatgaaatcactacttttgcatcatgaaacaagaattgaaagaaaatacaggactcccctcttctctattatggatacttgccatcattgccggtatctccgttgccaatttatattataaccagcctttactgaatctcatcagtcatgatttgaaagtgtccgaattctctgccaacctgattgccatgactacccaaataggttatgcactcggattattattcatcataccattaggcgatttatataaaagaaaaacaattattctcatcaatttctcgatactggtcgtgtcattactcaccattgccacagccccgaatatctatatcattttgcttgcttcactactgaccggtatatgctctgtgatgcctcagatttttgttcccattgccgcacaattctctactcctgaaaccaaaggaaaaaatgtgggaatgattatctccggactgctgaccggaattctagcttcgcgggtcgtgagcggcatcgccggtgaatatatgggttggagattcattttctatgtcgcagctgtgttaatggtagtttgtgtcattatcattatgcgaatattgcccgatattccttccaacttcagaggcaaatacagcgacttgatgaaatcacttctctccttggtgacggattatccgcagctgcgcatctcgtccctccgtgccggcatagcattcggctcttttttggctttatggagttcattggctttcaagatggagcaagcccctttctttgccggcaacaatgtaataggcttgttgggtttatgtggcattatgggagctttgacggcctcttttatcggccggtatgtgcatatcctgggggtaaaacgactgaactatatcggttgcagcctcttgtttattgcatggctttcactctatatcggacaaaattcgtatgcaggcattatctccggcatcttactgatagatataggtatgcaatgtatccagctcagtaatcaaactacaattttcgcactcaatcctaaggcttccaacagaatcaataccatctttatgactacctattttgcaggcggttcattggggactttccttgccggaacgttttggcattggtttggatggagtggagtggtaggaacaggcattgcattgactgcctgctcactggtcatcaatatcagagcaaaaaaataaatcaggaatccatatcacttaagtgaatttccaatgccttgaccgagatataaatctcacggacagaaatgcccaacgatataatgagtaatataagtgccaaaccaaaaatataaaccgacaccatatacaactgtatgtacattaaaaacatactcaccacacataataacaaactgccaataccggttacttgcatagcacgggtcagataaagacgttttcgcaaattaatgatttgagcggccgtgactgccgaatgattctcacgatactggtctttcaacgtgcggacaagttgggcatacgacaaaaaacgattggtatatgccaacattatcaatgatatggcagagaacagcaaagccggagtggttaaatctatttccatttttcaatatttcaaagtttgtatgatgcaaagtaaagcaaaaacggatatctttgcaatgaaaccaaataaataatagaatgcaaaaagcaaacttgtacataaaagactggctgtctatccatccttatacccgtcagcagccctctgacaactattttgtgcaactggcaaaccgccttttccatatttgtcctttaaatgaaatacccgaggcatttaaaaagaaaatctgtctgtataccgcagcctatctggaagacgtcatttcgggattgggactttggcggtctttcgtcaacaaacattcggaactttatggaaccgcgctccccttctatacgctgactcccgattacaccaaagatgaaatcaatgaagaggatatacgtttcattatctggaacacgcttcagaaagctccctacccacattcttacattcatccgatggcaacttctatccggcaaactgccaagatgtttttcgagatattggatgaagaatacgaaacagcacctgcgaatgatgcattgacggagtattttatgaaattcagagacagaactgaagctgagcacaaactattatggctgttcggacacaattatctcaccgaaccctctgtacaggagtacatcgcacaagtaacagcttccgataaatacatcattccctgtggcccgatggcactctttttatatgaatggattgatttattaaccggtcatcaaaccgaaaactggcagcagatagaggggctttaccctgatattccaaccttgtcggatgagatgaagcaacgaaaccaaaacacttacgaactttttaccaaaggtacaaaaggagcacagatagtatacttgaacggctataaagaactgcatcatttcctgactcaagtattgcaatggccggatgacgacaatcatacactcccacaaatgaaaggaaaccggaacttcatcatgatggtcaatccggaaaaaggtattctattagccaatgatatatgcgaatgcatcaccgacccattaaacaacctatacaaccgggaagttgctgtcaaagaagcctttaatctgctgacagtgccaactaaatgtccaccggatttgctagaatatctaatcagccaccattacattcctgatgcacagttaccggaatatggagagaaagaattagtggaaaagaatgctgactttatagctcgtcatgcactattgtattactataggggagattaacttctcccctcccatttctatcaggaagcaaccacttcgttgaccaacggtctgccttctgcaaagtctttgacattctgtaaggtagtatgtgcaatatttgccatcgcttctttagtaaagaaagcctgatgcgaagtaacaatcacattattgaaagacaacaaacgggccaacgtgtcgtcatcaatgattttatccgatttgtcttcgtaaaagtactgcccttcttcctcgtacacatccagtccggcataccccactttctttgttttcagtccttcaatcagtgcattggtatgaatcaaccggcctcttcctgtattgataatcatcaccccgtctttcatcttgctgatggaataatcattaatcagatacttggtctgctccgtgagcggacaatgcaaggaaataatatcagaactgtgataaagctcctccaacgaacaatataccacttggtgctcacgggcaaaattataatcggggtaaagatcataagccaatatattcatcccgaacccacggagaatctgaatcaatatctttgcaatcttgccggtgccgataatgccggcagtcttgccatgcatatcaaatcccatcaacccatgcaatgaaaagtttccatcgcgggtgcgcatcgttgcacgaggtatcttgcgattgagcgaaagcatcaatgccaccgtaaactcggcaacggcatagggtgaataagccggaacacgcaccactttcatacggccgaccgtagcagtcaaatctacattattatatccggcacatctcaaagccagcagtttaacgccattatccgccattgcccggataacctcggcatcagccgtgtcgtttacgaagatgcagactacatctgctcctttggtcaacaccacattattcatattcagatggcccttatagaattttatatcaaagccaaatttctcattagcctccgtaaacgagcgttcgtcgtagggtttcgtgtcgtaaaaagcaattttgtaagccataatttttctatttactatttagtataataacaaaaatggcacgtgttgggttcaatttacaagtttatagtttctttagctccttatacaagcgctgtataggcaagcccatcacattaaaataactacctgtaatgccttccactcccacaaaaccaatccattcctgaatgccataagaaccggctttatccatcggcttatacttctgtacataataatctatttcctcttctgtcaattcggcaaaagtaacatcagtaacagtagcaaagcttttctgaaattcggttgtggtaagacacactccggttatcacttgatgagttttccctgaaaggcaacgaagcatacgcctggcatcctcttcatcttcaggctttcccataaccaaaccatccagccacacaattgtatctgcggtaataatcaactcatccgaatgcatggtttgccgataagcatccgccttttcacaagctataaagacggggatttcttctccagaaagagtatcggggtatgattcttctatgccgggtaaggtttttacttcataacaaattcccaaaccggatagaagctccttacgtctgggtgagttggaagccagtattactttatatttctccagatttttcaacatagcatacttaccatccaaaggctttttcgtgagacatccattttccttgcgctctcagtacttgctccaccacatcacgcccacaaccaaaaccaccattacgatgagaaatataagcagctatttcttttatttcaggagccgcatctgccggacaacaaggcaaaccacacaaacgcatcacttcataatcgggaatatcatcgcccatataaagtatttcttcatctttcaaattgtatttttctttcagatgtgcatattcttttgtcttcacagcagcacccagatatacatctttcacaccgagaccttcataacgtttacgtaccgcttcagtatttccacctgtaataatggctacatgcaaaccacatttgacagccagttgcagggcatagccatctttaatattcacagagcgcatcggttcgccattcggatgaagatagatggtctcaccactcaatacgccatccacatcaaacaccaatgcctttatcttggttaaatcataatttatcatatctatttctgtttataaatgcttttacttatcttttcatataattcctgcatatcaggaacatcagccagcaagtccaaatgccggttgattacattctcgtcataacgaatggcaggtcctgtctgggcttttgccggaggcagttcatgcactttcttagccgtttcatctatcagagacaacatcacttcaaaagggatatgatgtttttccagaatccgggcactcagtgcatacatgtgatttgcaaaattacaagcaaaaacggctgctatatgcagatacttccgctgttcagaggttgcttcgtataccttagggctcagttttcctgccagctccttcagcatctttaattctgtctctccaccggcttctacaaaaaaggggactgtggcaaaatctacagcacgctgtttactaaacgtttgcataggataaaaaactccgtaatgggataaatatcccttccaaatgtccataggcatactgcccgccgtatgtacaaagaaagcctgttccctgcctttcaccaacataggcaacaattcctgcaaagcagagtccttcaacgctacaatatacatatcggcatcacaccgaataccatcaacagaaacagtatattcggccgaaagtttatcagccaattccatagccgactcttttgtccgactgtatacttgcaccacatcacagcctgccccacacaacgcacttcccaaatgagtagccacgtttccggcacctatcaaaactatcttttttatcatcgggtagaaaccaaatataaaatcactcctataatcaacaaagctgccggcaacagataggcagacatttgtcccagcaaagttatcacaagaccaatattcaatattaaccagatgcctgccaaaacaatacctaccgacttgtcagttttaaaccataaaaaaataactgccgcatatagcaataagttatccttctgcatcacccaaggcaatccgtatgaagcaaagcctatcaacttatcaaccaaataaagtattcccattactatcaggaatattgcagaagccttataagtatccttatgatttacagccacttctatttacctccgtatttgttgatatgaactttttcccattgcaaatgctcttcattaaaaggtttacgctccatgcctttatgtccgacagcaataatagaaacaacctgcaactgcaaaggaatatccaatacctcgtgtacatattctccggaaggcatcccggtagcagtgaaacgctcgcggacctgcacccagcagcttcccaaccccaagtcttccgcttgcaactgaatcataatagaagctattgcagcatcctcaatccagacatcactagccaaagggtcagccattactacgatagccaatgcagcctctgccaggaaagcagcccccatctccttgcaatgagaaagtttctccaatgtttctttatcgtccactgctataaactgccaacaattactgcgcttggacgatggagacatcaacgctgcttttaataaagttacaacttcctcctgattcacttcctcgcctgtgaacttccgcatactacgcctgttctttattaagtcactaaattgttccataatcttttcagttatttatttttctgcacaaatatacaattagaatatggattgctaaacaaaaaataataaatttgcgaagaagatgccgataagactaaccacatatcgcaaaggaaattccattccggcattgccgggatatacaattttcaattctacggagctatttcgtgtgtacgaattaacccgtgggtatgaacctatactcatagttgcctatttagaagaacgtccggtagccaaactacttgccgtcatccgaaaaagcgtacgccttttcccaccttccatcatcaagcgttgtgaaatatatggcaatggagaatattttgatgaaactcagaatcgggaagaactcttcagctatatattagaacatcttacccatgaagtattgcaaaaatcttttctgatagagtttcgcaatttagacaacccgctatttggctacaaagcattcaggaaaaacaaatatttccccatcaactggttaagagtatacaattcgctacatagccggactccgttggagcgactgagtgtctcccgtaaaagacaaataaacaaggctttaaagaacggggcttatatagaagtggcagacaatgataaagatatcacactcttctccaaaatgctgaagaaagcctactcttctcaagtaagaaaacactttcccgatcttaactttttccgtcttttgacatggcaacgccccgacaaagaaatggcaaaaatctttttggtcaaatacaaagataaaattatcggaggatcggtttgcgtattttctaatggcaatgcatatctttggttttcaggaggcatgcgcaagacatacgcctttttatatcccggtgtattagcagtttgggctgccctcacctatgcccgggaagaaggatatgaacattttgagtttatggatgccggactcccattcaagaagcacggttaccgtgaattcatcctccgcttcggtggcaaacaaagtagtacccgccgctggttccgcttccgttggaagtggttaaacgaccttttatgccgcatgtatatttagctgcaaaacaattaagacttactttttgcttaacctgctatgaagcatcccttccaaaagaaataaaattgaagaaatatttctttatttagcccgaatttactttctttgtgcagttttatctgaaaaacattagaattataccaaacatttaaattataagatcatgaaaatctcacacatcgaacatttgggtatcgctgtaaagagcatcgaagaagccctaccgtattatgaaaacgtattaggcctgaaatgttacaacatcgaaactgtagaagaccaaaaggtaagaactgctttcctgaaagtaggtgacgtcaaaatagagttgctggaaccaaccagtcccgaaagtactattgcaaagttcattgaaaaaaacaatggcaacggtggcatgcatcacctggctttcgcagtagaagacggtgttgccaatgctttggctgaagctgaaaccacaggtatacgtttgattgacaaggcgccgcgcaaaggtgcagaaggcttgaacattgcctttttacatccaaagtcaacgcttggtgtgttaacagaactttgtgagaaaccctaatcggtgtgataaccgcagattaggaataacaatactctcctcaaataataacttaatcagtaaaacaaagatgagtaatcaacttgaaaaaattaaagagcttatcgaacgccgcgcaacagcacgtctcggcggtggtgaaaaagcgattgccaaacagcacgaaaaaggaaaatatacagcccgcgaacgtattgcaatgttattagacgaaggaagcttcgaagaaatggacatgttcgttgaacacagatgcaccaacttcggtatggaaaagaagcattatccgggtgacggtgtagttaccggttgcggtaccatcgaaggacgtttagtttatatattcgctcaggactttactgtttctgccggttctttgtcagaaacaatgtctatgaaaatatgtaaaattatggaccaagccatgaaaatgggtgctccggtcatcggtatcaacgactcgggtggtgcacgtattcaggaaggtatcaatgcacttgccggttatgctgaaatattccagcgtaatatcatggcatcaggtgttattcctcaaatttcgggtatcttcggtccgtgtgccggtggtgctgtttattctcccgctttgacagacttcacactgatgatggaaggcacttcttatatgttcctgaccggtccgaaagttgtaaagaccgtaacaggagaagatgtaagccaggaaaacttagggggtgcaagtgtacactctactaaatccggtgtaactcactttactgctcagacagaggaagaaggtttggccctgattcgcaaattattgagttatattccgcaaaacaatcttgaagaagctccttatgcagactgtacagacccaatcgatcgcttggaagattccttgaacgagattattcccgacagccccaacaaaccttacgatatgtacgaagtaatcagtgctatcgtggacaatggcgaatttcttgaaattcaacctcattatgccaaaaacattatcatcggctttgcccgtttcaacggtcagtctgtaggtattgttgccaatcagccgaaatacctggcaggggtacttgacagcaacgcttctcgcaagggcgcacgtttcgttcgtttctgcgatgccttcaatattcccattgtatcactggtagacgttccgggcttccttccgggtacaggacaagaatacaatggcgttatcttacatggtgccaagttgctgtatgcttacggcgaagctactgtgcccaaggtaactattacgttgcgtaaatcatacggcggttctcacattgtaatgagctgtaagcaacttcgcggtgacatgaactatgcatggcccacagccgaaattgcagtaatgggtggtgcaggcgcagtagaagtattgtttgcacgcgaagcaaaagatcaggaaaatcccgcccaattcctggcagaaaaagaagctgaatataccaaactgtttgctaatccttataatgcagctaaatatggttacattgatgacgtgattgaaccgcgcaacacacgtttccgcatcattcgtgctttacagcagttgcagactaagaaattaactaacccggctaagaagcatggaaatattccattgtaatcaggctttttacattaaaacaagaacgattatgaataaaactaaaatcggaatattcctttctctgctgctgatggtgggattaagttcttgtggagaacgaaaatcaaacagtaagctgttgctgaatgaggtgctgattgaaaatgaaagcaactttcaggacgactatggggtacatagcgcatggattgaaatattcaacaggtcatttggcagcgcagaccttgccggttgcttgctgaaagtcagtaaccagccgggtgacactgccacctatttcatccctaaaggtgatgtcatgacattggttaaacctcgccaacatgctttgttctgggctgacggtgaacccaaccggggtactttccacactaactttacactgaatgccgcaacagagaattggatcggtctttatgattcagggaaaaagttacttgatcagattgtagtacctgccggtgtattgagtgtgaaccaatcatacgcacgcgtcagtgacgctgccgaagaatgggaagtaaaaggcggaagtcccgaaaaatatgtcactccaagtacaaacaacaagaccatcaacagtcatgcaaagatggaaaaattcgaagaacatgacggtatcggcatcggtatggctatttctgctatgagtgtagtattctttggtttactgttactctttatttcttttaaattaattggaaaagcttctgtcagcctcagcaagcgcaatgcaatgaaagtaaaaggaatcacagataaaaaggaagctaaagaaaagaaactgggtgaagctccgggtgaagtttttgctgctattgccatggcaatgcacgaaatgcaaagcgatgtacacgatgtggaagaaactgttcttaccatcacccgtgtcaaacgcagttattcaccatggagttctaagatttacaccttgcgcgaaactccccacaaaaagtaaatcaccaaataaaaagattaaacgatgaaagaatataaatataaaatcaatggtaatgtatataaggtagccattggagatatagaagacaatatcgcccatgttgaagtaaatggcactccttacaaagttgaaatggaaaaggctcctaaagccgttgtaaaacctgtagtccgccctgtagctacaacaccggctgctcctaccacgacagttgttaaaccggctgctccttcctccggaaaatcgggtgttaaatctccgcttccgggtgttatcctcgacattaaagtgaatgtcggcgatgcggtgaagaaaggacaaaccatcattatccttgaagccatgaagatggaaaacaacatcaatgctgacaaagacggtaaaattaccgctatcaacgtgagcaaaggagaatccgttctcgaaggtactgacctcgtaattattgaataatatgggagaatttattaattttattggaaataaccttgccgatttctggacctatacgggatttgccaacgctacgttcggccatatcgtcatgatctttttcggcttgttatttatatacttggcagtagccaaggaatttgagccgatgctgctgattcctatcggtttcggtatcttaatcggtaatattcctttcaacatggaagccggacttaaagtcggtatctatgaagaagggtctgtactcaacattctgtatcaaggagttacttcgggatggtatccgccgctcatcttcctcggtatcggtgcaatgaccgacttctcggcattgatttccaatcccaagctgatgttgattggtgctgccgcacagtttggtatcttcggtgcatacatgattgcgttggccatgggcttcgacccgatgcaagccggtgctatcggtatcatcggtggtgcggacggtccgactgccatcttcctttcatccaaactggcgcctaacctgatgggggcgattgcggtatcagcctattcgtatatggcgttggtaccggtcatccagccacctatcatgcgtctgctcactaccaagcacgaacgtttgattcgtatgaaaccaccgcgtgccgtgtctcatacagaaaaagtaatgttccccatcatcggtttgttactcacctgcttcctggttccgtccggcctgcctttgttgggtatgcttttcttcggtaacttattgaaagaaagcggtgtaacccgtcgtttggcagaaactgcccgcggtccgctgattgacaccatcaccatcttgctgggattgacagtaggtgcttccactcaggcttcagagttccttactcttgactctatcctgattttcgcactgggtgcattgtcattcatcattgccactgcttcaggtgttatcttcgtgaagatattcaatctggtactgggcaaggataataagattaatccgcttatcggtaatgccggtgtatctgccgttcccgactcggcacgtatctctcaggttatcggtttggaatacgatcctaccaactacctgctaatgcacgccatgggacctaacgtggccggtgtaatcggttctgccgtagcagcaggtattttacttggattcttgatgtaattcattgaaatacaatataggaaatcctcttctacctatgggtggaagaggatttttttattgatatagattaagaaatgaatgatttattgtgaattttgaacgattaattacataaagtatgctgaaaaacatataaatttgccgccgtaaaaccaaactaaattaaaagaagatggaaaagaaaacagttaagtaccacattccccaacacggaatatacatgtacgcacgtactaattctgggaaaactgaactcattgtcctaaacagtacaaacactgaacaagtagtagccaacaaatactatcgtatgatgactaacgactcaaaaagcggaaaagaacttgtcagtggcaaaaagattgacctcacacggaatatgaccgtaggtgctcgtcaatcccttattatcgaattataatttatttttaaggtaaaaaggtaaacgagaatgaacaaaggcggcttctttttgcaggagccgcctttctgatagaaataattcgtatcttaactttttgtgattaattgcgggaaacaatggttccggtagcctgataagtaggcatcaccaacatttcggcaatctgcatatactcgggaaccgaagctgcaaaataaacagtttctgcaatatcgtcaccggtcaatggacgaatacctttatatacattatctgccttatctttatcaccacgaaaacggactaccgaaaaattagtttcgaccaatcccggtttaatattagtcactcgcaacggagtatctaccaaatcaatacgcaagccatcggacagtgctttcacggccgcctttgttgcacagtaaacactacctcccgcataagcagcgtctcctgctatcgaaccgatattgatgatatgccccctgccgcgtgccaccatgccgggcactaccagcctggtcatagccaataatgacttgatattcgtatcaatcacgatgtcccattcatccaaattaccctcatgttctttatccactccgataaccaatccggcattattaatcagaatatcaatcgctttccattcatcgggtaatgaagccaacgcctcagccgccgttttacggtcgcgcacatcaaaaggaagcaagcatactctagctccatactgctgctccaactcctctttcagtgctgacaatttctcttcattacgggcatttaaaatcaagcttgccccctgtgaagcaaacttacgggcgcatccggcaccgataccgctggaagctcctgtgataaaaacaatcttatccatctcttattttgatttattaaagaatttcttgaaaaacaaaacctgatagtctatcgcgttattccaatatcggggattatgcgctccgggccgtatgataaagtcatgcccgattccccgcttcaataatgcttcgtgagcagccttgtttacctgcaaaaagaaatcatccgcaccacagtcgataataatggccaggctgccatctttcagtctatccaactgattgataacggtatgattatcccatacttctttattagaagcatattcaccgagccgggccttcatgttccaactatcgggaaacggacggatatccagtccgccactcatgctgccccctccgccaaaaatatcttgatggcggatggagagccacattcctccatgaccacccatactcaatcctgtgatgactcgtccgcttctatcggcttttgtggcaaagttcttatctatatattccaccaattctttggcaacaaaactctcataccgataatccttattacgaggactatcccaataccaactgtttttaccatcaggacacacaaagatgataccttcccggtcggctatttgaggtaaatcaggttttatcgtcatccatgtaaaagcatttccaccgtgcccatgcaacaagtaaattaccggacacttctctccgcccactgccttatcgggacgtaccgtcaacactgttacattcttgttcatagcattgctgcgcacagacagcgtatccacttttgccgcctgcgccacacttcctgacagacacaaaagaccggccaatagagtaaaaaattgtcttttcatatcgctttatataaataacgaggtaaagataatacataatttgcaaattagttgcatcttatttttgctatctttgtttcatcaataaaaacactatgatggacgaaaaactatatttaaagaaattagcgctacgggaaataaagccaaccgccatacggcttttgattctgaaaacaatgatgcagcacaaagaagctttttccttattggatttggaaaacgatttagataccgtagacaaatctaccatctatcgcactattaccctattcctgacacatcatctcatccatgccatagacgacggttcgggctctctgaaatatgccgtttgcagcaatgactgtaattgtgaagtagacgacctccatacccacttttattgtgaaaagtgccatcgcaccttttgcctgaaaagcattcatattcctatggttacacttccacagggattcacggtcaactcggtcaattatgtattgaaaggattatgtgcagattgcaccggccggcattccttgaagtaaaaaacatgaggatgaaaccattgaaaaagatgcccggcatgcaaaaaatcacacgttagtacgtgtggcattatacgtacgtatgtatagggctacgcatacgtacgtatcgcctcacacatacgtatgtatcgcctcacgcgtacgtacgtgtaaatccatacctccaacgatgattttcgaagagaaaaaacgagttataatcctttacttttcgcttcattccaaatggcatccatttcctccaacgtcatattcttcagctctttaccttgcttgatggtatgctcttccagataattaaagcgacgaatgaacttttgattcgtatgttccaacgcattatccgggttaatcttatacagacgggcagcattaatcaggctgaacatcacatcaccaaactccgcctccgccttttccttatccatattctccacttccgcttcaaactcgcctatctcttctttcaccttactccagacttgcgaacgctcttcccagtcgaatcccacattacgagccttgtcctgaatgcggtaagccttaatcaatgaaggcagcgcggaaggaacaccgctcagcaccatcttattaccgtctttctccttcatcttcaattgttcccagttctcagtcaccttttcggctgtatcggcttttacctcaccaaagacatgcggatgacggaaaatcagcttttcacaaagacggtcacacacatcttttatatcaaaatcaccggtctcgctgcctatcttggcatagaaagccacatgcagcaacacatcgcccaattctttgcagatatctttcttgtcatccttcatcaaggcatcacacagttcgtaagtttcttcgattgtattggggcggaggctctcattcgtctgcttgcggtcccacgggcatttctcccgcaactcgtccaaaatatccagaaagcgtccgaacgcttccatctgttcttttcttgtatgcataatctatttatctaaaaatcattttgtgatgcaaaagtacataatattccaacgacttttattaattttgcagtcaattatgcgataatcaattaaataaacagaatataaaaatggaattagcaagtaagtacaatcccgctgacgtggagggaaaatggtaccagtattggctggacaacaaactctttagttcaaaacccgacggacgtgaaccttacacagtcgtcattccgccccctaacgtaacgggagtgctccacatgggacacatgctaaacaataccattcaggatatattggtacgccgtgcacgcatggaaggaaagaatgcctgctgggtgccgggaacagaccatgcttccatcgccaccgaagccaaagtggtgaacaaactggctcaacaaggcattaaaaaaaccgacctcacccgcgatgagtttctgaaacacgcttgggactggactgacgagcacggaggcatcatcctgaaacagctccgcaagctgggtgcatcgtgtgactgggaccgcacagccttcaccatggacgaagaacgcagcaaaagcgttatcaaggtgtttgtcgacctttacaacaaagggttgatttatcgcggcgtgcgtatggtaaactgggacccgaaggcactgaccgccctcagcgatgaagaagtgatatataaggaagagcacagcaaactgtattacctgagatattatgtagccgatgacgacatgtcgggcgaaaccggagctgaaggcgaagttgttcaccgtgacgaacaaggcagacgatatgccgtagtagcaaccacccgtcccgaaaccatcatgggagataccgccatgtgtatcaaccccaacgacgtgaagaaccgttggctgagcggcaaaaaagtgattgttccgttggtaggccgtgtaattccggtcattgaagacgattatgtagacattgagtttggtacaggatgcttgaaagttactcccgcacacgatgtgaacgactatatgctgggagaaaagtacaacctgcccagtatcgatatcttcaatgataacggaacgctgagcgaagctgccggactatatgtaggcatggaccgttttgatgtccgcgctcaaatcgaaaaggacttgcaggaagccggtctgatggaaaaggtagaagcttataccaataaagtaggattctccgagcgcaccaatgtagccatcgagccaaaactgtctatgcaatggttcctcaagatgcagcactttgctgatatggcattgccgccggtgatgaacgatgaactgaaattctatcctgccaagtataaaaacacatacaagaactggttggaaaacatcaaggactggtgtatcagccgccaattgtggtggggacaccgcatcccggcctacttcctgcctcaaggcggctatgtggtagccgaaacgaccgaagaagccgtgaaactggctcaggaaaagaccggcgacgccaacctgaaagcggaagacctacgtcaggatgaagattgtctggacacttggttctcttcatggttgtggcctatctcgctgtttaacggcatcaatgatccgaacaacgaagaaatcaactactactatcccaccagcgatttggtgaccggtccggatattatcttcttctgggtagcccgaatgattatggcaggctacgaatacaaaggcgacatgccgtttaagaatgtttacttcaccggtatcgttcgtgacaagctgggacgcaagatgtccaagtcattgggtaactcacccgacccgttggacttaattgaaagatatggtgccgacggtgtgcgtatgggtatgatgttgtctgctcctgccggaaatgatattttatttgatgatacactttgcgaacagggacgtaacttcaacaataaaatatggaatgcattccgcttggtaaaaggatgggaagtagccgacatcgagcagcccgaatatgcacaactggcaaccaaatggttcgacagtctgctcgtcaaggtatctgccgaaatagacgatttgttcagcaaataccgtctgagcgaagcactgatggcggtgtacaaactgttctgggacgaattctcaagctggtatctcgaaatgattaagccggcttacggacaaccgattgacaaaaagacctatgaagcgacgttacacttcttcgatgtattgttgagacaacttcatccgttcatgccgttcatcaccgaagagttgtggcaacatatttacgaccgcaaggaaggtgaaagcatcatgactgcacaaatggaatcatacgcagacagaaatccggagcagagcattcaattgtgcaatacgttcgaccagttaaaggaagtcatctcaggcatccgtaacatccgcctgcaaaagaacattgctcaaaaagaagcattggaaatgcaggtaatgggtgaaaatacattccttatgtcttatgccgaagtcgtgaagaaaatgggtaacctgaccaccgtcagcattgtcaatgagaagcccgaaggcgctgcttcattcatggtgggaaccacagaatacttcattccgctgggaggcatgattaatgtagaagaagaattggccaaactggaagccgaccttaaatatcaggaaggtttcctgcaaagcgtattgaagaagctgagcaacgaaaagttcgtcagcaaggctccggcaaatgtcatcgacatggaacgcaaaaagcaggctgatgccgaaagcaagattgcttcattgaaggaaagcatagccgctctgaaaaaataaacggcagagcaaactgtttaaaatagggaggtgcactcttcggagtcgcacctctctttttttaatttatctgttaataaatcatttcaaaaagaaaatatcacaaacttattcttacctttgttacaatcactttaaattaaatacttatgaacaaactgacaaaacttgcatgcttgtcgttgtttcttctgttttcggcaagtatcagtagcgccgctcccaaggactatcgctacaccacagtccccaatgacccgttaaaagcacgtatctacacattggataatggactgaaggtctatatgaccgtaaacaaagagactccgcgtatccaaacctacattgccgtacgcgtgggcggaaagaatgacccggcagaaaccaccggtttggcacactactttgagcacctgatgtttaaaggaaccacacacttcggtacacagaactatgaagcagaacgtccgttgctcgaccggattgaacaacaatttgaagtgtatcgcaaaacaacggatgaagctcagcgcaaagccatctatcatgttatcgacagtctgtcatacgaagcttcaaaatatgccattcccaatgaatatgacaaactgatggcagccatcggagccaacggaaccaatgcatataccagcttcgatgtaacttgctataccgaagacattccttccaatcaggtagagaattgggcaaagatacaggctgaccgtttcaagaacagcattatacgcggtttccataccgagcttgaaacagtttacgaagaaaagaacatgtctctcacacaagatccccgcaaggtgagcgaaaccatgttggcagcactcttcccacaccatccatatggcacacagaccgtgctaggtacacaggatgacttaaagaatccttccatcaccaacatcaagaattattataaaacttggtatgtgcccaacaatatggccatctgtctgtcgggtgatttcaatcctgatgaaatgattgccaccatcgacaagtacttcggcgatatgaagcctaaccccaatctgccgaagctgaccgtcaaaccggaaacaccgattaccgagcccatagtacgcgaagtgctcggtcccgatgccgaatctgtgacattggcatggagattccccggttcggcaagcaaagaatatgaaacactgcaaattgtcagccagattatgaacaacggcaaagccggtctgatggacatcaacctcaaccagcaacaaaaagtattgggagcctatgcttatgtttataatttgtcggactactgtgctttcatcatgcagggacgtaccaaagaaggacagaccctggacgaagtgaaggatttgttcttgggcgaaatagccaaactgaaatccggtgactttgatgaaaatatgttgcaagccaacatcaataacttcaagaaataccagatacagcaactggaatacaatagcattcgtgccgatatgtttgttcagtcctttgtgaacggaaccgactgggcagacgaagtgaccgcactggaacgcatgtcaaaactgaccaaagccgacattgttgcctttgccaacaagtacttcacagacagtaattatgccattatctataaaaaaacaggaaaagacccgaacgaaaagaaaatctctaagccggaaatcactcctattgtcatgaaccgcgatgctgccagcaatttcctgaaagaagtgcaaggaagcaaagtgcaaccgatagaacctgtgtttatcgattacaacaaagatatggatcagttcgcgtggaacaaggatgttcctgttctttacaaacagaacaccaccaatgacttattctatctgcgctatatattcgaaatgggtaacaataatgataagaaactgggaacagcagcacaatatctgagattcctcggcacttcggatatgacactggaacaattaaacagtaagttctatggcttggcttgttcattcaatgtgtctccgggtgacgaccgcacttatatcactctttcaggattgaacgaaaatcttcctcaggctatcgaattattcgagaagatattggctgacgcacaacccgacaagacggcttacgacaatatggtgaagaacatcctgaagtcacgcacggatgccaaattaaaccaaatgcaaaacttcatacgcctgctgacatacgctgtttatggtaaagaatcagccacacgcaatttgttgtctacagaagaattgcaaaatatgaatccatcggaactgaccgaccgcatccataaactgacttcgttcaaacatcgcatcatgtattatgggcccagttcagaacaagagttgaccgacgtattgaataaatatcataaagttcctgcacagctacaagatattcctgccggcaagaaatttgtgatgcaacccactccttccaataaggtgttgattgctccatacgaagcaaaacagatttatatggtacagtattccaatcgcggggaaaaatttaatccggaagttgaacctatccgtaatttgtacaatgaatacttcggtggcggcatgaactccattgtcttccaggagatgcgcgaatcacgcggtttggcttattcggcatgggcaggaatcgtgacaggtggcaaagccatctatccatataccgtgcaaacccagatagctacccagaatgacaagatgatggatgccatcaagactttcaatgatatcatcaataatatgccggaatcggaagctgctttcaaactggcaaaagaaggtatcatttcccgtctgcgcaccgaccgcattatcaaggataatatcctttggtcatacatttatgctcaagatatgggtatgaacgtcgacaaacgcatcaaacagtacaatgatgtacagaaaatgactctgcaagacgttatcgatttccaaaagaaatggatgaaagaccgcacctatacttattgcatattgggtgacaagaaagagctggacatggaagcactgaaaaccatagctccaattgaggaacttactcaggaagagattttcggatactaacccaaggtgactctgttccggtctaaaaacgaggagttaaagaataacctttaaaaaaggggttgtgtcaaaacgttgatgatgctgtcgtttagttcgtaggggcgaggttcgctcgcccgaaaacagtttgctttgtgtcttcgggcaggcaaaccctgcccctacagctgacgatgggataggtcggtttggttttgacacactcccttttttaatgtgttgtgttgtgctgttcctagctcttatttcttattcatgttcatttcgacgacaaaagccaccaataaacctacacctcccaacaaaaggacacaggctccataaataagtgaagcgacatcattcattctgtaaccaatatctacagttccggtataaccgtttatagtagcggcacaaatcacataaccgaccagtagtcccagtcccattcctgtaagcaaacatcccaacttcaaagccgaaaaagagaagtttccagtcgaagaaaagttaatcttatgctccagcatatcgggagtaaacttctctcccatcttttcaataatagtcaaacgttcctttttgcagacaaacagttcaaacagcttgtaaattcccaaagtgataatggccagaatagtaggcaccataataaaatccatcataatcgtttctatttaagttattaattttgttcctttgtaccctttagacgccgcatctccggtcaggttacaactttacggcaaaaaatattttttatttcaaaagtgtaaccttatctatatgcatgcgtctaaagaagtgaaatggaatacgacgaagcacatatcattcaagatgtattggaaggaaagacttcccgctatgaatattttctggacaaatacggtcagcaggtatttaccctgattgttcgtatcgttgccagccaggaagatgcagaagagcttacacaagataccttcctcaaagccttccggcacttatcttcattcaaagcggaaagcaacttttcgacgtggatataccgcatcgcttacaatactgcaatttcggccgtacgaaagaaaaaatacgacttatttgacatggatgatacgctgcttgccaacatttcggacgaacaaatagatgatacgctgaatgatgagagcgaggaacagatagccaaactgaacaaagccatgaaaaagcttgatgcagacgaacgggccgtcattactttattttatatggaagacaagcctgtcagcgaaattgctctcatactgggaatgacagaaagcaacacaaaagtgaaattgcaccgtatacgcaaaaaattgtatgtacttataaccaatgaaaaactatgaacgaaggactaaaagataaaggattgaaaagggcaataaaggaacaacctcagtttcggctgtccaccaactttactttccgcaccatgcagaaagtagaagaagccgctcgacttcatgaaaagaaaatagaacaaagaacattatgggcaaccattatcgcctccttgctcttactggccagtggcatcgcaggagtgatttattatttgggcgatagcctgacagagtttatccaagcaatgcttccttcggtaactcacgacatacagattccttttttctacttcttgtttgccataactattttcttatttctgttattcgacagatggatgaggaagcagtatttcaaacggcattcttcctgaaagaatttctttatacaggaaaaaataccttggagttttccgaaaatacaaaggtctttttggaaaactccaaggtattttctgaaaagatgaaagagtttttttaggactattccttatgataagtaagattcacatcctacgtttcacaccaagctattgtaatacagattattaccttcccgataagtgtgaaacatactttctcattaccagtcagtaggaatgcccgtcatttataatcggttatttctcaagtaaatctttcaaaaaggcatccagttcttcgtctaatcctttaagcagttcatcgtttaataacaatgtgtcttcatcatccaccaataaaagttcggctaccgtttctctatcttcatctaccaacacaaaagaatacggcttcatgatacaaagattatccaactttccggattcctgcaagcaattgagctctcctctcagaatccgttcggcaatggcataaaaatcatctccatcataatccacccactcttcgattatggtacgcgacaattcctcgtcatcatcattaaataatactagttcaccgctatcctgtttaggctgcaaatgaatatcagtaactactgttttctctccgtcagcaataaatttatcgattgcttcctgaagggatgatacaatagaagcatgtgactgtgcactgagtttcataccaaaatcaattttatttaattatttatattcaaaagtacaaaaaaaatctttcctgcaacatttattccttaaaaattatccttgaaacgattcatttgtatgtttaactgaggcaattggacctgacgctccttcaatttcaataaatagaaagcaataacagtagcttctgtcgtaccggcttttgccagtttatctgctttttccacccattctatagcagttgcaggattgtctttcatttcataatatagccctatattaaaggctgcacgcattttttggcgccctttacccttatcgtatatctgcttccacaactcaaatgcactatcccaattattctcgcgtacatacactccggcatcgcgcatcctcacattgcctccgtcaaaataaaaacgggatacctccctccaatgcggaagaagataattgacaggcatggtagcagcgtattccgaagcctcctttacgatttttttatctgataaggtaggctcaatttcccatgaaatagtatctcgcttactaaaactgagcataggacgctcccgagaaggtatatatattctgataacgggagccacaatgccatccacagtatctaccgaaaaacctccgtcaaatgtatctatgaataaagctccccgtttggtgtgaatatccaatctgtcgaaagagaatattaaatcaacgcccaaatcggcagccaatttctgtacctcatcctgagtcagcatcacatcttcacgaagttcggtatcctgcccgcgcaaagcagagtcgcaaataatgacttgctcaaagtaattagcattcgctatttcctccgccaaagcttcggcagctgttttgccatctcctttcagttccatactaatcacatcatgactgtctcccactttataggcaggcatgttgttcaccacagccacattccgcactgcatcaggaaaactgacatcggcagcctgcaactgttcaaaagaaatcgtttgcaaacttccgcatgaagtcaaaaccaaaccggttactatcgctattaatgaaatcgttttattcatatctgaccaatattacttgttaggacaaaaataagctatttgcaggaacttattagttaaaaggaataaaaaaacgtctaagcagaaaattctgctcagacgtttctatgaaattgtctatttatcagtcattttttccgtggcagttcttatacttcttgccacttccgcaaggacacaggtcattacggcctactgtcttttctgcacgtaccggctcacgctttacttcacgagtatcgtgaccggctgctgcctgctgatcggggtcacttaagtcacgcttttcctctctatattgctgacggggagctgccggttcgggagctgcttcacgcacttgctcaggctcctgtacaggtatctgtccgcgagtcaatacggaaatggtattgttattaatcttattgaccatattatcaaacaggttcactgattccaatttaaagattaacaacggatctttctgctcatagcttgcattttgcacagaatgtttcaactcgtcaagttcgcgcaagttttccttccaggcatcatcgatggtatgcagcaggatggctttctcgaatgacttcacaatttccttaccttctgtttcataagcagctttcaggttaacagaaatattatacaaacgtttaccgtctgtaataggaatcataatattttcatacatgtgtccttgcaattcgaatacttgtttgataacagggttggcaatctgtgccatacgttctgtcttgcgtttgaagttggccattgctgcctcgaaagtcagttctgccaaatcttcctgcttcttcgcattgaattcttcttctgtgaaaggaggctccattgccaaaatctgcaacatttccatcttcacattatcataatcgcccaattcgactgcatacacacaacgatcccaaatcatattcacaatatccataccgatacgttcacccatcaaggcatggcggcgcttcgtatagacagcgacacgctgcttgttcatcacgtcatcatattcaagcaaacgtttacggataccgaagttgttttcttctactttcttctgagcacgctcgatggaattggaaatcatcttgtgttcaatcatttcaccttccttgaatccaagtctgtccatgacaccggcaatacggtctgacgagaacaaacgcatcaggtcgtcttccaatgagacaaagaatacagaagatcccgggtctccctgacgacctgcacgaccacgcaactggcggtctacacgacggctctcgtgacgttccgtaccgataatagccaaacctcccgcagctttcacttcaggactaagcttaatatcggtaccacgacccgccatattggttgcaatggtcacgatactcttctgacctgcctgagcaacgatgtcggcttccttctggtgcaactttgcattcaatacattgtgctcaattttacgcattgaaagcatcttgctcagcatttcagagatttctacagaagtagtacctaccagaacaggacgtcctgcctttaccatttcttcaatctcttcgatcacagctttatatttttcacgcttagtcttgtaaacgcgatcgttcatatctttacgtgctatcggacgattggtcgggatgacaacaacatccaatttatagatatcccaaaattcgccagcttccgtttcggctgtaccggtcatacccgagagtttgtggtacatacggaaatagttctgcaaagtaatagtggcaaaagtctgggttgccgcttccactttcaccctttccttagcctcgatagcctgatgcaaaccatctgagtaacgacgaccttccataatacgaccggtctgttcgtctacaatcttcacctgtccgtcaatcaccacatactcatcatccttttcgaacatggcgtatgctttcaaaagctggttgatggtgtgtacacgttccgatttgatagcataattagtcatcaactcatccttcttggtcaatttctcttcttccgacagttcggtctggttttctaaagccgacaactgagaagtgatatcaggcaacacaaacaatgtaggatcttcagcatttccggtaatcaaatcaatacctttgtctgtcaaatccacactgttctgcttttcatcgattacgaagaacaaaggatcggtagcttcaggcatacgcttgttgttctgctccatatagatttcttcggtcttcagcataccggccttaatgcccggttcactcaagaatttaatcaacggcttgttcttaggcaacgctttatgactgcggaacaaagcaaggaacccttcttcctgatctttcttgtcatcggatgcaatcaagcgtttggcatcggcaaggtattgggtagccagctttctctgagcttcaaacagacgttcaaccaatggacggagttgttcaaacaattgatcctcaccttttggaacaggaccggaaataatcaacggagtacgcgcatcgtcaatcaatactgagtcgacctcatcgacaatagcataattatgtttacgctgcaccaaatccttcgggctgacagccatattgtcacgcaaatagtcaaaaccaaactcattgttcgtaccaaaagtaatatcggccatatatgctctgcggcgtgcgtcagaattaggctgatgcttatcgatacaatcgacactcaatccgtggaactgataaagtggtcccatccattccgagtcacgttttgacaaataatcattgactgtcaccacgtgcacaccgttaccggtcaaagcattcaggaataccggcagagtagccaccaacgtcttaccctcaccggttgccatttctgcaatcttacccttatgcaaaacgacaccaccaaacagctgcacatcatagtgcaccattccccatgtcatatcgttaccaccggcaagccaatggttctgccaaatagctttatcgccttcgatacgcacaaagtcttttccctgcgcagccaagttacggtcgaactcagtagcagtcacttcgatttcaggattctcagagaatcggcgggctgtatcttttacgatggcaaaagcttgaggaagcacatcatccaatgctttttcatacttttcaagcacttctttttccaacttgtcaatctgcgtaaagatgccttcacgatcttctaactcagtagtttcgatagtagctttcagctcttctatctttttttgttcttccgtagccgaatcgtggatatactttttcagttcctctgttttggcacgaagctcatcattgctcagtttggcaatttccggatatacagccttgattttgtctacccacggctttatttctttcatgtcacgggtggccttgtttccaaacaatttgccgataaattcattaaatcccattgtatttttgtttttattattttctaatttggttaattttgaaagtgcaaagttaaaataaaatgctgatttatttgcacttctctctctaaatattatttgcggatgtcagtcatcggagccaaagtagaggcattgggcgcccgaatgcgcatgaaatgggctacagtaggtgcaatattgccaatcttcacaggggtgtgaataatttcgggcttcatattccatcccactaaaacgaggggtgaagaagcataagcttcacgcactactcttttatctaaagaatgttcacggacaaccgaccagccgggcaaaacctctatccacaagtcaccggaacacgccggattataactgttctttattttatcgatagtaggagtccaagagcccaactgcaagcgttgtgaagaatagacgtccttcacaccgctaaactgcaccaggaattccgacgaacgagccaaaatctcggtatagttaagttgtttctgctcaataagcttatgattcaaataaatttcctgttcgtgatgagcttccacatactggccttcgccatagatcgcagccagataaagattcaacaatgcagaacaacgctgaatatagaattctccactgggaatcttatattgaggaggatcagccggttcgggatctgtatatccggtggaggtaatgaaaaaaagagtgttatgtaaacctacttttctatcaatcatatccaacaactcggcaatactattatctaaacggacataggtatcctgcatctccaaaggtaattcagacggagatttgtgatcataatttccggcataataagccaaagacaataaatccggcacattatccttaccgatggaagtagaattgagacaagcatttaccaaacgattcacctcgtcattggcataaggactggttttcagccttctgtatttctgcttcctttcatcatcaaaattatgtttgaaagtcagctgcttggtttctgtagtcagatatttataagcggtaacaggcagataaggtccccacaccatatcactgatgcgaaaatcaagtccctgataatcgttataagtagaaatccaggaaggaaaagtgccataatatgtacttccactccattttcctgtttcatcattaatccagaaagcacctttggctgcatgaccggcagccaacactgccatttcccgggtaggagcaatggaataaacttctgctacgccttgtgtggccactgccagctcatctgacaggtttgatactttcaatttggcaggagaggtggactcggaagtataaatccccataaagttattgtcgtccacacaattgataacgcgcagagttgcacgatccatccagttatcccctacaataccattggtataaggagtagttcccgaataaatagcggccacagacgatgatttatcaacattgataaaatcatattctgcattcaggtatattctgccttccttccacaaccgtttgaagccccgttctccatacaaagccgagaaagcttcaatgtagtctgtccgcagttggtcgatggtaagccctaccaccaacttaggaaccgcaggaacattttgtgcctgaagccccgttaatactataacggtcagaagagaagttaagatgcgtcctttcatttactgttttgtctgtaatataaaaatacgtggcctgtagagcatacaagcaaacacagtgccaaaggtaataccgttacgttgaattcttgctgtataaacggcattatcattataaaaaacgttaaataagccatatttattagatgatagaggtcttttcgaccttttatcgccttataaatcatcaccggcaagtaaataagggggatgggattgaacaaaacaatcagccaattggagccgactgtcggatgaatggaaaagaaaaacaaaaaagcaatgatacatccggctaccccctgcgctccgaacaagagcaaatcccaagcccaaatcaccttcttccatttcaattgaagccatacaataatgcaagtcacaaccaacaatatgcatacacacgacagaggagacaatgggaaacccggttctgcttcttccggctctacatccaccactttcgactcactgagtaccaacggacgaacactgtctccttgcataatgaccgcgccccttgccgcttccaacatattaaaaggagcaaacatttgctttcgtccgtcaatgggaacatccgcctcgctgccaagacaaagatcaattcctaactcatcccattcattccctttcgtgcaccggtgaacaatatccctgaaagtgaccccttcttccgcctgcgggtaaactacttttccatcgatacaatcttctatcttgtcacgcgcacgcgtagtacaattatcataaaagtaattataacgataaatccggttccctggacgataattttcttcaagcaaatcccatatcttttgtttttcttcgtcggtaagattcagtgtttgctgatagaccgaagagccgcgcacggcatattctccttcaaaataagaataaggcaccactcccaaccgataatcagtttcacctttcacaaagcgcagcacaaaattaggagtattgaaactgaagataccataattaaaaaccaagtccttcccctctgccggattttcgtaacgaatagccgtatgaccgaacaattcatatatctcggttcccggcgcacaagtcagcaaactcacccttacactatcctgctgagcacgaacactccaggaagccaatattaaataaagtagaacaagcagtttcttcatattaatcaatgttttgataccactgaatcattgttcatccgtatcaaaattacaatttacgctgcaaaagtacacctaaatattaattaatacctcacaaataccgttttttattgcaattcctatttattttttgcgttactttgcagccataaaagcaaagttgtgaatttaataattgatataggaaattcagtagccaagctggctatctttgacaaagacgagttggtagaagtattccgtggctccaatcattcattggacagcctgccgatgctttgctcccgataccccttggaacgaggtatcatagcctctgtcatcacattaagcaacacgatccgccgacaactggacaagttgccctttaaaatcatagagctaagtcacgaaactccggttcccatcaccaatctgtacaagacacctcaaacactgggaatggacagacttgccgccgttgtagccgccacatggctgaaacccaataatgatatactggttattgacgccggaacatgtgtcacatacgatttcatcgatgcacaacaccaataccacggtggcaatatatctcccggaatgcgcatgcgcttcaaagcactcaatatatttacggacaagctgcctaaagtcagtgccaaaggagacatccccctttatggacaaacgacagaaactgctatccgtgccggagttatcagaggtatggaacttgaaatgagcggatacatctcccttattcaaaagaattaccccggagttttggtttttttaacaggcggagatgatttttcttttgatacaaacttaaaaagtatcatctttgcagatagatttttagtattgaaaggtttaaacagaatattaagctataatgataaattataaaagactgattagtgcgttaattatactcacattcactgggctgaccatagcccaaacaagcacaaactcaccttatacgcgctatggatttggttcattggccgatcaaggcttcggtaatagcaaagcgatgggtggaatagcctatggattaagaaacggttatcaaatcaacgcatctaatccggcgtcatatacggcagttgattctttgacgttcttgtttgatgccggcatgactttgcaaaatgccaactttaaggaaggcaatataaagactaacgctaaaaattcaagttttgattatctggccatgcaattccgtttatggaaacgtatgggaatggctgtgggatttctccctttctctacagtaggatacagtctgagcaacacttccgaattgactaaagacgaagacggaaccgttatcaacaagactgcttcttacgctggtgacggaggtttgcagcaagtatttgcaggtgtaggtttcaaagtcctcgacaacttgtcaatcggtgcaaacatctcttatatatatggtgatatcacacattctgtaacaactgctttcagcaactcaagttcatttagcagtgtcagattggacaagatatccatcaatgattataaactggactttggcttgcaatatagttataaattcaataaaaaacacgttttgaactttggtgccgtatattcattgggacattcagtgaatggcaaaggatataaatacaatcagaagtggttgaacggagctgattatccttctacccagacaggtgatacgattaccaacgcattcagtttaccacatacctttggagccggtttgacttatgtatatgacaaccgactgactataggggccgattttacctatcaacaatgggaggatgcaaaattctataatgagaaaagctatttcagcaaccgtacaaaaatagccgcaggtgctgagtttgttcccaacccctacagccgcaattatctgaaacgtgtccgctaccgtgttggtggatattattcagatccatacaccaaagtagacggtcaggatggtactcgtgaatatggagtaagtgccggtttcggcttcccgctgttccaaagcaagtccatcctgaatatctcgggacaatatgtaagagtaagtccgaaagtaaaaggaatgctggaagaaaactatttaaaaatcaacatcggactgaccttcaacgaacgttggtttatgaagtggaaagtagattaacaaacaacaagatagagttttaataataataataactaaatttatatacgatgaaaatgaagatggtaacagcgctgttcgctctttctttaagtgcaacagcttctttcgctcaaactggagcgtcagacggttcaaggtatggtcatggtcaagacagtattaactgtctgcaaaacatcagtatctattctgagtacgtaaaaacaaacaacttcaaggatgcttataccccgtggaagagtgtattcaatgaagctcctattgctcaggcaggtacttacacaaacggtgcaaagattcttcgttggttcattgccaatgaaaaagatgcagctaagcaaaagcaatattttgaagaactgatgaaagtacacgatcaacgtattaaatacctggacattttgaacagctacgttaaaactcctgtaactaaaggttctattatcggaatgaaagctcacgactatttcacaatgggatgtcctgacctgaatactgcatataatttgttcaaagaagccgttgaattagaaaaagataacgccgattactttgtacttcaagaatttaccgatgtttccggacgtaaggttaaggctgatgaaacacacaaagaacagttcattcaagactatatcgctgctgccggttatgcagacgcagcattcaaaaaagagactaaagcaaagactaaagaactcttgaaagttgccaaagacaacatcgatgcatttttcattaacagtggtgtggctacttgcgataatttgcaatctatttacgctccgaaagttgaacagaacaagactaatctggattatttaaaacaagtaatcagcgtaatgcaaatgttaggatgcacagaacaggaagcatactttgctgcatccgaacatgcacatgctattgaaccgacttcagaaacagctatcggttgcggatatatgtatttcaagaaaggcgacttggacaaatgtatcacatactttgaccaggcaatcgaactggaacaagaccctgtgaaaaaagcagattattgctataagactgctgccatcctgtttaataaaaaacaattgagcaaagctaaacaatatgcactgaaatctatctcattggatggaagcaacggtaaaccctatatcctgatagctaatatgtatgcatcaagccccaactggagcgatgaaaatgcattgaacaaatgtacatactttgccgttattgacaaattacagagagctaagagtgtagattcaagcgtagaagaagaagcaaacaagttgattggcacttactcacgctatactccgaaagatgaagacttattcttcctcggattgaagaaaggtgacagtgtaacaatcggcggatggattggtgaaacaactactatcagataattatgtcagttgtaaaaaaacgaaattcacaccttatatttatgaacataacagttgtcgtttggacaactgttatgtttgttttattccccgcatgttcgggagacaataagaacttggcagaagccataaccgaacgtgattctctccctaccatgaaaacgctgggagtgactaccttaatatccgattcgggcatcacacgctacaaaattattaccgaagagtgggaaatatacgataaaaagaacccaccttattgggcttttgaaaaaggagtctatttggagaaattcgattctctgtttcacatcgatgccagcatcaaagccgatacagcttattattacgagaaaaagaaactttgggaactgagaagcaatgtgcacatccgcaaccttcaaggggacaaatttgatacacaacttctgttttgggacgaagcaaaagaacaaatttactctgacaagcctatccgtatcgaacaagcggacaaaagcattataaatggacaatatggattcaagtcgaaccaacaactgaccgaatacgaaatatacaacagtggcggtgagtttattgtaaaagacacacccccggcagacagtacaaaagttgctgcttcggacagtatcaagaccgactcggtacattaatcaatttatcattatgggcatcatcatagaaatacttatcacaatggctttttccgcattcttttcaggtatggaaatagcctttgtttcctcaaataaactacgctttgagatggatcgtaacagccagagccttacctctcgaatcctttccatcttctttcatgacccgaacaatttcatttctaccatgctggtaggaaacaatatagcccttgttatttacggtatattgatggctcaggtcatcgaacaaaatatcttggcaggcctcatcgaaaacgagttccttctggtactgattcaaaccatcatctcgacattaatcatcttggtaaccggtgaatttctacctaaaacactattcaaaatcaatcccaacttaacattgaatatattggctgttcctgcattcatttgttacatagtcctctaccctatcagcaaatttgcatcaagttcatccaacctgatattacgcattttcggcataaaagtgaataaagaagcaagtgacaaagcatttacaaaagtagatttggactatttcattcaaagtagcatccaagacactgacaatggaaaagaaattgacaccgaaatcaaaatattccaaaatgcacttgacttttccaatataaaaatccgtgactgcatggttcctcgtaccgaaatagtatccatcgaatacggcacttcactcgaagaattaaaagcacgtttcatagaaagtggaatcagcaaaattattgtatacaaggaaaatatagacaatattgtcggttacatccattcatcagaaatgttccgcgaagtaacagattgggctgaacatatccgccagcttcccattgttcccgaaacgatgggcgcacataagctgatgaagctattcatgcagcaaaagaaatcattggcagtggtagtcgatgaatttggcggcacttcgggcattgtggcactggaagatttagtagaagaaatttttggcgaaatagaagacgaacatgataccacatcttacatagccaaagaaatcggcgacaatgaatacatcctttcaggacgtctggaaatagagaaagcgaatgaacttttctcactcgatttgcccgaaagcgatgaatatcaaactgtcggcggtctcatcctacaccattaccaaagctttcccaaaatgcatgaagtgataaaattcgacaatttccagttcaaaataattaaagttacggctactaaaattgagcttgtgaagctgaaagtgaccgaataacagatttttttcacaataaaatagattgtaaaccgcattttttgtatcttcgtgcgctaaatctataaagtatagaaaaacaataaacaaaatagtataatttagaaatggcaacattacaaacaattagaagtaaaggccctctgttggtcgttgtaatcggtcttgcccttttcgcatttattgcgggtgacgcatggaaagtactccagccacatcagggaaaacaagacgtaggtgaaatcaatggaaaaacactcaccgcacaagagtatcagaaaatggttgatgaatacgcagaagttattaagctcactcaaggcttgaactctcttaacgatgaccaactgactcaagtgaaagaccaagtttggcaatcttacgtaaacaatcaattaattgcagcagaagccaaaaagttaggtctgactgtaagcgatgctgaaatccaagcaattatcgaagaaggtactcacccgttgttaatgcagactccattccgcaacccgcaaaccggtgctttcgacaaagacatgctgaaaaagtttttggtagactatgccaacttgggcaaaagccaaatgcctgcacagtatgtagaatactatcagaaaatgggtgctttttggaacttcattgaaaagactttgagacaaactgctttagctgaaaaatatcagaacttgctggctaaatcattaatttcaaatcctgtttctgccgaagacgcatttgcttcacgcacaaatcagactgatgtattgctggctgctgttccttattcttctatcaacgattctacaatcactgtttcaaacgaagaaatcaaagcgctttacaataagaaaaaagaaactttcgaacaaccggtagaaactcgcaacatcaaatatatcgatgttttggttactccttctgacgaagaccgtaaagaagttttagacgaagttacagaatattctactcagttggctaatgttgctgatatgagcacattcgttcgttctaccaactctgtagtacctttctctgaagtggttgtaaacaagacagtacttcccaacgacatcgtagcccgtttggactcagtgaagctcggtgaagtttacggtccttactacaaccaagctgacgactcatacaacgctttcagaatcttagcaaaacaaacagctcctgactcaatccaattccgtcagattcaggtatatgccgatacagaagcaaagactaagaccttggcagacagtattttcacagctctgaaaggtggtgcggattttgccgagcttgctcaaaaatatggtcagacaggtgaagcaagttggttgacagcacgcaattatgaaggtgctgctcttgatgctgaaaacgctaaatttatcaataccttgattaacagcggtattaaagaactgaacaatttgcaagtcggtcaggctaacgtcatccttcaggtaatggacaagaaagccatgaaagataaatatcaggtagcaatcatcaaacgtccggtagaattcagcaaagaaacttacaataaggcatacaatgatttcagccagttcgtagcacagaacactactatggataagattgtagccaatgcagaagacaacggttatcgtttgttagaacgtgctgatttccgtagcggtgaacactatgtaggtggtgtgaaaggtactcgcgacgcattgaaatggatctttgctgctaaagaaggtgaagtatctcccttgtatgaatgtggtgaaaacgaccacttgatggtagttgcacttgaaaagataaatcctgccggctaccgtaacatcaatttggtggcagatatgctgaaagccgaaattatcaaagataagaaagctgaaaagattatggcagaattgaacggtgcagacattaataaagccaagagtgctgcaaatgcagtgagcgatactgtaaaacacatcacttttgcagcacccgcttatgtttctattactcgtgccagcgaacctgtattaggtgcttttgctagtaaaactgaggtaaacaagactactgctcccatcaagggtaatgcaggtgtgtatgtaatgcagattatcaataaagacaagagtgccgaaacattcgatgctaaaacagaagaaggcaatttggaaaatatggcagcacgctattcaaacagcttcatcagcgacttatataagaaagcagaagtaaaagatgaccgctacttatatttctaagtctatcctcgtctaaatcataaatggaaagggaggtgtgtcaaaactccctttttatcgaaatcacccttgccacaggtcgttgtggcgagggtgatttttagtttatgagagcttcgacataccctcctttttttgagtttacaagaaacacaatcatcacactattataatataaaaggggatgtgtcaaggtcgtttgacacatccccttttccacttaaggcggaatatattaattattctcagggcgaagtttacgaactgtaacggcagtctgccacatttcactttcgcgcaatgctttcaactcttcttccaacttttcgcgataatcgggtttagagttagagtcgatagaaatctgagcttcgttaccggtcttcacgctgtgatacagtttttcaaccacaggcttgatagcatcgtggaacggagtcatccagtccaatgcaccgcgctgggcagtagtagaacagttagcatacatccagtccataccattctttgcaaacagcggcatcaatgactgagtcagttcttccacagtttcgttgaatgcttcagaaggagtatgtccgttttcacgcaacacttcatactgtgccagcaacaatccctgaatagcacccatcaatgaaccgcgttcacctgtcaaatccgaagtagcttcacgctggaaagtagtctcaaacaaatagccggaaccgataccgatacccaaagcgatagtacgttcgtaagccttaccggttacatcctgatagatggcgtatgaagagttcaagccgcgaccttcgaggaacatggtacgcaatgaagtacccgaacctttgggggcaaccatgattacgtcaacatcggcaggaggaaccacacctgtacggtcgctccaagtaatggcaaaaccatgagagaaataaagagccttacccggagtaagacaaggtttaatagtgggccatacagacataacagctgcatcagacaacagacacataataatgcttgctttctggcaggcttcttcaatgccgaacagagtttctcccggaacccatccgtcagcaaccgctttttcatatgtttttcccggacgctgaccaacgattacattaaaaccattgtcacgcaggttcaaagactgccccggaccctgtacaccataaccgattacagcgattgtttcatctttcaatacttcacgtgctttttccaaaggaaattcatcgcggataactacagtttctgtaacaccgccaaaattcaattgtgccatttttaaaactaatttttacggacagcactacgccatcctattattattaaattaaattaatatcactttactgcgaacgactacttccgtaccgttctttcttacttctatgtcatactctccctctcccacttcctcacgatagaaactcaaagtatcgccataataactttcggccacgtatgccatttcaaaacgctttacccgcttttccttgaatacttcgatgggaaacaaatcgaggatgtgttcgatatacttaatactgtttacatgcccgttgatgtcgatatcactgtattttgtccgatactccacaagaggcgtcttctcggtcactttgatgcgaccgggcttggagatagggcaatctttatcacacacatagtcggtgatgctccctccgtgaagagtcagcagatcggcaggtttacgagtttccatacttatcatcgcccacaccgaacgggcatagcccactgcattcccctcgtggtcaagaatggcaaagttacggtcggtaaaaaggcgataaacattctccacccacgtctgaatactgaaagactcatactcgcaaggcatctcctccaactcaatagccaaacgggaaagtacccatgtataatggttctcattcaatgtggcaataccgaatccacggtcggcggcatgaaatccggcacaattcaacagatgattccccaatacactcattgtcagttttccggtgaaatcgcaatgaaaaggctctgccacaaacttgtacgttccaactttattgtcactcattacagctcctttctttccttctgttgacgatatttttcctcacgctgtgtaagatactcattgacacgctcaaagcagctggtagtgatagccacacgccccgaacggacaaactgcaatacgcaacccaatgcctgcaactcctcatacagagaagtgatttcctctgtcattcctgccttctcgacaatagcaaagacagggttcacttccacaatgcgtgcattgtaacggcggattactttcgatgcgatgggattggactgaaactcaggtatggacaccttatagagtgctatctcatgcagaaagatttcgtcatcagtgaaataatgcgcctgcaatacatcgattttcttttctatctgcttcaccaccttttcaataatatccttggtagtccacactgtaatagtgtatttatgtactcctttgatagaagaagccgaaacattgagactttctatattaatctgccggcgggtaaacacagcagtaatctggttcagcaaaccggcaatattttccgaatgaacgattaatgtatataatgtcttatccataagcttactcttttaacattctaacaacatctggtttaccgaacttcccggaggtgtcatcggcaacacattaccttcctctatcacacaagcttccaaaaggaacggaccttcggtggtcagcatttcatggatggcatcctgcaactcttcccgcttcatcacacgccgggaaggaatctcgtaggcttcggctattttcatgtaatccggattcaacatcggtgtaaacgagtagcggcggccgaagaacatcgcctgccactgacgaacattgcccagataattattgttcagcaaaataatctttaccggagctttctgttccataatggtccccagttcctgaagattcatctgcaatcctccgtcacccataaacacgcacacagtgcggtcaggacgaccgaaagtggcaccgattgcagcaggcagaccgaaccccatggttcccaatccaccggaagtaacaatactacgattcttgctatacttaaagtaacgtgccgccatcatctggttttgtcctacatcggtcaccaaaatagcttcgtgatgcgaagcctcgctcacagcacgaaccacctcgcccatattcagcgcaccttcacaaggatgaatctccttcctgattacctgttcatattccgtcttttcatattcggcaaagctgtcaatccattcggtatgttcattttcgccgataagttgcgtcaatatggcaagtgtctgcttgcaattacccaagacaggcacatccacctttacattcttatctatttccgatgaatcgatatccagatgaatgatctttgcttgtcgggcgtatgtatcaagtttgccggtcacacggtcatcaaaacgcattcccacggctatcaacacatcacattcattggtcttgacattcggaccgagattaccgtgcatacccagcatacctttattgagcctgtggtcggtaggcaaggcagaaagtcccagcaaagtgcatccgcaaggcatatcggctttctcgacaaaggcacgcaattcatcttgtgcattaccaagctccactccctgaccgaccaaaaccaatggtttacgagcaccgtttatcagttcggcagcttcctgaagacactctttatccgggttgggctcaggatcataactacggataaaatcaagcctcatcggttcatagtccaccatttctacctgagcattcttggcaaagtccagcacaacaggaccgggacgtccgcttttggcaatataaaaagcgcgtgccactgcccaagccacatcctctgcccgacgaatctgatagctccatttggagataggttgagtgatacccaccaaatcaacctcctgaaacgcatctgttcccaagaacgaagcccccacctgtccggcaatcaccacaataggcgtactgtcaatcatggcatcagcaatgccggtgatagtattcgtggcaccgggaccgctggtaaccagacagactcccacttcacccgacacgcgggcaaaaccttgtgccgcatgagcagctccttgttcgtgacgaaccaatatatgatttaatgtatctcgatgatgatataaagcatcaaaagtaggcatgatggagcctcccggatatccgaaaagagtctttactccctgatactccaaggaacgcatcaaggcctctgctcctgttatttgttcttttgccatataatatctattcttttttattagtcaatgattctcacaccgcccttgtctgccgaactcaccatggcggcataggctttcagactcttcggtacatagcggttgcgggtcaccggagtcatgggacgcgccgcaagctcttcatcactcagtttcacattgatactgcggttcggaatatcgatttcgataatatcgccatccactatctttccgatgttgccgcctgcggcagcttcaggagaaatatgtccgatactcaatcctgatgtacctccgctgaaacgtccgtcagtaatcaaagcacactcctttccaagatgttttgatttgatataagaagtaggataaagcatttcctgcataccgggaccacctttcggcccttcgtgggtaattactacgacatcaccactgaccacctttcctcccaagataccctcgcaagcagcatcctgtgaatcaaacaccttggccggacccgaaaacttccagatactttcgtccactccggctgttttcaccacacaaccgtcctgagcgatatttcccttcagtacagccaacccaccgtccttgctgtaagcgtgttccaagtcacggatacaaccattggcacgatcggtgtcgagttctttgtaagcagcattctgagagcccaaagtaatattgaacttattacccggtgcactagagtaaatacgtttagcctcagcatccggttcatctacggtcacactgtattttctgatagcatcggccagtgtcataccatccacacggttcacatccgttttcaacagaccgcctttggccagttcacctaatatattaaggatacctcccgcacgatttacatcctgaatgtggtatttctgtgtattgggagctactttgcaaagacaaggcacacgacgtgaaagcatatcgatgtcatccattttaaagtccactccgccttcgtgggcaatagccaacaggtgaagaaccgtattggtagaccctcccatagctatatccaacgtcatggcattgaggaaagcatcacgcgtggcaatgcttcgcggcaacacgctgtcatccccttcttcataatatttatatgcattcttcacaattaatgcggccgcatctttaaacagccgggtacggttggcatgagtagccagaatcgttccgtttcccggcagtcccaatccgatagcctcattcagacaattcatagaattggcggtaaacattcccgagcaacagccgcaaccgggacaagcattattctctatttgagccacctcttcatcactgaccgatgaatctgccgatttaatcatcgcgtcaatcaagtcgagatgccggttgttccattctcctgcttccatcggtcctcccgatacaaacacagtgggaatattcagccgcatggccgccataagcatacccggagtaattttgtcacagttactgatgcataccatcgcatccgctttatgggcattgaccatatattccacgctgtcggcaatgatatcccggctcggcagtgaataaagcatcccatcgtgccccatcgcgataccgtcatcgatggcaatggtattaaattcggcagcaaagcatcccaacttctcaatttcagccttcacctgctgacctatctcgtgcaagtgcgtatgtccggggacaaattgcgtaaacgagtttactattgcaataatgggttttcccatcatttctttcttcatgccatttgccacccaaagggcccttgccccagccattcggcgaccttgtgtgctataagagcttcgtaactgatttttcattttattctattgtctaaaacgtcctaactttcttttactaaaaaagcctttctcattcatgtgagaaaggccttcaaatatatctttatatgtacaactacacatacacaacctttctcactctcccggtgtaatcaccacgaagcgaataatatgcaggactgccaggttatttagagtagtaacgttcatatatcttttttctttgttgctttgatgagtgcaaaggtaaagcgtttttcgtaacaaacaaataaaatgaagattttttttcttataaattattattcgtaaccaaacaggcttttaaataatcattttatcacaaagccgtgcgttttcttattaagacctcctgaattttcaaaaggaacatatactgtatacaggctgctttctatcaatctcttgtttaatgcgataaaaatcataattgctcttatgattaactttacagccataagcttccaaagccatcattgcatatccaattttagcttctgaattatcaccatcatatttcaataccaacaagaacatgattattatatataaaaaggcaaacctgaaaatcacacaagttacaccggccatagaaaaacatataccaaagtctattaatataaatagaataacccgtcgggatatgaattaatttgtatctttgcacatcgggaaagcaattcccgcacataattcagtacatttataatataaaaaacatggaaaataagtacatcaccgtagcatacaaactgtacgttatgcaagacggtcaaaaaacattagtagaagaagcaaccgcagagcaccctttccaattcatttcgggattgggaaccacgcttgaacgttttgaaagcgaagttgccgccctgaacaaaggcgataaattcgatttcgtcattccaagcgcagaagcttacggagaatatatgcccgaaggtgtacgcactgtatccaaagatatgttcaccatcgatggtgtctttgatgcagaacgtatcttcgaaggagccgttattcctttgcaagacaatgaaggacatcatttctatgccactgtgggcgaagtgactgccgacacagtgactgtagacctgaatcatccccatgcaggtaaagacctgacatttgtgggtgaagtaacagaatcacgtccggccacaaatgaagaaattcaggaaatgctgaatgcaatgagtggtgaaggttgcggatgtagttgcggagactgcggaaacggttgcggcagccatgacgaaggttgtgaatgtggacattgtcattaagacaactcggaaaagattctgcaaaaaacactaaagtgttttacaaaaagaccttggagttttttttaaagaccttgaactttaacaaaaactccaaggtctttttcgcaacgtaccgaaagcaaacaccactctcggtcaaacatgcgaaaccgcccatcggaacaaacaaattaaccatctgatttttaaatatatagctctatttttaggaccactaggaccagggcccacctttatgagtttttgaacctgcatttatagaaattgcaacgtatattcacctatcattcaacaatttacaccttaaaaaaacggacaaggcttttgggtaagattagaaaaagaattagaagtaggtattcatagtataatagtccgttaatttttgaattaacatttatgctgcaatggctgcaaatctaatcccttcttcccatagctttcgatttatttccttgtcaggctcaattcctaaaatggaaataaatcgtcgcataagaaaaatgttgtggcacaacacttttaccgacatcatagaaaaaagtagcacttcaagcatgaacttctcacgccatttgtttatctttgccatttaatcagacagagcagcgttaattatcgcatatattagtcaagttcgtttctattcattattatagatgtaggaaacctttaatataatgaatcgggaggacttgacctactttttatttaaaatttaacaggctgttgtatatgcataaaaaaatcttctttgggttattgattttatatatagttctgccattgcaagctcaatatgttgtgaaaggtaagatagttgatataaataaggaggaagtgcctttttctaccattcagttgttgggtacggattctgttttggtaaagggatgcatttctgatagcttgggcatttttacatttcctaatgtacaatccggaaaatatattgtaagaatcagcaacgttggctattccactttgtataaagacatacaagtgtcggattctgacaatactttagcttcttttgtgttggacggcgatgatgtcttgctggatgaagttattataagaggaaattctttaatacgtaaaaaagatcatgttgtggtaattccggataaaatacaaaagaaacatgcttattccggctatgatttgctttataacttaatgattccgggacttaatgtaaatgccaacaaaggagttgttaaaacggcaagaggagaggcaactctttatataaatggtgttaaggcagaattgcgtgaaatacaaaacctacgcccgaaagatattgagaaagtagaatattatgatatcccttcgggcatttatatcggggatatagcttccattaattatgtaacgaagacatatcaactgggcgggtatgtctcattggacggatggcagaatattggctatctttccggtaattacaatttgggagcgaaactggatcgcaacaaatggagctataccttttttggtggatatggcatgaataaatataatggcattcaggaaaacaaaacggaaaagatgaatatatcagattcctatatccatagaacattagtcaatcaaaacgctcttttgcgcgataatcagcaatatgcacagtttaaggtaaattataaagcggagaagtataatatctatgctcttgcaggactggtgggcaaatctactcctgagaataatcaaagtaatctgctgcattatgaaaacaatacgtatgaggatgtcttgtctttgagttcgacaacagaaaagaacctgaaaccttctgtgtgtgtggatggcatattctatcccacttcccggcagcgtattcatataaacataacgggaaattatgcacacaatacgtatagtagaatttatacggaaaacaaactgaagtcttttactcatgccgatgaagacttatactctttcagggcactgggagtatataatatgacatggaaaaacagttcgttaggagtcagttttttgcatgaccaccatatatcctcatctttatatgagggtgactaccgctcatggcaacatttgtggagaggggagtctctgcttaatttaagctatatgcagcatctgttcgacaataagataactttgatgattaatcccggattctctttattaaattataaattacatactcagcctaaatgtcaggattggacattccgcacaaattcttggattcggtatcagttgcattccaaccatcagttttccttgggatttgctatgggaaatttccagcccgatatcagttatgtgaatactgccgatcagactattgattttttgcgtattcagcgtggtaatccgaatcttgccaacccgactattcaggagtacttttttacttatgacgcaacgcttaatcctgtaaatctgcaaataaactcttggcacacccgaattaaaaataatgtatctgtagattattattcagaaggagaaaagctgataagcagttatttgtctaataccacatacgataaatggaaactagagttgatagcttcgtgccgtatatccgacaagctgagaatcaattcaaccttaaagtacgagaaatttaaagttgccggtgggcaaggattgtcaactgataattttatggcatctttgcaggctaattattttataaaatcatttacattgagcgcatggagcaaaagcacggaaaagacattggatagcaggaagttggcagtcatgaaatctccggctctatatggggtctcattacgttataataaagctaactggatggcagaaatgggaacagagaatccgtttactcataaaaataattatcgtgaatactcttgtacaaatgcttatcagtatgagcaatcaagaaccagtcgtatataccagcaaaccgcttatgtgaaactggcttatactttcgacttcggcaagaaaacctctcgtgagttcaatagtgtggatagaagcattaacagcgcaatattaaaagcggaataaagaaatgagcccttacagcgaaatcaccatccattaccagttttcttctttggtacagaaagaaaaatacctgttgtcttacaacgggcaatattatgaagccagccacgcctttgtgaaactggtgggaggactgcaacagcaagagaaggaagaagcgatgagaaagtagcctatgtttatccttgtttaaaatgattttcatgaaaaaaaagatttttataaagacagcaaattggagaatatcaagagagaattttaacggagccgtgttctactataaataaaaaataaagcctttataaaccgattccgaaaggcagaaaaacgaccggaaggcttgtacgcctaaagtctttcattatcaagttgttataccctgtattttaagaccggaatcacacataggtggtccttggtcccagtggtcctaaaataaaatatattatactgataatcagccacattcattcaatcaagacagcgatatccgatacccattttttaagaggtatatccggatgaatatctatactgataatcgattatttcatttatttaataaagtctgtacctattccccaaacaggttcggcagcgatagatattctgcaaatattcatacggttccattttatttctaccctgccggaaggaatgaacatacataagtatttcttaatgaagcttgaaaaccgaaaacaagaacaagcggataagttccaatagaactatgtttttcaataaattttagattaacaccgcaaatatacaatatttttaagaaaacaaagaagaagcacttcgtttttctaaaaaaatatcatttttataaaatatcaaataacaaatataagcaatagaatgctattcagcatacctgaataaccttttatatcccaatttcatccttattctaaggtaaactactattaaattgggtagaatataagggtctcagttaaaacattctactcctttttctgctcaaacagtctgtttatcatactattttttcccattattcttaaaaacatagttctattggaacttattccgctcatggattcacatgtttttcacaaacaattaaataatagtaatatgttaaaacatctcaaatcagtcggtatgttactattcctctcaactatcagtggaggagcagtttacgcatcatccggggaaagagtgacgggtattgacgctgtccagcaaaacggcacatgtaccggagtcgtaaaagacggaacaggtgaagccgttatcggtgcatctgtggtagtaaaaggaagtaccaacggtaccattacaggtatagatggagactttaccttgaacaacgttcccaaaggaagtacattggtgatttcttttgtgggatatgaaacgatggaagtaaagtggacaggaactcccttgaacatcatcttgaaagacgacacacaaatgctagatgaagtcgttgtagtgggttatggtacacagaaaaaagtaaatgtaaccggtgccgtgagtatggtcgactccaaagtgttggaatcacgccccgtacaaaatgtggcacaagccttgcaaggtcagattccggggttaaatatgtcagtgggaaacagtggtggtgcattggatgcttctcttaatatcaacatccgtggtgcaggtaccatcggtgacggttccagtggtaaccccttgattttgattgacggaatcgaaggtgacatgaatacggtaaaccctaacgatattgccaatgtgtcagtactgaaagatgccgcctcttcttctatttatggtgcgcgtgctgcattcggtgttattttaattaccaccaaaaacggtatcagtggaaaaacaagagtcaactattcaggtaatctccgtttttcggatgccatccaaaaacctaatatgaccaactcatgggattttgccacctatttcaatgaagctcaacgcaatgcatacggaacagtcatcttcgatgaagacgatatgaaccgcatcaagacatacatgagcggaggttacaccgaccccaccaaaccggagtattacggtacggtagccggtagcaacggacgttggcagaactatggaggcgcatttgccaataccaactggtttgatgaattctatgaaagttgggtaccttcacaagaacataatttaagcatcaatggtggtaatgaaaagattacctatttgttaagtggcagcttccttgaccaaaaaggtctgttacgtcatggtagcgacaagttccagcgttatacactgaatggaaagatttcggtgaaacttgccgattgggttaccatgaactataacaacaaatggacacgcgaaaactatgaccgtccgacttatatgacaggactgttcttccacaatatcgcacgccgctggccgacttgtccggttgtcgatcccaacggacactggtctgccgatatggaaattatacaaatggaagagggtggaaaacaaaccagtgaaaagaactggataaccaatcagattcaatttgtattcgaacctatcaaggactggcacatcaatgtagaaggcagcttgcgccaatacaatgaaaaataccattgggctgtactgcccatctacggttatgataccgacaacaacccgtatccgttgtcttggaacggaggcgctgccggttattcggaagtacaagactatcgtgccagcgaagactacttctcaaccaatattttcagtgattattcaaagaccataggcgaccattattttaaagtaatggcaggtttcaatgccgagctttacaagaaaggcggtctgaccggcttcggtacagaccttatcactcccagcgtgcctgaactgaataccacacaggataataaaaacgcttacaacagtgcatccgaactggccattgccggtttcttcggacgtatcaactacaattacaaagaacgctatttgttggaagccaaccttcgctacgatggttcttcacgcttcatcggtgacaagcgctggggactgtttccatcgttctctgtaggatggaacatttcacgtgaagagttcttcaagccgctgtcaaacataattggtactctgaagctgagaggctcatggggtcaattaggaaacaatgaaaccgaagcctggtatccattcttccaaagtatgcctaccggaaccaccaactcgggatggctgatcaatggagtacgccaaaacacagccggacttccgggcattgtcagcagtgtactgacatgggaaaccgtagaatcatggaacgtcggtgtagacttcggactttttgataaccgactgaccggttcatttgactactaccaacgctatacttacgacatggtaggtcccgctcccacccttcccggtattttgggtgcatctgctccgaaaataaacaatgccgacatgaaatcttatggttgggaaatggaattatcatggagagaccgtatcgaagacttcaactacggagtacgcttcactttggccgacggacaacgtaaggtactgaaatatccgaatgaaagcggtgatatctacagttggtacaacaacaagctggacggaaccatctggggatacaccacagtaggtatcgcacagactcaagaagagatgaatgcccatttagccaacaacaaacccaactggggttcaaattggggcgccggcgacattatgtatgccgacttgaacggagacggagaagtgacttccggttccaaaacccttaacgaccatggtgacctgaaaatcatcggtaacagttatgcacgttacaatttcggtttcacagtagatggctcgtggagaggattagacttctctatcttcctgcaaggtaccatgaaacgtgattattggctggacggtccgtacttctggggagtcagcggtgacgaatggcagtcagcttgcttcaccgagcacttggattattggacacccgaacacaccaatgcttattatccgaaaccatacttcggaaatatcaagaagaatcaggaagttcaaagcggatatttacagaatgcagcatacctgcgcgtaaagaatgtacaagtaggttatactttacccaaaagctggactaaaaaggctgccatggaatctgtacgtttctatgtttccggtgacaatctgctcacttggacaggtatcagctccatattcgaccccgaaacattgggcggcgactggggaccgggtaaactatatccgttgcaaagaaccttatctgtcggtgtaaatgttaacttctaaaaaaatacgaatatgaaattaagtttaaaacatatctacatctgctcacttatcggtctgggagcatccacattggcttcctgcaatgactttttggatcgtgagccgataaccaatgtaacccccgaagcctatttcactaccgtagatcaagtgggtgcatacgttatcaactactactcttatctgcaaaactctcgccagcagtctctttaccatgacaagaactggcgcagcggtatgacactcaatgacaataataccgacaacctgttttcacaaacaggtgacttggactattttgcaggagaaaaacaagtaccttcgggaaagaactttcaaacttacacttcccgtgcccgtgtatggaactggcttcttgagcaaattctaccaaaagaagaagcgggaagcatacaaggtgacaagtctattctgagccactacatcggcgaagcttatttcttccgtgcattggcatactatcaggcattggtccgctatggcgattttcccattatcgacgaagtgctacccgacgatcaagccatcctgaaggaactgagtcagcgtgctccgcgtaatgaagtggcacgcttcatcctgaaagaccttgatacagccatctcacgcctgaaagaccaaggtttccagaacaaccaacgcatcaacaaacaaactgcacagctactcaagtcacgtgtggccttgtttgaagccaccttcgaaaaatatcacaaaggcaccggacgtgttccgggcgatgatacatggccgggaaaagacatggaatacaatcagggaaaaacattcgacattgcaggagaaataaactttttcctgactgaagccatgagtgctgccaaagccgttgccgaccattgcacactgacaggcaactctcatcagatgaatcccgttttgggacaaaccagcggatggaatccctacttcgatatgttcagccaagaagatttaagcagcatttccgaagtattgctttggaaacaatataacctgagcatcggttatacccacgatgcagcttacatcctatctgccggtggtgaccaattgggactttcacgcagctacatcacttctttcctgatgaaaaacggacttccctactatgccgacggttcgggttacaaaggcgacctgagcgtatcaatggaaaaagaaggacgtgacgaacgtctgcaactctttgtattcggtgaagaagacattgttcgttccgatcctgccgaccctgctgttgccaaaaataatgaagttgtgattctggataccattccattggtaacaagcagcgtagaattgcaagactttacaggataccgtcctcgtaaatactacaactatgattacgaccagtacaagagtaataccatcatctgtacgacaggagccgtagtgttccgtgctgccgaagcctacctgaactatatcgaagcatgctacgaaaagaacggttcattggataatgatgccgccggttattggaaagctatccgccgccgtgcaggtgtgagcgaagattatgaactgaccatagccaacaccaacttagacaaagaagctaatgtagtgagcggtaccgtatatggtgatttggcagtcttctccggcgaccaaaaagtagacgcaacactctacaacatccgtcgcgaacgccgttgcgaatttatctcggaaggtatgcgttgggacgacctgaaaagatggcgttcatgggatcctgccattaccggacactatatgctggaaggtatgaacttatgggacgaagcttacaaaaaatatgtagatgccaccggcaaatcaactttgatagccgatggaacaagtaatgctaacatttcagccgcttctgtcagcaagtatgtccgcccaatgggacgtaccgaaataaacaaccaattgttcaacggatatacatggaaaaaggcattctatctggaacctttcggtgtacaagacttcacattgagcgccagtgaccccaatgatgtcaaaacttcaaccatgtatcaaaatccatattggcctatgacagccggacgtgcattggaataagttggtaaataggtataacgataagaaaatgttaatgataatcattctgaaaacagaataatcgtcttaacataactgtgatgggaaagggggttcgagagaatacccttttctttattctttttcaaagaccgactcatttttaccttaaaaaatcggattcaacggagaggacagaaaaagagatgagaagaagaacggtctattggcaacccgacataaagataaaaaagggaaaagcagatattatctttacggctcctccgcaagcccccccctgttaatggtgatacagggcatatccgccaatgggaaactgataacagcaaacaaaatattataatcatttaaatagtatcgatttatgaaaaacctttatttaatttgccttttatttatcatttccgcctgtggaacacctaccacagaagatcggattacatttacacaagtagacccctttctgaaagtattcagagaatcaaacttcttccccgagtataacgagacagaagaagtggctgcaggcgagcacgccaccttccagtttgcagtgagagccgcactgccattgaaggaattgtcggcacaggtcacggcgttcaccaacgaaaaaggaacacagttacaaagtagcccgcgtacgggttttgtagattatgtgcgggtgggccggcagacacccgaccgtgccaaagacgccatcacctctctctcacactactatcccgaccccattatcgagcaaaacggacaatccgtgacacgtgatgtggcgcaacccatctggatttccgttcccgttcccaccaatgcggaagccggaacctataaagccacattcagcctcaaaggaaaaatgggcaaccaaacctttgagttgaaaaaagaaatcagcgtaaaagtttaccccatcgtaatgccccaaccggatttatgggtaaccaattggtttggcacatcacccgacaaaatgaaaatattcaatggcgggaaagaggtggaaccttactcggacgtttactgggaaatggtacaagaactggccgacaaaatgaaagaatgctattccaacgttatcctgctctcaccgctggaacatatcgagtttgaagaaaaagacggaacctatactttcgactactcgcgattcgacaaaatgatagacatcttccaccgggccggtgtattgaaaatgctcgaaggcggacatatcgccggacgtacgggagactggagcagccaattcgcaccctatgtccctcggtatgagaacggcaagaagaaattggtgcaatatcctatggaatcggaacaggctgtcaacttctatcgccagtttattccctcgcttgccgcccatctgaaagaagcatatccgaaagtactgtatgcacaacacattgccgacgagcctacaagcgacaatataaaaagttatgtagctatcgcccgatttgtgaaacagcagtgtccggacatcaaaatcatagaagcttgccatactcatgatcttgagaatattctcgacatctgggtgccgcaactcaacttctacaaggagggatatgacttctatcgcgaaagacaaaaacagggagacgaaacgtggttctacacctgccttgctcctcaaggcgactttgccaaccgtttcttggagcaaccgctcatcaagacccgcctcattcactggctcaacttcaaatatggggcaacagggtatctgcattggggattcaaccaatggtttaccggcaatgatccttacaaggaaacaacccgcatgaatgaggaaggaggcaatacactacccggaggagacagctggatagtctaccctaacaacggaaaactgtatggttccatccgtctggaagctatgcgcgacggtattgccgactatacgcttctgaaaatgttggaaaagaagaatcccgaactggcacgggaactctgccggctggttgtattccactggacactgtatgataccgagagcgaccatttccgcaacatccggcatcaaatattggaagagttaagtaagtaaatttacagatgccagattaaaactgtgggagtgtgtcaaaactaaaccgacctatcccatcgtcagtcgtaggggcagggtttgcctgcccgaagacacaaagcaaactgttttcgggcgagcgaacctcgcccctacgaacgaaacgacagcattatccacgttttgacacacccacacactgttatcatggtaattattccggctacttctctataatgatgctgtaactcacatcaaacacctctttgcttcccaatttctgaatccattccctgtctttcagctctccatcaaacccgacggcatcacaacgaccataccacggttcaatgcagacaaacggacaatcaggatgagctttggcaggcgaccacaacgccactagcggagtgtcaaactccagactgatatgaggttgcttcttcctgtccagcaaggtcactttcttgagttgcgcatcctgaaagatatatgtatcacagtcaaacgtatgtgtatctattttcatcagtccgtccacatcccgttccaatgtatgaagctccggtgacacgcaccccttctccaccggaacgatataccgcagttcctctttactgtcgaaagcaaagaatccacgttcgtctaccgatgcatcaaatccggggaagttaaaggcaggatgagcaccgatttggaaatacatatccaactgcccaaggttctctacacgccatttgactgtaatccgattgccttccagcaggtagccaatcatcaaacggaagggaaaaggatattttccaagcgtttccggagtcgactccaaccagtaaactattccgtcctctcctttgtatgtcactttgaaatccatatcacgggcaaagccgtgctgccccatccggtaagaattgcccgcatagcggtaagtgtcttcccacacacgccccacgatgggaaagagaacaggtgaacggcgtccccaaaaacgggtgtctccctgccacaagtattcttttccatttttctgaatactttgtaattcagctccgtgctcactgacaccgacggtaaggacagaattagatattgtttccattttattcttttttttacttagatgtttattttcgggtaaaggtaaggatgtttcatgatatgacaaaacgaatatagaaggattattttcaggagtcttcgcgcaacatataaccttttctcatcagtgagtctatcttgactgtattgtcattgcgaagtgccctccgcagataactaatctgcacgttcaacgcaagagagttggcatacgaggatgcaccccatactttgttaagcagactgtcacggtcgacagatacattcacgtttttggcaagcatccggagtatctctgcctgacgcgaagtgataagagtcttgttattgccggtgcgtatttcgttagtagtataattaaacactgtattcccgaaactatacatttccgtctgcaccacatcatcgccgcactgaaaacgctcgcggatgcgggcaagcagttcctcaggatagaacggcttggcgaggtaatcattggcacgaaggtcgaatcctttcagacggtcagctttatcactgcggtcggaaagaaaaaaaagcaacacattacggtctagggcacgaatgtgttcagccacttcaaaaccgttcagttcgggcatattgatatccagcaaaacaaggtcgggcttcacggcaggaaactgttcaagagcgatgcgaccgtttccggcatatgtcacttcatacccttcggcttctagaaaacgtttcaggagcatggagtatttcaagtcgtcatcggcaaaaagtatttttaatgctttcattagtgtcagggttatggggtgaaacagtagttattgaggaaagcaaagcacaaaagtagtgcctttccccggttggctggtcagggttatcgttccgtggtgagcttcggtcagcagtctgacatagctcaagcccagtccgatacccggaatattacggtcgggaatattattcccgcgatagaatttatcaaatattttactctgctccgaagcagggatacctattccattgtcggatatggcaagggtcagtgtgtgtgcctgcaaggtgcacgaaatgctgatagcgacttcactgcccgaatatttaatggcattctccaacagattgctgatgatgtttgccaaatgtacggggtctgccgtaaccagctgagtggtcatgtcaaaatgcggagtaatcacgacattctttcctgcgggaatgttgcagagacgaatcagtttttgtatcgtttcacacacatcgaaagtacggatattgagtggtgtatgttcataatcggcacgcgtcatatctcttactttcgccagataagcagacaggttgtcaatctcaaacatggagtccttcagcacttcgtccatagcggcctcatctgtgcgcatggatttattgttgaggaaggcaacacacattttcagtgtctgcacaggacgtttcaactcatgtatcatcgtgttcacaaaactcttcctcatttcatctatcttccgctgtttcagtatcgtcttgatttggtagacaaggcagcagacgagcaccagcaccagcaagatgcctccggtgagttgccacatcatttgcttaagtaacggattgacaggtacggtaacaatagccgtcattgcctgcttcaccaagggattgtaaggataagtaacaagcatacgaggaggaaacaagttctccagcgaatggtaagtgccgcgccacagggtggaatcaatgttcacctgccgtatatcggtagccgtgatatgattggcttcaaaaagagaatcgagccttgtaacggtgagaggaaagctcagttctgtagagaaacggctcgtcgcctcaaaaataagttcgctgggaatattgtaggtcggcacactgaatgtatcgcgacgtatctctttttccttaaaggcatcaacagctcccgccgccagcgaatcaccctgactctgcgtaaatttctcgtaaagggtaatgacacaccgtgaatttcctttactgttggtcaagtcgggcatttcgatgctgtaactcaaagtcatcggagtattgacggtacgctgcttgtaacgtgcctcaaactcggcattctccagtttcagaatttctgcatgaagattacgcatgtgttcgtccgccgaatatccatattgattgtaaagccagtatgcctgtccgcctataatcagcaaagccgtgataatggtaagtatccagaccgtttttatttgcttttccatattcttttcttttcggcaaaggtaaacggtatcggcggatgtacaatgtacgcgaggagtttttttagactgcgtaatatttcagtaataacttccgacctgccaaaagaaaggaaaaggatagctttgcagcatgagaatcataaacctcaaacttttgtaatatgatgaaactgaacaagaaaatcctgactctgatgctagttttcggagtctgtgccacggctgccgttgcacaaatcacagtcgtcaccggtgacaatatcaagaagagcgaaccgatagacgaacttgtcttccgcgcccagtatgaattgaaaatgcttgaagacaccacccggtcagacagcaaacccaattcggaaaccatgatgcttgaagtgggaaagaaatcatctcttttttacggctataccacctatctccgcgactctgtccttatggaggacgtgaagaacaacgtgtctcaggaactcatggccgaacatacctccgcatacggcaatgcccgcatcacctatcgcatctacaaaaaccatcctgccggaaaagtaacaacgctcgaccgtatcgtgactaccaacttccgctgcgaggaaaaaaacgacaagccgcaatggactctcctgcccgataccgccactatcctgacttatcggtgccagaaagcctcctgccgtttccgcgggcgcaactacacagcatggtacacgacggaaatccccgtcagtgaaggcccttggaaactgtgcggactaccgggactgattctcaaagcagaggacagccggggacattattcgtttctctgcaccggcctgcaacagttcaaagagtccaaaccgcttcttttcaatgccaaaggctatgaatccataagccgcaaagatttggataaaatctacgaacgttacttcaaagacccggtgggatatgttgccagcacagctcccaacgtgaaagtcactgtcaaggatgaacatggaaatccaatcaagaattacacgataccttacaatccgatagaactccccgataaataaaattccaacacatgcgctccaccatgaaaacagcaatcattctctctatgctggcactgatgtgcaacatcgacacaaacgcacaaaacacgattgaggggcgggtgaccgataaggaaacccgccaacctctcgaatcggctactgtcatcattcaacatactgccgatgcaacggtcatcaattataccttgacggataccgacggacgattccgccttacggtttcgtcgccccaaagtgtcaagctgggtgtgctctatatgggctacaaaaaagtactcctgcccatcgacccaactcacccgatggagatagcgctcgaacccgaaaccattttgctgaaagaggttcaaatccgccccgggcgtatatggggccgacaggatacgctgaaatatgacctcacacgctttacctcttctcaagaccgaaacgtaggcgatgtacttaaaaaactgcccggcatcaatgtcgaagagaacggaaccatcaagtataacggaaaggaaatcagcaatttctatgtcgaaggaatggacgtgagtggaggacgttataatcagataaacaataatttgaaagcagatgccgtgcagtctgccgaagtgatagaaggacaccagcccatcaagtccttgcggggaaagacctttacagatgacgttgcactcaatctaaagttgaaaccggaagcgcgctcgcaatggatttatacagccaacggaagcggggggtacggcgaagaggtactatacgacgcctcactcagcgccctgcaactgaatcgtaaacagcagactatttataattacaagaccaacaacacaggacgcgatatgcagtccgaacaagaagtgttggcggcaggcaacagttttgatcgtatcacagacgatggagctccctcctttcttccactacccggcatcacaatgcctctatcccgccaacggttgttgttcaacgacacccatacgacctctgccaaccgactttaccgactgacggaagacaagcaactgcgcctgctcttcaattacacccacgaccgtactacccagcaacaaggcagtgacgagacttactatttcgctcaagacaccgtccgcacactccacaatcagaactaccgactgctcacagactgtctgaacggtgaactgaattacgaaaataatgccgacaaccgttacacacgcgaaaacttttctttcacaggcgattggcaaaacggcttgtcagccatttcaggtgacaaaagtgtcacacaacagataaagcattcaggactagatatgaaaaactacttcagtcaactccatacccgggataaatatacatggggaatccgctcttttttccgttatagctatcttccctcatcactgaaactgacatttgatgacgaccggcaaagttccacccctcttcgggaatatcaagaaatgaatgtcagcaatgcctataccgacaactccctgtactggatgagaaagaaaaacggagtgaattaccaactcacgggaggttttcggggtgaactttcttccgtgaccggcccatattccgccaaccgctatatgttctacgccactccccatctggagtggaaccgggagaatatacttctgacagccgcactgtctgcccaatggagccatctgcctgaacagtcctgtcattatctgttcctgaatccttccgtgttcttccgctacacactcactccccgctggaaaatgtatctgtcaggcaatattacccgttctaccggaagattggatgaaatatatccggtttcgtatcgaagaaactacaggactatcataaccaatccgggcaatgtccccgaaaacacacgccaactctactctttctatctggaatataaaaatgccgtcaaggagttcttttggacagcatcgttcgcctatcttcacacagaccataacttaatgacacggagtgattataaagatggcatcttctatctttctccttataaaaaaagcaactctgacgaaaattacacgctacattctgtcctgtccaaaggagtatatgactggaatctgaaatcgtccgtcgaactgaccatgagccgtacaaaaggaaaacaatgcaatgacggagtggttcaagactaccgttatgactatctgtcggttgaacccaagataatatgggcaccttcccgactgtttgaagctgcgtatcaagccaaattgagttgcgggagttcaaaaataggcaacgacagacagctggatgctctgtggaatctgtcacagcgcctgatcctgagcataggatggggcgatactgatttacggctttcgggagaacatttttataacgatatcgaccgcacaaagcatctcaacacatggttggcagacgcttcactggtacagcgtgtgggaaaatggtgcttcacagcttccgtcaccaatttattaaacaagaaagaatatagttataccctctattcggctgtacaaagctctacctcatggataaaactccgcccacgcgaatatcttctttccatccaatatcaatggtagaaacttaaaagtaggacatttgtgcttcaatttctttctttttatgtatgtttgtaaacaaactattagcacacctactatgaaaacacgaataaagatgccgattggcttttggagtgtaatactgggagctatgtgtgtcatttcttgtggtgaaaaacagaaaagatcattcaatgcttttgacacatatctccaattctatcaagaagtcaacgattctttatccaagaatccccgatatgtttgtgccgaggcacagaagcatatgactgccacaaccgacagtaccacttattatcactatgtgatgttgctggccaaagcctatatgtttcggtcggatatggactctgccgctgtatgcatgaatcaggcagaagcttattgccaccgcaacgcacccacgcctcaaatatccgatttgtatgccgatatctataatatgcgcggaaacgtactcgcacgtcaggcattggtagactctgcggtcatttgtttcagcaaggcactcaactatcgattgaacggagacaggaaagaagtactgcccgacatttcgataaacctggccgatgcttacgtgcgcacaggacaatatgataaaggtgctctgtggtatcggaaatccttgtctttttttgactctctgggcactcccgaagccaaacgttttccggcatactacggattggcacaagtatatatggaactgcgcgacttcgaattatgcgattattattacgacatggctgcccaatggtatagcgaaatgatgccttacgaaaaatgtatttacctcaacaatcgtggaaactcctattacttccgcaaggattatccgcatgcactcgaaatgttcagaaaagaactcgcgtttgcccgcagttatcccgatatggctttcgaagttcatctgagtgagatgaatttgggagaaacattcctactgatgaatcagacagattccgctgctttctatctggctaagtgtgaagatttcttccggtctatcggaaacatcagtgcgctctattatctggatacacaactgatagaactggcactgaaacagaataatctcgcattggcgcgcaaacgtcttgccgaagccgtgaaacccgattatgtggaacccaacatgcttcacatccgtaaccggtatttacagcattattacgaggaaacgggagattataagaaagcttattattatcagcgggaaaaccagcgcattgacgactccacccgtaatgaacgcatcaagatgcgtaccgccgaaatcgacttgaaataccggcaggacactacgctgatgaagcaaaagatattcatccagcagaaagagaacgaggtattgggacttcaccagcgtatgtatgtgtggatgtccgtctgtttcctgatattaatattggccgtctttatctatctttataataagaagcaacgccacctgttcagaatgcgcagccaacatatgattaacacgctgcgcatggaaaatatccgcaaccgtgtttcgcctcacttcatcttcaatgtgctgaacagggaaataaacagccatagcaacggatacagcgaaaatatgcggcagttggtgaagttgatgcgccgcaaccttgagctgaccgaacatctctgtgtcacattggatgaagaactagactttgtacatacttacattgatttagaacgtaaatcaatgggagataccttcgcactttctctccatgtagataaaacaatcgacctcactcgcgagattcttccttccatgatgatccagattccggtagagaatgctattaagcatgcactgagggagaaacaggggaaaaagaacctgtggattgacatcaggcgtgaaccgacaggagctatctgcatcaagataagagacaacggaggaggatataaggcaaacagccataaccggggtacgggaaccggtatgaaagtgattcttcaaacagttcagatgctcaacaacaataacaaaaagcatatagatatctctatcaataatgtgccattggaagaaggagaaacagggtgcgaatttgttgtgatacttccccaaggctacgattacaactttttaaaagctgtttaatagctattttcacacgaatagttcctgtttgacgcctaatatccataaatacagaattgtcggtttgtatcttaacagatgtttctctacttttgttttattaataatagcaaacaaattatatggacaggctttataaaatattgattatagatgatgatgagtattcggcggataacctttgtttggagctaaaacgttacggtcagttggtggtagagggaattgcccgtaatggttctaacggaaagaaaatgatagataagcttcgtcccgatatcttatttctggatgtagagttgcccgacatgaaaggaatagaactgttagagcaaatcaacagttgtgtcacgtggaatatgcaagtgattttttatactgcctacgacaaatatatgattaatgccatccgtgaatctgctttcgattatttattgaagccgatagaccgtaaggaactggaatgcattattacccggtttctgaaaaagatggacgaaccggctacgccgatggctattccaccccaagtatattctaccggcgaacatacatttatgatttccactcccaccaatgatctgcgtgttctccgttctatcgatatcggattcttccgctataactccgaccgtaaattatgggaagtagtattgaacaatcaggttcccctgctactgaaaaagaacaccacagcacatcagataacagagtacgctccctgctttgtgcagatacatcaatcttatatcatcaatattaattatctgataatgataaaggagaatcgttgcgtcatgtaccctcctttcgagaagataacagagctgattgtttcaaagaagtttaagaaaacattgcaagactctttctatcagttatgaaaattgcaaggaagaatcgtatggaagtgtgtcaaaactaaaccgggctatccacgttttgacacaactccataattatgtgagtatcatttctttttcggatagttaggtccgtagagcatggtcttttcacgcaccaccaattgtccgtctttcacaaactcctcgccacgttcgctcagatggcgcaccatttcggaacgcatctctgccaatcgttttttatattttttgtcattgacagcattatgcagttctttcgggtcttttaccatatcgaacagttgttcttccccggtatggaaataccaaacgtatttaatcttaccgtctgtcagggcacaccaataattatcggcactataacatgtagcatgttccaaatcgatatatttgcgccagttggttgctgtacctttggccaatgccagcaacggacgtccgtccatatcagtgggaacagttaccccggctgtttcgaggaaagtaggaagaaggtcgcgaagttctacaggagcatccacctttcccggaagtaccttctctgctgcaggccatttcacgatataaggaatatgtgtagagccttcatacggatatgtctttctccaatgataatggtctcccatcatgtcaccatgatcggagacaaaaattatcaaggcattatcatacatacctttttctttcaaagccttaatcacgcgacctatctgctcgtctataaacgtgatattggcataataataacgttttgaattacgcgcatattcgttaccgaagttgccgtaaggagcatctttagcagccttttcgggagcaagttcctttgcccatttaccacaccaatcaccgataaacggatcgggcacctgagcatctttatacatatctatatatcgctgcggcggatcatacggactatgaggacgtgcaaaagataccttcaagaataatggtttctcactattgtcgtagttttggataagttggcaagccatctctcccgtccaataggtgggatgaaggttttccggcaacttatagttggaagcactgtggtcgttccaaccgataccggtctcatcgggattctttccgggagcctgtatttggaaccactggcgatagtcactggtaaagttagggtcttctatacgtccactttcatccaacagggttccttcaaaaccgtgtttgatgcgctgcggatgccaatgcatctttccaataccgaaagtgtaataaccggcatctttcatcatctggggcatctcatatttatattcgggagatacttctccataccccaacaagccgtgatgccagggagaaagtccggtgagcattcccgcacgggcaggagtactgctggggcaagaagaatacccattcataaacagtgttccctcgccggccaaccggtccagattgggagagatgacagcttcattacccatacagcccaaggcatcgccccgttgttggtcagtcattatcaagataacatgcggatgtttttgcgcgtaagcaaacgaagaacataatccggctgtgacagccaatgtacatttcaaattggttacaatactcatatttattttggtttttcatggtgttatgcagcaaagataataaattatcagatacattgagctacaaattagaacggaaaaggtttgatatgcatcaaattgttttatagaaagctttatcgtatctttgtaaccgtttaataaacctataaaaagatgaaaaagaaaactttactgaaaagtatttggattttattggtgatgtgtggggtgtctgccaatgccggagctcaggatttgaaatctatattgtcgggagtggcgaaagctgttgtcggaaataaggctacaacagcttcttccattatcggcacatggacatactccggtcctgaatgtcagttcgaaagtgaaaacctgttggcaaaagccggtggtgaaatggctgccaaggaagtggaagagaaaatgatagccgtatataacaaagtgggtatgaataatatccggtacaccttcaatgaagacggaacttactcgtatcagatgaaaaaacgtacggtcacggggagttatgtatttgatgacgccgcgaagacaatcaccatgacaggcaagctgggactgaagacagtggcttatgttacggtaacagggaatgacatgagtatggtattcaaagcagacaagttaatgtccattctaaagaccattaccggagcagcatcgaaagtgaactccaccgcagctaccatcaacagtgtggcggaagcttatgacggtctgatgctaggctttgagctgaagaaataaaccatgaaggcatttatagtttaggcatggattccacggaagattagttccataaaattcatgcctaaacatataacaaagtactttattctttatccttcagtgcggcaaagataagtccttccaattcttccgccaattccggattgtcctgaatcacctgtttggaagcatcacgaccttgtcccagtttggtatcattatagctgtaccacgaaccgcttttcttaataatgccgagttcggctcccaaatcgataatttctccggctctagaaataccttcgccaaacataatatcgaattcagctttgcggaaaggaggagccactttattcttcaccacctttacacgtgtctgatttccgataacttcctcgccatctttcaactgtgtggcgcgacggatatccaaacgtaccgaagcatagaacttcaaggcattaccaccggtagttgtttcaggattaccgaacattacaccgattttctcacgcaactggttgataaagatacaagttgtgttggtcttactgatggcagaggtgagcttgcgcagtgcctgtgacatcaaacgtgcctgaagtcccactttattatcacccatatcaccttcgatttcagctttcggtgtcaatgccgcaacagagtcaataacaataatatcaatggctgaagagcgaatcaattgttccgcaatttccaatgcctgctcaccattgtccggctgtgagatccacaggttatctacatccactcccagtttggaagcatagaaacgatcgaatgcatgttccgcatcaataaaagcagcaattcctcccgctttttgagcttcggcaatagcatggatagccaatgttgttttaccggatgattcagggccgtatatctcgatgattcttcccttcggataaccgcctacaccgagtgcagcgttcaaggcgatggaaccggtcgggataacctctacctgctgaacgttttcatctcctaatttcatgatagagcctttaccgaagttcttctctatcttatccattgcagcttgcaacgctttcaatttttcgctagctccggaacccggtcctgctgtgaatggaatttcttcgttatcttttttagccataagatttctttttggtctgttaagtaaattataaaatttgttgggcatgttcttttgtcttcacctctttgggagaaatgacgcgctcgattacaccctcttcgttaataataaaagtagtacgaaaagtacccatatatttgcgtccgtacatactcttctctccccatacgccaaactgctccaccaatttcttgtcggtatctgcgattaaagtaaaaggcagttcgtttttctcgataaacttctgatgcgatttggcatcgtttacactcactccgattacctcataacctttagcacacagttcggaataattgtcacgcaagttgcacgcctgtgcagtgcaaccggaagtcatgtctttgggataaaaatagagtactattttctttcctttgtaattgctcaaacgaatttcttctcccttttcattcagacccaatatttcgggggctttgtctcctacgttcatattccattcctgtttttaaagttccaagtctccgtccaacacttcgtgccaaggcaaaccctgcttattgagctgttccatgaacgggtccggatcaaactcttctacattccatactcccggtctcttccaaagtcctttcaagaacatcatggcacctatcatggcaggtacaccggtagtatagctgacaccctgcatgccggtttccttgtaggcttcctgatggctacagttattgtatacatagtaagtacgttctttaccatctttgacaccacggatacggcaaccgatagaggtttcaccttcgtagttttcacccaaatcctgcggattgggcaatacggctttcaggaattgcaaaggaactattttcacaccgttataatctatttcatcgatacgtgccataccgatattctgaattacacgcaaatgagtcagatattcctgtccgaaagtcatccagaagcgagcgcgcttgatagtggggaaattcttgaccaacgactccagttcttcgtgatacaacaaatatgaatcacgaggaccgatattgggataagtcaggtccttatgaaattccaacggcttggtggtcacccatttgccgtcttcataataacgtccgttttgagtgatttcacggatattgatttcgggattgaagttggtagcaaatgccttatgatggttaccggcattgcaatccacaatatccaaataatgcatttcatcaaagtggtgtttagcagcatacgccgtatagatgccgcttacacccggatcgaaaccgcaaccgagaatagctgtcaggccggcttcttcaaaacgttgcttgtaagcccattgccagctgtattcgaagtgagcttcatctttcggttcataattggcagtatccagataattcactccggctttcaggcaggcttccatgatggtaagatcctgataaggcagggctacattaataacgatttcgggtttgaaactattaaaaagctctaccagttcatctacattgtctgcatcaacctgagctgttttaatagcaggattaccgattgctttaacgattgcatcacattttgatttagtgcggctggcaatcataatgtctgtaaaaacatccggattctgagccactttgtgtgccacgacagtacctacaccgcctgcaccgataattaatactttacccatttcttctctttaattaaaaataaattgcccggcaaaacataccgttcaccgggcaaagataacaaaatattttgggtattagttgatacgttccagtttcttataagtaaaatccaaggattttctttgatagtaccaagtttcatatcctcccgttaccttatgcacgcggatggggtatcccaaagacaagcgacattcatctgttgtcatgcccttgcgcacttcaccgtggctgattagatcccaggtttcttcggtcgtatcgggatatttggcacgcaggtcgccaatgccgaacacatcggcaaaatagccatcattacgcaaggccagattggtgacacttgcatgtacgaaagtcgtctttatccggtaaagctttccgtctgtggcagtcaaatcaagcgtcacggactgacttccgttttccacaataatatttttaatgacaaactgcgtgtatttgggcaatttgactgtcatgccggcatcgtctatacattctgtttctgctttcagatagatagcctttttaccatatttttccatcaatgtttgagactttttggcgttggcatcactgaaaccgaatgcattgggaaaatatttatttttcttttccatgatgaaatcattgtcaagcatcccacaattggtctttgaaacagctaccggctgataatacgtgtttcctttgacatcggagaatacaatcttcaccgggaaggcacggctgcccactcctacggcaatcactgtcactttttcattcatcccgatgtacacttccttatagccagaggtactgttggggtcgtctatacgcactttgtcggtgcgcatatacagcgtttcaccttccaacaaatccttggcaatatccacatcacccaaataagcaagagtaggaataccggctttgggcttcatgcaatattgctccaacgtgatattcttcacctcatggtagtaaagcttaccctcacagtcaaaattgaaatgcacgaatcctcggtcagtcacttcagtacccaaaaattccataatcttattcttcagctctccggaattcacatccttaccgttctctgccgatttaaagaccgggatgacaaggtctttacgttccggaatgaccataaacttcattcccggtgtccagtcgcacagactataatatttaaaatggtcatcgataaactgtttttccggtgattctacgaaagtatttgcctgtcgggacgcagtggagactatatagccgctctgtgcataacttatatagcatcctaccacccccaatagcacacttaaaaacattttcatatcattttttgttaatttataaagtatggcaaaggtacaaaaaaattgtttattattactgcaaataaagaattatatatagctttgcagactaaactaaatgatttaacgaaaaaagtatgatgaaaaaagtaatttttaaaatgacggcagtttgcgccagtgcactaatcttagcttcatgcggtggcagtaagaatatgttaacactctcttccttgaacggtgaatggaatatcaccgaagtggacggacagaaaatcacggataaaaaaatgccttttattggctttgatgtagctcaaaaacgtatctatgggaacagtggttgcaaccgtatgatgggcacttttgaagctgattcgctgacccccggagcattatctttcggtcctatcggaagtacgcgtatggcttgtcccgatatgcagactgaacaaatggtactgaacgcactgaacaaggtgaagtcctatgaaaccgtatcagaccagcctgaaatcattgcattgtgcagcgaagatggcaaaaagatgctgacattgcagaaaaaagacgaatcgcaggtttcactgacagacctttcaggcgaatgggccattgagttggtaaacggcaaaaaaatagtgggcactaccgaagtcactccgtttattggttttaataccgacgagaaccgcatttacggtaatgtgggttgcaataccatcaacggtgctttgcttcagaatgaaaaaacagccaattcactgaagtttgaaaatatcgccaccaccatgatgatgtgtcccgacatggaaacggaaaccactgtactgaacgcgctgaatgaaacaagaagtttctctataaaaaacggtcaagtatatctgctcggagaaaacggtaatgaactgttagtcttgaagaaacaataaacagactactgtagatatcattgaaataaacgaaggagatgtgccaattgcacacctccttttttactatacaaacaagcggtcacccgtatctcagtagacattcattcggacattccttctttattgtattcagaaaacaaagagaaaattcccacacaaggagctttttttaagcggtaaacccaaggccaaccattgtttctatcgtttttcatacacctcttgagattttttccattcaaaagctgacagtgtttctacgattctgccttttctgtcggtcggtagcgaaaaaggatacgccattttgtcagttgttcctaacatccctgccttggcatactgtttgcttgataaaagacgtgcgattggtgcacgaaaagaaaaagaaaaatttctgtgaaccattcgccgggaaatcagtttaattgaaaacaaataaataaaaaatatacaattatgggaaagattattggaattgacttaggaacaacaaactcatgtgtttcagtatttgaaggtaatgaaccggtagttatcgctaacagcgaaggtaaacgtactaccccgtctatcgtggcatttgtcgatggcggtgaacgtaaggtaggtgaccctgcaaagcgtcaggctatcactaatccgcagcgtactatcttctcaattaaacgtttcatgggtgaaacatgggatcaggtacagaaggaaactgctcgtgttccttataaagtagtgaaaggtgacaataatactccgcgtgtagatattgacggacgtctttatactccgcaggaaatttcagctatgatcctgcagaagatgaagaaaacagccgaggattatttgggacaag

SEQ ID NO: 6701 - DNA, 35472 bp, Unknown
  gut microbiota DNA sequence
ctgattttgtaatatttaataaatgtccctgcctatttcttttgaaactcttttatgatattctatctctcttggtctttatttcttttgggaggtctgtttccagatgcgtatcatatagaaagcacagtgagtaaaagcgaagacaaatgagataatgagtaaggtcttatcttcgtcccaacccacggtctgctgatgccataatccagtgataacagataagacagataaggcaatacctgtcatgttgagtatggtaagtccgcgtcggcgcggtatgtgttgctccagtttgctgtgttttactccatagcaggcatatacgtctagaccgattagcatccataataccaatcgaatccaagtatccgccggaaggaaaagcatcatgcacaggcaagtcaggattccgagaatcggtacgaccggcacaaaaggtgttttgaaggcgcggtgcacttcgggcatgcttttacggacaatcagcacggctgcacaaaccagagtgaaagcgaatagtgttccgatgctggtcatttcacctgctacgcgtgccggaacaaatgctgccaataatcctacgacgaccatgaacaatagattgctgcgtgccggtgtgcggaacttctcattgatatgtgagaagaaagggggtaataatccgtcacggctcatgctgaggaaaacacggctttgtcccaacaaggttaccataatgacggaacaataaccaaaaaggatggcaagtacgatggcgcgattcagccacggataatcggggtgaatgatgccggcggcatcggcatgtcccatgtggtcgatggctacggctacgggtgcgataccttgttgacctgcaaaatcggtgtagtgggcaactcctgtcattacatgagcaaagaccatataaagtatggtacagatgaacaatgacatgagtatccctatgggcatatcccgtttggggttcttggtttcttgggctgccgtgctcacggcatcaaagcccaaaaaggcaaaaaacacgatggctgctccgcgcaatacgcccgaccaaccgaattctcccaatgtccctgtgttggcaggaatgtaaggagtatagttttctgtattgatgtatttccagcctagtactacgaaggtgaggataaccgctactttcagaaatacgataaagccgttgaaaatggaactgccttctgtgcctctaatcaggaagatgctcatcagtactacgataaggaaagccggaatgttaaccactcctccgtcccacgggcaggctgtaagtgcatgcggaaggttgattcctactccttcgagaaagacgacgaggtatctgctccagctgatgctgactgtggtggctgccactgtatattccagaaccaagtcccagccgattatccacgctatcagctctcccatggtggcgtatgaataggtatatgcactacctgccacgggtatcatcgaggcaaactcggcatagcatagtcctgcaaaacagcatccgatggctgcaatggcaaaagaaagtgttatggcaggaccggtatatcctgcggctactgttcctgtgatggagaataatcctgctccgataattacgcctactcccaatgctaccagactccatgcgcccaacactcttttaagtgtctttgcgcccgattcgtttgcttcagcctgaagcatggaaaaaggtttcttaataaataatcccatatctttttataacctaattagtgataattgggtgcaaaggtacggattaccgtcatgaaatacaaacctgtagtaaagtctataacgattattcgagatatttcgttattttgccgcttatctgaagcagagatatttcgcatattttggtatcatattctgccgaaaggatacgttcttctgcatcgagcagacttttttgtgcttcacgcatttcaatacctgacaagtcaccgagcaggtaacgttctttggctatttcgtgattttcgcgggcggctaccaggttttgacgctccagattcaacagacgcaggttgttgcggtaggcttgccacaggttactcaggtcggctttcagtcccagttctagctgttcacgttccaattgggagttacgaatggcgagacttgcattgcgcttttcccgacggcggttgccgtcccacaggttgatgcctatcgtgatacctccgttcagtccccagttgcttcttcggctggtggcgttggtttcatatttatttaatgtgtagccatatccggctttcaatttcacgtagggatagttgcgcgacaatacttttcggtagtccaattgagcgatagtcgtattttggtctgcctggagtagtccggcattagtcgacagggtggcagaccacagttcgtcataattcagtgcatcattgactgtaatgatagaatcattgaggcgcaaagggcggttgacttcttgcacggccatcagctcattcagattgatgcgagaagttactaccagttcttgttgtttcatgtattgtgcactgtcagcattaaagtctacttttgcctgttggtagtccagtcgggagaagttaccgatatgatagcgttcttccacaatgcgcagacgctctttggacagtgatacggcatacaggaaatttttcaagcgtatctcttgttggacgtagttataatattcggcggtcagtccggctatgaaatcttctaatgtgatgcgggtatttgtttcgcccaaccgttccagctcctttaattgtttataggttgtgctgatattaaatccgtcaaagagcgtccagtttacgtccagtccggcttgcagggtttggtcgtagatgttgcgttcgccggtagtggttccggtgctgcggtttttactgtctgtgttgtccaatgaaccgctgtatcctgccgacagatcgagtgtaggcagataaccggcattggcaagtgtggcattgttgtggctcacttgctcttcattgcgggtgatgcggatggaatagttattggcaagtccttcttccaggcatttctttagtgtataaggatattgtgcatatatctcggttattcctgccaggcagatacacattactataataattcgtttcatacggtttctgttttgacttttcggttagtagaaatataggtataaatagccggtacgatgtacatggtgagtaaagtagaaacaagcataccacctacaacggccgtacccatggcaatacgctggttagctccctcaccggttgcaaaggccagaggaatcaaccccaatatggttgagacactggtcatcaggatggggcggagacgctgcaaggccgcatttcggatggctgccattttgtcttcacccgattcttgtttcagattggcaaattctacaatcaggataccgttttttgccaccagaccaatcagcatgatgataccaatctgactgaagatgttcattgtaatgccaccggcaaacataaagatgagtgctcccgcaatggccaatggcactgtcagcataatgatgaatgggtctttgaaactctcgaactgtgccgccaaaatgaggtaaataagtactagtgccagtataaaggcaaacatcaggctggacgaactttcgcgataatctttagagtcacccgaaagtgcggtacggaaagtatcatctaaggtttcggaggcaattttatccatctcttccaatccttgtccgattgtttttccgtcggcaagtccggcagaaacagtagccgagataaagcggttgtagtggtaaagtttggggggtgccacagactctacgaattccaccaagttatccaactgaatcatttctcctttatcatttcggatatagatggatttgatattggaaggtttgtttcgttgctgacggttgatctgtcctaagatttcatattgttttccattcatatagaagtaccccatgcgctgtccgctgaggccgtattgcagtgtctctgcgatgtcgcgtacgctggcacccattgtgcccgctttgtcacggttaatgttgactcgcatttcggggctgctgaatttcaaatcgacgtcagccatttggaatgtcgggttatcgtataccttgcttaagaactcaggcaacactttttccaatttctcaatactgacggactgcaatacatattgtacaggcatgcttcccctgcgtccgccgaaagaagattgttgctggacaaaggcacgagcctttgttttgttgcggatagcctttgagatacgttcggctacttccatttgggtgtagttacggtcttttatatctttcagtgtgatacggatattaccgctaccgctcgacacacgtgccgtaaccgattcggcatcaggcacaagggagtcgaccaaatgattgatatcttcggtataatcgcggatatattcataactggctccttcggcagcacgggtattgatgctgatttgcgaacggtcttccatcggtgccatttctgccgggatatagctccataatatgccgatggcaactaccattaacagcgtgatagggatagccgatatacgtttctttaagaaagcatccaatgagcgggcatagatgcggttcattccctcaaagaacggttctgttttgcggtagaaccaactctgcttttcacgtttaaccagtagtttggtggcaagcatcggggtaaatgtcaatgccgcaaatgaggagatgatgacagaaccggctacaacaaagctgaactcgcggaacagtcgtccgctggttccttccataaatacgatggggaggaaaacagcaaccagcgtgatggtagttgatattacagcaaagaatatttctttggctccttcgattcctgcttcaaacggtttcattccccgttctattcggatatagatattctcggtcattacaatagcgtcatccaccaccaatccgacagatagcacgacggccagcatggtgaggacgttgatggagaatccggcaatatacatgacgaagaaagctccgataagcgataccggtatcacgatacagggaatcagcgttacacgccagtcgcgtaagaacaggaagataataatgataaccagtataaaagcctcatataccgttgtctttacctcgtcaatggaagcgcgtatgaatttggtattgtcaaagccatagctgtatttcacatcttctggaaggtctttttgcatctgctgcatgcgctgatatacggcatcagctatctcgatgtgattagcacccggttggggaatcacaacgacacctaccatcggaactccgttcattttcatgtagcttttgatatcggcaggaccaagttcggcgtaacctatatcactgaaacggatgacattgccgtttacctcctttaatataatattattgaattctttagctgtatgcatctgtcccatggtgcgcaatgtcagttcaacggtatttccttcgatactgccggatggtaattcgatgttctctttggtaactgcattttttacgtctaccggagtaattccgtatcctgccatcttagtcgggtcaagccataagcgcatggagtaacgtttttcaccccagatggaaacgctacttacatctgatatggtctgcaattgttcttttaccgttaagtcggctatttcactaagctccagcagtgaacggctgtcgctttggatagctaccatcaggatggggacggcatcggcatcggctttcgatacggtgggagggtcacagtcgcgcggcaaatagcgttgtgcacgggaaactttgtcgcgcacatcgttggctgccgtttcaagatcgacggacaattcaaactctaccgtgatgcggcattggccttgctgactgacgctggatagggaacgtataccgggaataccattgatattctgttccaggggttcggtgatttggttctcgataacatctgcattcgcaccggaatagctgcaagtaactgagatgataggattatccacagacgggtattcacgaactcccaatgtgttgtagccaatcagtccgaaaagtaatatgataatcgtaagtacggtagcaagcaccggtctacgaatactaagttcggatatattcattgaagcattttttttgtggttagttaagagcctggatttcaaccggcataccttttcgtaattgcagtgtacccgaagtcaggatagtgtcaccgatagccaaaccctgaacaatctggatttcggattcggtgcggatgccgacaactacatcggtcggttctgccactccgttgcgatacacaaagactttgttcttccccatttcgggtacaattgcttctgacgggatagctattgcatctgctatttctttttgtttcaactgaatatcagcatagcgtcccggcaataactctccgttccggttaggatagatggcgcgaatgttcagtgagtgagtttccatatccagactggattctgtggcatatacttgtgcaggataagcgttgagccgtccttctactctgaagtccagattcattcctttttttatttcgcgtgcgtaacgttcgggcacggcaaattcaactttcagcgggcttactttagtcagtttggcgactacggtagtgggagaggcataagctccgacactaacctgtctcagtccgataattccatcgaaaggagcgcgtagttctgtcatgtcaatactagcctttatattttcaatatcggcattcagggtagccagttctgtttttacctgttcatatgcctctttactgacagcatcgcgttgcaacaaggcgttttgacggaaaacacggtcttctgccagtggtatttgagcttccaatcgttttagctgggcttgcaattgccggtcatttactttggctaatagctctccgcgcttgacggaactgccttctgtgaagaaaatatcggtaatctttccggaggtttcaaaagagaggttcacttcttcgtcaggcactaagcgtcctgttaccaatatttcatcagtcagcaagtgaggtgtaatgacttgggcattcaccttcagtgtctttgatttattctctctgggcagtgcatcggctgccgttaactcttcattttcgtgtggggtgaattgatagatgcctaaaccggacagtccgattccgattgttaatataatgccccatttaattcgtttattcatgtgcttttctgatatctgatttccgatgaatgcaatcatcgttgtaaagttagaaaagaagcgcggtgttaagtttaaacgccgcgcttctttttaatattttttttcgtttgccagtttccacatggcaaggaaagaagcttttgtgatatctactgttttattccagttaatttttgccgcttcgtcacccggtagatgatagtcgggatgaccattggtgtgataccatataataggtatcccttctttggcgaaacttccattgtcacttccacctacaggattgtcccatgcacgataatcgggttccagttgcaggcggtagtcttcaatgtcttttttcagccagtcaccgaacgcgggatgggcagcggtgtaaaagtagactacccctttgggctgctcttcattattattgcgtcctatcatgtcatagttcagataaccttttattttcttcaactcgggataggtcattgtgaagtagcgtgagcctaacaaccctttttcttcaccgtcccagaaagcaaaaataacagtgcgttccggttgctctcctgttgccagaaaagcacgtgctacttgtagcacagctgctactccggaggcattatcgtctgctccgttatagacttggtcaccctccaaagtagggtcataaccgagatggtcgtaatgcgcgccgatcactacaatctcatttggattcttcccttctatcttggccaggatattgcgcaggtccagcttctgatggactgtctttttcagggcggcgatagagtcggggtgaacttgccagcgcttattcttaatttggcgttctgcatgacacacctcaaaaggctgaacataatcgtcaaataaaggttgcaggcccatttgtttcaggcatgaaatgatatagttaccggcgatgcggccgcctttccatccggcttcacgaccttccaactcatcgcaggcaaggaattcgatatgcgcttcggcggttgcacggttgatggtttctactcctttctgttccggtgctgttttcttgggagaagcagcattcaggtttgcggcaccaattgtgagaagtgcggctaagataagatgtcttttcataaagtcatgattgttaataggctgcgcgatatttaccttcttctttatcttccagcatattaagataagaaatatagcgcgactcgctgattaaatgtttttctactgcttcacgaaccgcacagcccggttcatgacgatgggtacagttaccgtatttgcagttggcagaatattcgaatatttctttaaagtaatgtcctacctcttcttcttccatatcgaaggtcccaaaacctttgatacccggagtatcaataatatatccgtcttttcctataggaaacatttcagaaaaagtggtggtgtgcatccctttattatggtaatcggatatctctcctgtctttagattcttttccggaagaatggcattgattaaagtcgatttacctactcccgaattaccggaaagaagtgtgactttgccttccaagtcctttttaatctcatctataccgatatggttcagcgcggaaactttaaaacagggataaccgatgtgtgtgtacaggttgattacagcatccagataacgcagattatcttcgtcatacttgtctatcttgttgaacactaatttgacaggaatacgatatgcttctgcggtagccagaaagcggtcaatgaaaatagtcgaagtctcaggataattaatagtaataatcaacatacactggtcaaggttagcggccagtatatgtgattgtttggaaagattagaggcacgtcggataatgtaattcttacggtcttctatttcgctgataaaagcagtaccttcattattcataatgatttttacgtagtctcccacagcaatggggttggtactacgaatccctttcagtcggaagtttcctttgattttacagtcaatgagctgtccgtcttccgtctttacctgataccagctgcctgtattttttattactaatccgcgcactttgttcttttatacggtcataatttctttatctttctcggcaagcagttcttcaatcttcgcaatgtacttgtcgtgtaccttctgaagtttggcttctgcatttttttgttcgtcttcgggcataccttcttttacggctttcttcaaagcgtcaatggcatcgcggcgtgcattgcggatacttactttggctgtttcgccttctcctttgcattgtttggccaattgtttacggcgttcttcggtcagagggggaatgcctaaacggatgatttcgccattattttcgggagtgataccgagttcggaatccataattgctttttcgatgatgcggaacatactcttgtcccatggcttgatggcgatgctgcgtgcatcgggagtagttactgcggctacgttgctgatgggcaccatgctcccgtaagaatcaacacgaataccatcaagcagtctggtgctggcttttccggcacggatatgggctaaggcttcttccagatacataacggccatatccattttctcttgtgcatcgttaatgcaagtctttgcgtctgtcatactgtttttttattttaagttatatattatcaatacgttgttttttagtgaaacaaaagtaatttattttttgattatctgcaatatatgacagaggatttatttataaagtttcccaaactctgttttctttccccctgatgaataaaaagattgtatgtattttgggactccgatacagtgcgtttcaactattttggagtatatttgctgacataattatggatagagtatgatttcattgtatttggcccggcatgggcagacggaagaaaacatagcgcgtatatttcaaggacatttgcccggacggttgactgtagaagggatttcccaagcggaggttttacgggattctttgaaaaggattccattggatgctgtcgtttccagtgacttgaaacgctgtatggatacagccgaaatagtgatggagggtagggaactgccatgggaaacaacaaacttgcttcgtgagatagattgggggagctggacggggcttcgtatcaaggaggtagatcttcatcacattccggcagatgtggaaacggaggagatgctctatcagcgtgccggctgtttccttgattatataaaggcgaattatgaaggaaagacacttttggctgttggccatgggttaataaaccgtgctgttcaggcacatattcagggagtaactttacagcatttacgtagtgtgcccaagatggataatgccgagttgagactgtttatgctgtaattgtttaattgataagtgtgctattggccttttatacttctccaacaaatctttctgaacggaggtgttaccgttctgtgcttataaagaacgagagtgtatcaaaatgaaacacttcattgcttttgacacactctctaaatgtagtattaattatgtactaaagtaccgatactttctcctgtcattactttcttcaggttgccgagtgtatccatatcgaatacgataatcggcaggttattttccttgcacatgcaggttgcggtgaggtccatcaccttcagaccgcggcgcaagacttcgtcataggtaatatcgtcaaacttggttgccgtggggtctttttccgggtcggcagtatagataccatccacgcgggtacctttcagcatgacatctgcctctatttcgataccgcgtagtgaagagccggtatcagtggtaaagaacggatttccggtaccggctgacatgatgaccacttcaccgttttccattgcttcaatggctttccatttgctgtagaattcgccgataggttccatgcgtatggcggtgagtacgcgtgcttttactccggctgcgcccaaggcggaactcagtccgagactattgataacggttgcgagcattcccatttggtcgcctttcacacggtcgaaaccttttgaagcaccgctcagcccgcggaagatgttaccgccaccgataacgatgccgatttgcacacccagttcatgaatctctttgatttgttgtgcatactcattcagacgtttttcgtctatgccatattgtttttcactcatcaagctctcgccactcagctttaatagtattcttttaaatcttgccatagtgatttattatttattgtttgggcaaagataaaaaaataatttgatacttggcactgtaataagagctgtgaatcaattatctttgtgtcggattataaatgtgatgactatgcaagatataataaacggacgttgcggttggtgtggaacggatgagctgtatgtgaactaccatgataaggagtggggcagactggtgactgatgatgatactttgtttgaatttctagtgctggaaagtgctcaagcagggttgagttggataactatccttagaaaacgtgaagggtatcgaaaggccttttgtaattttgatgccggacgggtggcgcaaatgaccgatgaggatgtggaacggctgatgcgatttgacggtattgtgagaaatcgcttgaaaatcaaatcgaccattaccaatgcaaggctttttcttgccatacagaaagagtttggcagcttttacaattatacactgtcattctttcctgatagaaagccgattgttcatacctttaactcgttaagtgagattccggtatcttctcccgagtccgatgccatgagcaaggatatgaaaaaacgaggctttaagttctttggaacgacgatttgttatgctcacttgcaggcttcgggttttatcaatgatcacttggctggctgcttttgccgaaaaggatagtagcctaaaatttttctccccaacacaccttgtaacacacctcgaagtagtaagtaggtgataaatgccatccacagtgcatggttctccattgtacccttgaatccgtaataaataaggaagaagcatcccgatgccactatcatggcgcgaagcatgagatgggtggctgttgcgccgatgaatatgccgtcgagcaggaatgccgaaaacccggctaaaggtatggcaagtacccaataaaaataacttccggcagtagtgattactatttcatcgtcggtcaataatctcaagaaagcttgtccgcctgctccatataataaggtgaaagcaagggaaaggccgattccccaaccaaacagtcggcgcacggtctgatggagttctcgcctgttgccggcaccgatgtatttaccggccaatgcttctccggcatacgcaaacccatccatgatgtatgaaaagagagtgaatagttgcatgagcagtgtattgacagccagaacgacttctccttgtgcagctcctgccgaagtgaagaatacggtaacggccaccaggcagatggtgcggaaaaagatatcgcggttcaccttaaagaaacggtacatggcttgccggtcgaaaaaggaatgccattcgatgcgctttcttaaattgccataatagcgaatccaaagcaggtatgccatcactaatcctgcatactgtgcggttaatgtgccgatggctactccttctattttcatgttgaagccatagaccaggcaaaggcttgccacgatattcacgatgttttgagtgatggcaatgtacatggggaaacgcgaattctgcataccgataaaccatccggcaaaactgtataatcccaatacggcaggcgcaccccaaatacagatgcggaaatagagggcggatagttgtgccacttcgtctgtggtatcgattaatgtaaaagctactttctcgatagggtattggagagctaataagattagggcgatgaataagcctactcccacagagcgtaacagcaggcgggttacttcatttaaatcgtgtctgccgtatgcttgtgaagtcatgccgctggtccccatacgtagaaaaccgaatatccagtaaatgatattaaacagcattccgccgacggctatcgctcctatgtaagcagccgaaccaagatgtcccacaatggtaacgtctatcagaccaagcagtggaactgtgatattcgatacgatggaaggaatggcaatctgaagaatctttttatttccgtagcttagttgcatctcttaatattgttatatgatatattgcacttctttgaatgcgtattttcggagcataccgttttcatctctcaacaggaggtgtccgtccggttctattgcttcgagacttgctttaaattctccgttttcatccctgtaaggatacattcctttatggcggtattgtgcgttcagataatcggaatgaatagtctctttgatattcggcttttgggaaattaatggaatatagtaggaaaacaatcttttcaggataccttccagtacttcctgcttgtctgtttttcgtcccagtatttgtttcagtgaaacagggttgggggcaggggagacaaaatgctcttggttgatatttacgccgatacctgcaatgcaacggagcagatacgctccttctaattcattttctatcagaataccacatattttcttgtctttccaataaatgtcgtttggccatttgatgctgaaaccttctgcataggtgcttaaagtgtcatatacggacaaggcgataagcatggaaagtgtgaattgctcacgggcttttagggctgagggatagagtacggtactgaaagtgaggttcatgccgggggcagattcccacgaattgccacgttgccccttaccggctgtttgtttgtcaaccagtagtgtggtaaattctttgatattttcccgatcgcacagttgcgcaagtcggttattggtagagtccgtttctttttctttaagtatggagactgtcgggttagtcgggcaattcattgtattcttgttttagtttacgggtgaatttcttgatgacttcttcgtatgaatgatctattaaatgtagaatcattttgtcgtctatatctcctttcagtgatacttgattccaatattttttgttgaagtgataagcaccttctacccccggataatggtcacgcagttccaaagcatagtccgggtcacatttcagtgtaattaaatcagggcattccagtttgatgcaggcggtcattttccccattactttaaatactaaaaaatcttctccaaaaggaaaaccttctgttgtcccttttttggcgaggcaataatctcgaattgtttctatatccatatataaataagtatagtattaccaaataggtgaatagaaggcatcggcaatatgttcgatttgaaagggtgcttcttgtcctaccaccgttataatgtcaaagcggacaggcaggtcgatagcaaatttgcggagataagcatcggttgaggctataatatgtcggatttttctatcgttaactgcctcttccggattgccaaaccgtatgtctttgcgcgacttaacttctacaacgattagctcattgttgtatttggctacgatgtctaattctttcttgccacatcgccaattacgatgaaggatggagtagcctttttctgtaaggaagtcggctgctgcggtttccccttccttgccaaattcgttgtgttctgccattctgttacattttgcacaaaaatactcatttttatgttttgtatttacagaagtaaagctaattttgcagagaatatggcaaataacgtaaaaaagagagtgaaagtcccctcatctacgcccaaaagaaagcaacgtatggtgtgcttgatgagtgaagaggagctgaaaatagtggattgttatcttaagaagtataagataacaaataaagctcgttggcttcgtgaaacagtgttgacttttattcatcaaaagatggaggaagattatcccacattattcaatgaacatgatatgagacggtaaggagttgtatggcagatgatactttttatatgaagcaagctttaatggaagcgcagaaagcgtttgcatcgggggaggtgccggtaggcgctgttgttgtttgtcgtgaccgtatcatcgggcgcggacacaacctgacagagatgttgaatgatgtgacagctcacgccgagatgcaggctatcaccgctgctgccaataatttgggaggcaaatatctgaatgaatgtaccctgtatgttacagtagaaccgtgtgtaatgtgtgccggagctatagcatgggcacagacaggtaaattggttttcggggctgccgatgataaacgcggttatcaaaagtatgcacctgatgccttgcaccccaagactgtagtaatcaaaggagtgcttgcagatgaatgtgctcaattgatgaaggacttctttaagaaaagacgatgataaccggagataggagaagagttattgttcctcaaaatcaacatattctccttcgtcatcaccgaatatcttctttttattaccttttgacttgtgatgtgtgtttgaagctgagtcggtttcagcatagctgtcattggcatcttgctgtctgttgaaattttcgtggttggtgtatgtatggctttgataattgctgcgtttgctgccgccaccaaacaatacacgcataatattgcctagaatagaaaagccgataaagataatcagcaggaaaagaataagtagaaaacttaaaaatccaaacatagtaatttctttttttttagtatatcacgtacaacaagtgtgccacacgtattgtttacgctctttttttagttaaaagagatagaatgatataccagataataacggctgcaaagccgctgattttgaaaataagcagtaaaggaatgcatactatcaggaatatatagctcactttgttctgactccatgtcaaattcttgaattttaaagagaacatcggaatttcggcaatcaacagtaaagacatgattagcactaaaataaataagtatatcgcattgaaagaatcggatatcaaaaaggagtggccacccactaccaaggaaccccaaaacaatgcattggccggggtcggcatacctatgaacgaactgctttgacgcgggtcgatattgaacttgcccagtctcaaggctgagaaaacagctatgagaaatgcagtgtaaggcatatattctgctatgggtaacaggaaatcgggataatgtacttctttaaataaagagaaaacaatggcggcaggtgcaaaaccgaatgttatatcatctgccaatgaatccaattcttttcccaatggtcccgaaactttaagcagacgtgccaacatcccgtcgaagaaatcaaatactgctcctattataataaaggtaatcgccagttcatagtttcctttaaatgccattacactggcaatacagccggaaaataagttgcaacaagtaacagtgttgggtatgtggcgtgtaatacaatttgccattaggtcttttttattttagtttagcaatgacggtttcgtttccgacggttgcttgtcccattttgacacatacttcagtgcccagtggcaggtaaacatctacacgtgaaccgaatttaataaatcccatgtgctcgtcaatgtagcagtcttctcctacttctgcgtaagtgacaatacggcgtgcaatggctccggcaatctggcgcgccataacggtatgtccttcgggagtctcgataaccaccatggaacgttcattttccgtgctggctttcggaagccatgctttcatgaacttaccattgtgatgatctacatgttttactactccgtccaccggataccagttggcgtgaacattcacaatactcataaaaatggaaatcattaaacggcggtcatgaaaatattcatgttcgtccacttcctcgattactactatcctgccatcggcaggtgcaacaactactttttcggtatcgtgttcgaacaggcggataggacaacggaaaaagttcaccatcagcaaatagatgatgatacttgcagttgccaatagatagaacaggattttgcagtcaaatgcccaaaataccaatgcatttatgcctgccagtaatagagcacttgcaattaaaatctccgttccttctctatgtagtcttattttctttaatttcttcagtcggttcatgatataagaaaaccaattatcgtgcaaaaatatacttattttgaaaaccctgcaaataaaagttgttagaaatgcctatttctgtctcttttaagataaaaaaagcgaatgttgataacttcttctttatctttttgcaggttttgtgaaagcggagtatctttaaccgaatttttaggagagaagaaattatgcaggattttgtccatttacacgtccatacccagtattctattcttgacggacaagcgtctattccacgtttggtcgataaggcgattgctgacggtatgaaaggaatagcagtcaccgaccatggtgatatgttcggtatcaaggaattctttaactatgtaaataagaagaatggaggaaccaacggcgagataaaagatttgaagaagaagatagccgggctggaaaaaggtacggtggaatgtgagaatcccgaagctgaattggcagtatgcagggagcaactggaagcggcgaagaagaaattattcaagcctatttttggttgtgaaatgtatgtggcacgccgccgtctatttaataaggaggggaaaccggatcaaagcggttatcacttggtggtgcttgccaagaatgaaaaaggctatcataatcttatcaagttggtatctaaggcatggacggaaggattttatatgcgtccgcgtaccgaccgtgtggaattggagaaatatcacgagggactgattgtctgtacggcttgtattgccggtgaagtgcctaagaatatcattgccggaaagtatgaagaggctgaagaggctatccaatggtataaacgcgtttttggcgatgacttttatctggagttgcagcgtcataaggccaccgtaccccgtgccaatcacgaagcgtataaactgcaacagattgctaatgagaaactgatagagtattccaaaaaatataatgtgaagctggtgtgcaccaatgacgttcactttgtagacgaggagaatgccgaagcacacgaccgtttgatttgcttgagtacgggaaaagatttggatgaccccaaccgtatgctttactccaagcaggaatggatgaagacgcgtgcggaaatgaatgaaatctttgccgatgtacccgaagcgttgtctaatacggtagatatttgtgaccaggtggagttttacagtatcgaccatgctccgattatgcctacttttgccattccggaggactttggaacagaggaagagtataggaaaaagtacacggaaaaggatttgttcgatgaatttacgcaggatgaaaacggcaatgtggtgatgagcgaggatgctgctaagtccaaaatagaaaaactgggcggctatgataagctttaccgtattaagctggaggcggattatctgaaaaaactcgcattggaaggagctcacaaacgctatggagaagtgctgagtgaggaggtgcaggaacgaatcaagtttgagcttcatattatgaaaaccatgggttttccgggttacttcttgattgtgcaggactttattcgtgcagcccgtgaggaattggatgtatcagtgggaccgggacgtggttctgctgctggctcggcagtggcctattgcttgggtatcactaagattgaccctattgcttatgatttgctgttcgagcgttttttgaatcccgaccgtatttctttgcctgatatcgatgtggattttgatgatgacggacgcggacgtgtgttgaactgggtaacggataagtatggtcaggaaaaagtggcccatatcattacttatggtacaatggcaacaaaattggccatcaaggatgttgcccgtgtacagaagctgccgttgtcggagtccgaccgtttgtgtaagctggttcccgacaaaataccagataaaaaaatgaatctgcccaatgccattgcatacgttcccgagttgcaggcggcagaagtgtcacccgaccccattttgcgcgatacgattaaatatgccaagatgttggaagggaatgtccgcaacacgggagtgcacgcgtgtggcactattatatgtagggatgatataacggattgggttccggtaagtacggccgatgataaagaaaccggagagaaaatgctggttacccaatatgaaggttcggtgattgaggataccggtttgattaaaatggatttccttgggttgaagactttgtctatcatcaaggaggcggtagaaaatatcaagcacagtaagggaattgtgttggatattgatgaagtcgatattgaagatccggtaacttatgaattatatagtgatggacggacaatcggtactttccaattcgagtctgccggtatgcagaaatacttgcgtgaactcgaaccgagtacttttgaagacctgattgccatgaatgccctttatcgtccgggtcctatggactatattcctgactttatcgaccgtaaacacgggcgtaagcctattgagtatgatattcctatcatggagaaatacttaaaggacacctatggcattacagtgtatcaggaacaggtcatgctgctgtcacgtttgctggctgattttactcgcggtgagtctgatgctttgcgtaaagcgatgggtaagaaactgcgagacaagctggatcacatgaagccgaagtttatttcgggaggtcagaagaatgggcatgatccgaaagtgcttgaaaagatttgggcggactgggaaaagtttgcatcatacgcattcaataaatcgcatgccacctgttattcgtgggtagcttatcagactgcttatctgaaagccaactatccggcagagtacatggcggctaccatgagccggaatatttcgaacattactgaaatcacgaagctgatggacgaaagtaaagcgaccggaatcacgaccaaaggtccggatgtgaatgaaagttatctgaagttttcagtaaaccgcaagggggatattcgttttggtttaggagccatcaagggcgtaggagaaagtgctgttcactctattttggaggaacgggagagaaatggagaatataaagatatctttgatttcgttcagcgtgtaaacctctcggcttgtaaccgcaagaatattgaaaatctggctttggcaggtgcgtttgacagttttcccggcatcaagcgtgaagatttctttgtgaagaatgccaaagatgaaacctttacggaagtattggtacgctatggaaataaatatcaaatggataaggctgctgcatccaactctttgtttggcggtgagaaccagatagaagtagcgactcccgaaatagttccggcaccgacatggggagatttggaacgtctcaacaaggagcgtgatttggtaggaatttatctttcggcccatccattggatgagtatgctgttatcttggagaatgtatgcaatacccacatgattgaattgaccgatctgactccgctgcaaaacaaagatgtgacaatgggagggattgtgaccggagtccgcgagggttacaccaagaccggtaagccatatggtattgcgaaaatagaagattatagtggttctgccgaatttgctttcttcggtaatgaatgggtggaaaagaaaaactttttcatgaacggcatgttcttatttttaagaggaaaatgtcagccgaagcagtggcgtcaggaggaatgggaaataaagataaactcaattgaacttctgcctgaggtgaaagaaaagattattgaaaagttgacggtgacagcacctctgtctgccattgatgaagagatgattgaagaatttacggctttggtgaaggcaaatcccggtaatgcggaactttatttccacgtacaggatgaagatggccagatgtatgtcaatttgatgtctcgcgtggtaaagattgcagttcaaaaagatataatgacatatttaaagagccaaccaatgctctcctataaaataaattagtatatttgcgcaattaacagtttaaactataagcatattacaattatggcactagaaattaaagatagcaattttgatgaattgctgaatgcaggaaaaccgatggtagttgacttttgggcaacatggtgtggaccttgtaaaaagattgctccggatgttgaagctttggctgaacagtacaaagatcaggtggttgtcggtaaatgtgatgttgatgacaatgatgaattgacaggtcgctttggtgtacgcaacattcctactgttcttttcattaaggatggcaaggtgcaggacaagactgtcggtgcagttactaaagcagaattggaagaaaagctgaaagctttactttaatcaaaaagaatattcacctctttaatacattatggctatgggaattgaagacgatttcttattggaagatgaggatgatgcaaaaacgatagaatttatcaaaaactatctgcctcaggaattgaagaacaaattcacggatgatgatttgtattacatcctcgacgtgattgttgactattacaccaccagtggttgtctggatgtagagccggatgcggaaggatacattaacatcgatcaggatgaaatcgtgaattacgtagtcaaagaagctgcgaatgacggtatgggcccttatgaagccgatgatgtgttcttcgtggtgcagggtgaaatggaatatggaaattctttgggacaagtagactgatacttgcctttttgatagaacaataaaaaagtgaatgagggtgtgtcgaaactctcataaactaaaaatcaccctcgccacaggtagttgtagcgagggtgatttcgataaaaagggaattttgacacacctccattctgtatattataatcgttttatttcttctgctgcagctcctttccctttgtatttgctctttgccgtattgaatttgtaacggatagtgaaacgaagttcacgactgtcagaaacgttggctacatccatattcatgtgtttattataaattcggttaccgtccttgcggccatgagtcaggtctataccttgtaaatgaatggataagtgctcgttgagaaacgatttggtgagtgtggcgttcatcatgaatacattttgatacatatagatattctgataatcccctttactttggaagtttatgtctgtacttagagtccaatgatatggcagttggatgccgttgttgagtgtacagaagaataagggggtatccatttgaagtgtttctccgttatgctctatttttgcccattgtttttgtacacctactgtgagttgggggtgccagctgccgactgcaggggaagcagtcaggaatgcagagaaattatctatacggttgaagttacggtgggtaacggtggtaatagcgggattctttttgtattgttctgtaatatagagaattgcatctttctcgcgttggtagcttatcataaactgtagccatttgtagctgccggataaggtgaggtcatggattgtttcaggttttaaatctgggttaccactcatataggtaaatcggttcatatatctcatattactggatagctggttgtagaaagggcgtttgattttagtagtatagcttagttgggtttgaaatttgcctatttgtgtagctaacgagatattagggaagaagttgctataggagtgctccgaagatatatgttcataacgtaatccaatattcaggtatgcgatttttatgaaacggttgtattccgcaaagaatccggtatgagtttctttaatatggttatcagtagtaggaagtatttcctgtgggttggcaaataggtcataacggtgggtatgggtatattcggaaccaaatgagaatgtaccttcagctataggatagctgaaaagcaattttcctgcataaagtttgttgtctactttatttgttgattgtatcatgcggcttgtctgtttgtgactggtttcctctatttcgtttgtggttcttactttactccatagtgcatcggcattgaagtcaatagtcagttggccgaaggtagctgaataatatgcatttatttgttgtgacggcttttttactgttacactgttgctactactcaataagtggtcataataatctccattggcaagaatctcactttctgctttataccacactttatctttaggggaagcatacagtgaataacggatacctacagattgattgttattgatttggtaattcattcctaactctcctttataattgttgtatagggaagcttctttcatgatatttttttgctgccataaggtatcgacaaaaatatcttgggtgacgcggcgggtgagtaaatattcattgtgtatatattggaaagttccaaaaatatcaaggctgttatgtcggtagttcaggtttaactgctcattcagtctgctgttttcagactgtccccaagtggaacggatgtcaattcctattccgtcaccgctttgtcttactgttttaatacggattactgcttttgcatctgctttatatcttgctcccggattcgtgacgacttccacttgtcgaatttctgttgaacttaaccggtcaagttcggaaaggtcacgtatttctctgccattgatgtagataattggtgtgcccttaccaaatactgtgaattttccttctttttcttgtatgcccggaatgtgtttcagtacatcattccctgttcccgatttacttaaaaggctattttcaatgcgggtaacaaggttgccgtcttttatttgatagtcgggacgtttggcggtaatgaccactccttctaatataaacgtgtcattggacaaaactatgtgttcttttttgctgttttgggtcttttgatatgtggtttgatatcctatggaagatacctttattatatatgtgttcggagatggggcaattatttcgaaactgccgtcttcttggctgatacttccttgaatgaatgaagaatcgcgggctgataataaaacgatattggcgaatcctatcggttgattttgcatatctgttactgtgccacagatatgctgagccatgagattggttgctgttaccaagaataatagtacacaaatacttgttcctttaattacattctttttcattttgctgataattttcgtgatttatttccagcaaaagtaagagtggacaagaaatagggcaaataagagggatatacatcaatgtttagtgataaaacacttattgatgtgttctatcccatgtttttgggataaaagacaaggtctttactgctagtttataatatctttcagctttttcagattcttcaggtaagtacgggatacaggaatctcttcggttgtttcggttaggtttaaacgataaccttgcgcattcccactgatatgtatgatatgattaatattgacaatgtaggctcggtggcaacggacgaagtattcgaaaggctgcattgtttcttccatctgtgtaatggtggatcgtagaagtttgtgtttctctttcccttcttctttataataaatatcgacataattcccagatgcttccatatagaaaatattttggggcaacagggtgacggagtcttttgtctctcctgaaagagtaatcatttcattgcttcctttttcgtctttatgtcgttcggaaagcgctttgttcagcttttgtgcttccaacaagttacgtttcaaggcattgttttctacaatgaaaagaccaaaaataagtggaattgcaccgatagtgaatgccgcaagcatatcaatgcaaagtatcttgtagaattcgggtgtccccaaatcatcccaaaaattggctttaatgagaaaataatggtcgtagataaaggtgcagactcccatgaacaataagaaggagaagcagtgtatgatgtttttctttatagtccattgttcaggatcataaaaacgcttgaacagtttaggggctacaacgaatcctagaacggaagcaatgaatgtaagcccgataaaaacacataatactccaaattgaatgatactgtttaatctataatgaaaaggttcgaaaatagcaagaatcaatcctatggtggtggcattcagtaatgcaagtgtccatggtctatctactgcataggtagggcggttcaggtatttctttaactttatcatacgataccttgtacattgaggaagaagtaaacgccggtggctatcatcatcagtcctaataaagcgtaaaataagcgtgcacgttggcggcctacgttgtggacaataaattgtgtattatgtgcggtgaaaaaccattcccagttgagtaaggaagctaggatggcaagtaaacctaccaatacgaatattccttgtataatataatgcattcccatttttgtatagtgtcattgtaagtaaggaacacatggttccttattatgaactccgtcatgggagtgtgtcaaaactaaaccggtctatcccatcgccagctgtaggggcagggtttgcctgcccgaagacccaaagcaaactgtttccgggcgagcgaacctcgcccctacggactaaatgacagcattgtccacgttttgacataccccccccgacgagatgataattatctttagctttatctgcttcccgaaggagcttttttattctgctgtttcaaaatggattttgcggcttccgtcttccagctcatcgatataaactttcacggcatcgcccggcaaaacgtcttctatcaactccggccattcgataaagcaaagcgcaccgctgtaaaaataatcttcataccccatatcatatacttcttccagtttcttgatacggtaaaagtcaaaatggtaaatcagttcgcctgcctcttccgaacgatattcgttgacgatggcaaatgtaggcgagttgatgacatcggttactcccagttcttcacatacagctttgatgaacgtcgttttaccggcccccatctttccatagaaagcgaaaacggtgttgtctcccatggctgcgataaactgtcgggcagcttcgtggatagagtctaaagaattgattttgatttccatatgattgtttgttttaacttctttattatttatcgggtatgtctgcaaagataaatgcttttccccactttgcaaagtgcatacaccagaatagagaaaaatatgatggcggctcctgaaggaacttgtagtttataagaaatgaccagtcctcctaggcagccgatgtatccgatagcgatggaaagccaaatgatgcgcttgaaactgtgagtgaacaggttggcggtcatctgtggcaacgtcagcagtgagatggcaaggacaatgcccaccatgcgcagacaggagacgatggtaagtgcgatgaacatcatcagcagatactcaaagatggcgacgggaatgcgttgcgaacgggcaaactcgcggtcgaatgctatatagataataggatttaagaagagggtgaaaaatagtatcaataagaccgaaagggtagccagcatccagatatctgtcggcgtgatggtaaggatattaccaaaaagaaaagccgaaaggtcgggggtgaaacccggtgcaaggaaactgaaaatgatacctactgccatgccgaatgtccagaagacggcaatggcggaatcttcgcgcatatcttttcgcttgctcagccactctactccgaaagcagacaaaacggaaaatacggcagccgacagaagaggggagataccggcatacagccccagcccgataccgccgaaggaggcatgagtgatgccaccgctgatgaacaccagacggcgtgtcacaatgtaggtacctatgatgccgcaggcaatgctggcaaacaaacttcccaacagggcatgccggaagaaagtataatgtaaaagttctaatatatccatttgggtttgtttattaactttttctgtcggggcgattctgtggggaaggggattatttgaatctccgttctcctactatcaggaacagttcgtctttcaattcgtccggcaattcgataccccgaagctgtaaactgcggctccatcccgccacttcgtcttccttgcaggtatacatcacctcgcgaaactcttcaatttcttcttcactgtatccgtcggaagaatgtccgcggaagcggtctaattcctcgtcgtcataatattctacctttttgcttacggcggccagcagactttctttttcgcatatttcatgttgtccgcaacattcggcatccgcttccactatttcgggcgcagcctgcagttcaccgctttctatcttcttttgaatctttttgtttcgtgcatagcctactgccatggcaatggcggtcaggacgattaatccgataatgagtatccacatgtttttatacctcctttattatgaaacctgcttgtctcaaatcttcccaatagcggggataggatttggagactacttgaggattgtttattaatatttcgggtaatgccagacaggtaggggcaaatgccattgccatgcgatggtcttcatacgtgtcgatggcaggatgttcttcggtcgtgcatctttctccttcccatgagagaacagagccgtcagtttcatggagtatataccccagtttcctcatttccgttatcagtgcagccatgcggtctgtttctttgattttcaaactttgcaggccggagaagcggaaagggatatttagtaacgcacaagtcacaacaaatgtttgtgccaggtcgggttggttgataaagtcgtaatccagcctttccacactcttgccattctttttcaaaatgacggttttgtctttgtatatggtttctactcccagtgagcggaatattccggctacttggctgtcaccctgatagctgtccttgaaaagtccgggcagcgtgacttccgcttctttcgacaaggctactatctgataccagtaagatgcggcactccagtcactttccacatagaaaggagtggaatggtaggcttgcggttctaccttgagccggtggtcgtctgtccattccgcacggacaccgaaatcgttcatcagttgcaaagtcaggttgatgtaggggcgtgagatgatatcgcctgtcaaccggatggtcagtccgtttgtcaaaacgggggctatcattaataaagcggaaatatattgggagcttacgttgccgggcagactgatagtgtcttttcttaattcccgccctgtgatgcgtaatggggggaagccgtcattggctacatattctatatctgcacccaattcgcgtaaagcgttgaccagcacttgtatcggacgttgctgcatacgctccgttccggtgatgattcgtgtgccgggtgtcaccgataaataggcagtgagaaagcgcatggctgttccggcagccataatgtcgatggtttctttgtcatcgttcaaagcgcgtatcattacccgggtatcatcgcagtccgataagttttcgggatggtgtgttccgttgcctaatgcattgatgataagtgcacggttactgatactcttggaagagggtaattggatagttgtatgtatcttagcgggtgccgttacttttatttgcatcataccttatatataataatgtgtatcggagtgcaaagttaggaatattatcttaatacttgatacgttggaggataaaaagaatgttcttttaaggagaaggggaaccggagcgggacggagcaagaaaatcgggcggaaagattccgcccgtcagtataatgcttttcacaaagctcccatgctgataatttatagtaaagttaagctatagtaatgccggtatccaggtaaacatcctgaatggtgtgaagcagttctactccttcattcattggtttctggaacgctttgcgaccgctgataagtcccatgcctccggcgcgtttgttcacaatggctgtgatgaccgcatctttcaggtcggaacttccatgtgattctccaccggagttaatcagccctacacgtcccatatatccgttggctacctgataacggcagaggtcgatgggatgttcggaagtcagttctgtataaactttatcgctggttttgccgaacttgatagctgtgaatccgccattgttgaccggaagtttctgcttgacaatgtccgctttgatggtgactcccaagtggttggcctgccctgtgaggtcggctgccgcatgatagtccacaccgtctttcttaaagtcattattgcggagataacaccataaaatggtggccatacccagttcgtgtgcatattcgaatgcttcggctatttcgaccaactggcggcggctttgttcagatccgaaataaatagtggcgcctacagctaccgctcccatattccatgcttccttgaccgtaccgaacatcacttggtcgtaggacgtgggataggtcagcagttcattgtggttcagtttgacgataaacggaattttatgggcgtatttgcgagctaccgcgcccaaaactccgaaagtggaggcaactccgttgcatccgccttcaatggccagtttgacgatattctcaggatcgaaataaagaggattcggagcgaatgaagctccggcagaatgttcgataccctggtctacagggaggatggaaacatatccggtgttggccagtcgtccgtgtcccaataaagtttgcaggctgttcagcgtgcggatatttctgtccgaattaatccacaccttgtcgatggtatcggccgaaggtacatggatgagtgacttatctattgttttacaagtatggcccaggtaatattcggcccggttgccaagtaaatctattattttattcataaagtaattgttgttaaagtttggttatttcttttttccctgattggccactgcttccattagcttctttatctcttccggatctcccagaaaatagtcattcttcagattcaatttatcatcaaattcaaagacataaggaacggcagtcgggaggttgaggtgtacaatctcttcatcgggaatgtttttcagatatttaatgatacctctcaggctgttgccgtgagctaccaccaacagttcgtcttccgttgtcagagtggggaagataatacacttccaataaggcagaatgcgttcgatggtatctttcaaagactcggtgcggggcaagttgcagtcgggaaccttcttgtagcgggtctcgcggataggattgcgcgaatcgctttcttccaatgcatgcggtgccacatcaaaactgcggcgccatatcaggacttgttcttctccgtatttagaagctgtctcactcttattcaaaccctgcagcgagccataatgcttttcgttcaggcgccagcttttttctatgggaatccaatccaagtccattttgtcgagcacacagttgagtgtcttgacagcccttttcaggaaagacgtatacgccttgtcaaagtggaatccctcttccttcatcagttcgccggctttgtgggcatcggctattcctttctccgtcaagtccacatccgtccagccggtgaatcggttttctttattccatgtactttctccgtgccggagtaatactattcttttcatattcggttctcctttcttgttaccttaaaatcgtatggctgatatcggcaaagttacttgccattattttcataatcaatacctactgattatgaatttaacaatggcggagaacgatttgtttactcccagtcactaaattcaaaggagagttgctcccatctttccttttctaccgtcccttctctctcttccttggggttggatacggacagaccgatgaggcggatgggatgattggaatagtctacttctttcaacagttgtttggcgagcggcagtatcttgtcgagggtatgcagttcatgcggtcgggtgatgctgcgcgtgatttggctgaagtcgtggaatttgattttcagcgtcagtgtattgccggcaaagtcgttgcgcttgagacgttccaccagttcggtggtcacatggtaaagttcaatgatggcagacgaagggatggaaatatctttttccaatgtatgttcacaccccacggattttcggatgcgtacagcttctacggggcgcaggtctattccccgggcaaagtcgtaataaagttgtccggctttaccgaattggcgtgtcagcatttcaagggtacaggtctgtaattccctgccgctatgtatgccgatggaatgcatccttcgggcggtgacaggccctactccccaaaaagattcgatgggcagccgggagatgaattccaaagcctggtcggggtggatggtgcacagtccgtcgggcttgcgatagtcggaagccactttagccaggaatttattgtatgacacacctgccgaagctatcagtcccaattcttcgtgtatttgcttctttatttctttggcaatgtcgaccgccaaagggatgtcggtcttgttttccgtcacatccagaaaagcttcatccagcgaaagaggctcgatgatatcggtataggtgtggaagatttcgtgtatccgacgcgatacttctttatatacatccattctgccgtgcacgaatatcaattgcggacacagcctttttgccttttgggacgacatggccgaacgtactccatagcggcgtgcctcgtaactggcggcagccactacgccccgttcttccgcatggcccacagccaacggcttcccccgtagttccggattgtctctctgttcgacggaagcataaaaggcatccatatcgatatgtatgatcttacgttcggacatattttgactttgcgtggcaaaggtagaaaaatatatctgtaatttaagggaaagacacggaagaactactgttttaatagtgcttcttctttatgatattgtgtattcggcaacgtacatttaccggattttcttcatcatttataaatgacattgaattcgtaaatggatggcggtgcagatgctttcaatatgttcaggcgtatttgtgaagtgcggtaactgtaagggaaatgaatgaccttacagtcgcccatggggacatccgaacggtaaatagtttcccactccccgtctttccatatttctatctgatagtccttgatgcggttcgttctgtagttggagaaaccgtccgctccgtttttgacgtcgcaatattcaaagatgctgattttattgaaaggctctttttcgtccagcgtcaggctcaatgtcgctaccgtgtcagcggctgcccatcgggtttgcatacctccgtctgtggcaaactgtgcaccatatttatcctcgtcattgccataggtggaagaggcagttacgttgctgttcagtgaaatgaactttccgttgcgcggcaaaggcttcccttttttaatacctaaccgtttgtttagtccgataatggtgttggcttcatgttcgcgtatgcgtccggtttggtcgggcggaatgtttaccaccagtgtattgtcattgtcggtacaccaataaaacagttcttccagttcatccaaatcgcggacaggcataatggatgacttttggaaccagttccatgctttgctcaggcaaagggtatgttcaaaaggcagataataagatttgccttgatgcaaatattgctttttatcggctttgtgggcaattttagggtcccataaacggaaatcgcttggaaagtattggaacgtgtatttattgtccacaatcatggagtcggggagtgcgaatttgcgttctccttctttcaggacaatggtgtgattgactcctacggcacatgtgggttgcaatttcttgatatgtgagtaaatgcggggcaattgccactcttccggtttcttgtcccatcctccgtcgaaccatatttcctgcaccggtccgtaatgggtcagcagttcggtcagttgattctgcatatagtcaatgtatttgccaaaatctttccctttgtataagggttcgtggcggtcccacaatgaataatagatggcaaattgcagaccgtattttttgcaggctttggatacttcacccaccacatccgtcttgacgggtgaggaagccacatcgtagtcggtatatttgctgtcccacaggcagaacccgtcgtgatgcttggtgatgagcagaacatagcggaaaccggcatctctggccacccgtacccattggtcgcagtccaaccgggtcgggttgtaggcgctgacggggacagtgccgtccgaccattcgtctcccgaaaacgtgttcactccaaaatgtataaacattccgtatccacgtttcagcatggctttttgagtctcattcggagtatccgaaggggtgatttcctgagcgtatgtacacactgttgcaaatagcagtgtgaaaaagaagataaacttgtgtgctttcatgtaactaaatattctattttgttttgtttcccaaaagtatatctttcttgctaaataggctaatatataataagaaaaatcagctcttcttttggtcttgtttatctgccggactgtttaccttatcttttgccggatggaaaaaatgtatcacatgggatttcattaccacgagtttgtttgtcaacgcactcatccactctgtcggaaagaatgggtttgtgtgttcctgccctccccatatcttctccatttgttcgaatatgctttgaaatgtttttatacgctcttcgtcacatcttttttgatctttatatacctttacgatttgcttgtacaagtcgagtacttttgtatagcgttcgagttgggctgtcaatagttggttgcgataacagctgtcttcgtatttcgaggctaaattgtgaatccaagagtgggactgtttgttaagttttgtaatggcactttccaatatgacaaggacggtgctttcattcactgacattagccgggcaatagtatatatatcggtttggttggcaaacgcaaggaatactttacgttcgttttctccgagcaacatgctcagtgcatgactgacaatctcgttgacggctataacctgtttgctcagtttttgtgtaaggcctcttgttgtgctgtccgttttcaattttttcttagagcgaagcgctttttgcagaacatttaccggcgagtccttttgagtcagttgcttgagcgcaaatcaggctgtcttcatccacaagaattacacctgcagcgtcggaataaactacttcgtgtgtttcgagtatatgaagcatttctttttgggagatgccatattttttcatcagtattctgatccctttccggttagttatattgctgttttttaggttaagagaggataaaacaaagatatagctatttaaggaaatattgtcttatttagattaaaaactttctgtttttttgaagagtttgcccgaagctggaatacatggcgtttggaactccctaagtcgttccattagtcggagtaagcgttttcatcctttcgattatgcctttctgtccgtcagattactacagtcttcggcagtggactgtatagtccgttactgtagaccgtacagtccattgcagtagactgtacagtctgccgtcggagactgtaataatcttccgtttaaaaggccttggttgaccctacgaaacggcttactcttccctttgtttgtgatatattataaagaaataaaataatatattaggctgttgctgaaaagaatctgctaatatctcgaattgtacaaatatagattatttttgtgttatcaaagaacggttatatgaatgtagaatttgaaaaggaatgtccggctcagttgtaattcttgggggat

SEQ ID NO: 6702 - DNA, 3666 bp, Unknown
  gut microbiota DNA sequence
gataaatatcaatgcttgagagacagacatattcaacaaataatagtagctttgccactaataaataccaaatgagaaaaacaatactcatattactatccatactcaccttttacggatgccgatataatgtacctccatccgtaaaagaagccttatccacagccgaagcctacatggaagaaaacccggacagcgctttacatatacttcaaaatatcagtcaccccgaaaacttgcgtagccaagcccgggcggattatgctttgctttacacacaagcctgtgataagactcatcttcttcctccgacagattcgttggtacaaacagccgtgaactattacaaaaaagagaagaacagcatcaatgccgccaaaagctatttttacttagggcgcttaaagcggaacctcagacaagatacacttgccatcaaaatgttactaacagcgttaaagaagatgccgaagaacaacaagagcaaactactgatgcaaatctattttgacttaggagcgatatacaaaaagcagaatctatataataaagccatggatatgtaccgggaatgctatgcagtgaccaaggccttagatgattcttcgctcctattctttccatgtcgggaattggcacagacacatttattaaaacataagagcgacagcgctctttcttattaccaacaggcattgaccatcagccaaaagtttcaaaacaattattgggaggccaacatactcaatgacatcagcaaagtctatttacacgaaggagacacgctgaaagccaacaacaccatagactttgccataaggaaagacagttctgccactaatatcagtttgaaaggacaattattatattatggcaatcagatggattctgccagattctatttgaaaaaaagctgcctatccggcaacctatacagcaaaactaccggctacctctatttatataaagtagaaaagaaggccggcaatcattcggcagcctatgcatacaatgattctttcaacatatatcgtgactccatcatcaagatacagcaacatcaaaagattgaagagctaagcacacaatatgctttggccatacagagaaaggaaatagaggccgaaaacaggaatatatattatgtcattacaatttgcctgattgtgcttttgctaggtgcttttgccgtttgccaatatttaaagaagagaaaaaaagataaagagctcaagcaagaaaagctgaactcgttggaccaaacacagaccatcagcacctttctaaaagaaaaagtaggcgaagaaatccaattgcccgaaacggcaacaaagttcaaacaagatattctccgaaatggcatccgggcattccgggcatcccagtggggaaagaatttggaaacagttgaaaaaacaattgtacccggcaactatataaaactgtcagaacaggaatcactttacaaggaactgaaattacacttcaatgacttcattgcctgcctcaatcagatatacccggacatgtccaaagaagatatctatttctgtatcctgtctgcgctgaaatacaagagccggaccattgtgtactgtatgaaaactcctgcaggagccttacgaacccgcaaaagcagattaaagaaaaatatggcggaagaaaccttccgaatcatcttcaacaaataaaaagtccccatttcatcgagaaagctataattacagcatatcaacttgtaacgcttttctctttttatgtaacggtttcagagcaccaacctattgattttattcgtatgtttgctatcaggaaaaacatataaatcaatacaatatggaaaagagcttattattcattctcttctgctgcatggggtttgtcgctaaggcacaaaccattgaagaaataaaaatcctagacgcaaatgagattgttcccgtatgcatctttgatgctccgacagcctatcaaaatgggaccactatcaatatccgattaggagaaacagcaacctccactgtgaccgtcattaataaagagacgggtgagccggcctattccatgatatatgccggcactgacaacatcctatttgatttaaagggtaaagcgaaagggacgtacactctattgataaatatagaaggtatgaaatacacaggagaattcacactgtaacgagtgtgtaataaagatattgtttgcaaacaaaaagccaagcgataagggctgagcatatcgcaaagaaatgaattattctaatacttaatgtatcatgaaaacacttaaagacctagaatatttccgcctaggaaaaggacagatgaatgctgtgaccggcggatacaactgttacgccatttgggaagaaggtgatgagccgttgatgattgttaaagacgagaaaggtgatgcaaaaaaagcacaagaagtgctgcagaagtcatacgcaggtacttcagcaattatagagtgctactaatcccctcgttacctgacttgggcaagaggtgagattatttcataattccgacctttcgctcttataccaagagtttaccccaaaagtcaggaagcacaaagcttttatggagatgcagctgtaataacatacagccaatcttccataccaacaatcaggagcattgctattataaccaatgctccctgattaaaacttaatataataattactgccatgagacacactttatttctgatacttatctggatgccattacttatctgcgccacagacaagaatgtaaatataaccatcaaactatctactgaactgtcccaaacagagcaatggatatatgcgagcggatatatcggagcaaatgaatatgccattctagactctgtgaaagtgagcaaaggagatataaagaaaaaactgtcttttgacatcagccaggggatgagtatatatatcttatgcgcagagaaaggacccgtcaatctattctttgatatagagcctaacacaaactgtgaaattgaaattgatgaaaacatggacggaagatatccacaccccatgaaagggaatgatatgttcaatgaattcctaacattctataataaaatcctatatacaggaaaaaagagcagagaccaatccctgcccgaagacagcatacgatattataaagccaaactaacagaggcctatataaaagagattcacaagactcaatattctacattggcatgggtatatattttatggctgccgggatatgccgaagaacgaagtgaagaggagcctttcaggtcagtgattcaatatgcacaacaaaagtttcctaataatgaccttatagaacgcctctccataacaagtccagaaccagcaaccgcaaaaagcaaagccgcatctgaacgaatcagagctctgataaagaaaagatattatgtagagccgaaagacacaaccatgggagcaaagctgcaactcgcattcccgcatatctcaaaaaagaaaataaacacagactccattgcagaagaatatgtgctggtagacttttgggcaagctggtgtgtaccgtgccgcaaggaaacacctttcctgaaaatggcaaaagaaagatataaggacaaactggctgtatatgcagtgacaatagatgccgatacgctcaaatgggaaaaagc

SEQ ID NO: 6703 - DNA, 17881 bp, Unknown
  gut microbiota DNA sequence
ggacagcacccaatacttcatccatgtgagaggggtgaatgacaggaatgtgcccgacaagcaggtcagggctttaaagattaaatctattccacggaacttcttgttggacaaagagagacgcatcattgcaaaagatttaagaggagaggaactgctgaatgctttggaacaactgataaaataacatatactgccatgagacacactttatttctgatacttatctggctgccgttacttatctgcgccacagacaagaatgtaaatataaccatcaaactatctactgaactatcccaaacagagcaatggatttatgcgagcggatatgtcggagcaaatgaatatgccattctagactctgtaaaagtgaataagggcgatacgcagacaaaattgtcttttgacatttacgaagggatgagtatatatatcttatgcgcagagaaaggacccgtcaatctctttttccatatagagcctaatacaaactgtgaaattgaaattgatgaaaacatggacggaagatatccacgtcccatgaaagggaatgatatgcaaaatgaacttcttgcatttgataataaaatcctatatataggaaaaaagagcgaagaccaatccctgcccgaagacagcatacgatattataaagccaaactaacagaggcctatataaaagagattcacaagactcaatatcctacattggcatgggtatatattttatggctgccgggatatgccgaagaacgaagggaagaggagcctttcaggtcagtgattcaatatgcacaacaaaagtttcctaataatggccttatagaacgcctctccataacaagtccagaaccagcaaccgcaaaaagcaaagccgcatctgaacgaatcagagctctgataaagaaaagatattatgtagagccgaaagacacaaccatgggagcaaagctgcaactagcattcccgcatatttcaaaaaagaaaataaacaccgactccattgcagaagaatatgtactggtagacttttgggcaagctggtgtgtgccgtgccgcaaggaaacacctttcctgaaaatggcaaaagaaagatataaggacaaactggctgtatatgcagtgacaatagatgccgatacgctcaaatgggaaaaagccatagaggaagacagcacccgatacttcatccatgtgagaggagtgagtgacaggaatgtacccgacaagcaggtcagggcattaaagattaaatccatcccacggaacttcttgttggacaaagagagacgcatcattgcaaaagacttaaggggagaggagctgctgaatgctttggaacaactgataaaataacatggcggatatagactacacaatgagcatactgcatcgatatttgaaagaattgtcgataaaagtaagctatggacgcatcaggaagctgcttgctaccccgatgggatgctccgtcaggggaataagtgatgcacttgacagcctgcatatcacacacgaagtatatcaactgccggccacttatttaagcaagatagaagcgcctttccttgcattgatgcacaacggaagatattgccttgtaaaaagcatacaagaagaaaaaacaatcttactatccgacaaggggaaagaagaaaacctcccgacaaaacagttcatcgctgcatggaaaggagtcgtcctgataatagacgaaacgcaggcatcttatcacgaaccgtattatcaattaaaacaaatattgtatcttgcgaagaaatatagatgcctgtcgaccatcggattagcaggtattatctatctgctggccagcccccggcaaacaggagacctacttttcaacacactgacatggataggccttgccgtgtccatcctcatcatttacaaagaatcctacaacaaagacttcttgcagcgtttctgcaaaataggcaatatcgtggactgtaacgagatattgcactccaaagccgccagcatcaatggaatcatcacattgggagaaatggccttattatattactcaacattgttcctttctacggcattccatatccccctctattacagcatctggacttgggccacctgcatttccattgcattcaccttgtggtccgtcggttatcaggtgataatagctcgcaaactgtgcatgttctgcctgtccatcgatatcataatatggttacaggctcttgtcctgttctccactgatatggctgcctggcatttaaacatatcatccatctttgcttttatattaataggcacactttgctgcaccgcatggtatgcgctgaaagaactgctggactcggtgcgggaagtagcaaagttgaaagacaaaagagtacttttgctgtcatatcccacccttttcgatacactgctgcaaatggggcatgcagttcccaacgcggaaaaggacatgacaattcaaagagaagcacaaggcggcaagctcatacaaattattataaacccacattgcaaacattgtgcaaacgagcatcaagaatggatgaaaccggaaaatgcatccataaggattcttttctcaattgctccgcaagataccgtaggcaaagacatcgcactggcaatcataacctgctatcttgaacacggattccaaaaggccatgcacctactgaacgaatggtttgaaaagcaaaacagtaagtttatagcatactacaaacctataagacaggccgaacaaatgttggaagcacaacaagcttattgccaacagattcacttgaaacacacgccttttatcacagtcaatgagagggagatgcctcaagtgtacgacatagaagatgtacagtatgtgtaataaagatattgtcggcaagcatacaataaatacaatattatgaagcttaaacttttctctctcctcgctttgtgtatgtcactattcacaaacttgcatgcccaaccaccggatacctacggtcacgatattcctgtacaaaggaacaacaaccgactataaaattgcgcagattgattcctttgcttttgtccgttgcaacttcgcattggaaggaggaagtaatccccctgttcccaaatgattcgccgagcatccatatagataatgattcgtaaataacgtttggagggaccaatcaggccggactgcaatatatacatgataatttctccggcattccactgtttgagcaatataccctgccgataaatagaaagtttcgggaatatataagccaagaaaagacattggaatctgttattgcggaaatcaacaataccctcattgagccacacatcaagagtctggacagtattgccataagataccatatcgacagcatattcaacaaaagggcggcaatcaatcccgaactaatcaaattctctttagccggcccttacatacacacatatattcgctatcatggcgacaaaaagaaaatggagacgcacgacaaagcgatcttcggcccatacatcgataatttttgtgcccccgaaagcctgcaaccttacctgctggggagtgcagccatctgtcaaatcgtattcaacaccggagaaatgaatatctataaagtaaaagattatttaaacgagaaaaatgcgttggagaatacattttaagttcttcgtcacttttggccggtttatgttctaatgccccagacacaccttcaaaaagacgaggacatcttctaaaaagagcaagagctttctcaaaaaaataacgaccttttaaaaaaagaaaaggagcttttttaaaaagacaacgaacttttttaaaaacatcttgatctttttgccgctaacgaaattttgtcaaccgttatatttcgtggaaatacaaaccctttaaacatccttttatgaggtaaacaccagaaacgctctactttatattcattcggaacagcctgacacaatgacatatatacgtataggctcatgcgtacgtacgtgtagcctgatgcgtacgtacctgtggcccgatgcgtacgtacgtgtagcccgatgcgtacgtacacattttgaggttttcaaaaatgccggcatgattttcatgtgggggcaaaaggatcatcccctcattaggccggtcataccttcttttcccttcatccttacattttaaccaaaacattcagataatcaatctattaaaaatgacaggacatcccctcatcctcgtttcagctgtactcttcaactcccttcaaaatctaccttcagcatttgtctcacaggaagaagttttacgaatgaaaggaggctgaaagggtggtgacaagatgcccattcactaccggatcccccatcaacagggcgtttcaaccgctaatgaaaggagaaaagaaaaagcggatttccgcttgtagcacgaaaaaaacagttgtttttttgtggattcactcattatatgataaggcattgtagccagttcgaatattagcttggtgtgactgccacatatcaacggtaaaaccggaaagaataaacaataaaatcaaaacgatgaaaaggaaagttacggatatcccgaaatccccggacatcccaacccaaaatacagaaagaaatagcctcatattccatttacttcactaaaaatcattacctttgcaccttactatcagaaataacaaaaagcacatacataatatggaaaagaaattcaaaagaaccaccgtcacctcggcactgccttatgccaacggtccggtgcacattggccatttggcaggtgtatatgttcctgcagatatctatgtacgctatcttcgcctgaaaaaagaagacgtactgttcatcggaggttcagatgaacatggggtgcccatcaccatccgtgccaaaaaagaaggaattacccctcaggatgtggtcgaccgctatcatacactgattaaagactcttttaaagaattcggaatttctttcgatgtttactcccgtacttcatcaaagacacatcacgaactggcttccgagtttttcaaaacgctgtatgacaaaggagaattcatcgaaaagacatctgaacaatattatgatgaagaggctcaccagtttctggccgaccgatatatcacaggtgaatgtccccattgtcacgcagaaggtgcatacggtgaccaatgcgaaaagtgtggtacttcattatcacctaccgatttgattaatccgaaaagtgccatcagtggcagtaagcccgtgatgcgtgaaaccaaacattggtatttgccgttggacaagcacgaaggctggttgcgcaaatggattctagaagaccacaaagaatggcgtcccaacgtgtacggacagtgcaagagctggctggacatgggcttgcagccacgcgccgtaagccgtgacctggattggggtatccccgttcccgtggaaggagcggaagggaaagtgctttatgtatggtttgacgctcctatcgggtacatttcaaataccaaagaattactgcccgacagttgggaaacatggtggaaagaccccgaaacacgtctgattcatttcatcggaaaagacaatatcgtgttccattgcatcgtatttccggctatgctgaaagcggaaggcagttacattttgcccgataatgtgccaagcaacgaattcctgaacttggaaggagataagatttccacatcccgcaattgggctgtatggctgcacgaatatttacaggacttccccggaaagcaggatgtgcttcgctatgtactgactgccaatgctcccgaaacgaaggacaatgacttcacatggaaagactttcaggcacgcaacaacaatgagttggtagccgtgtacggcaactttgtgaaccgtgctttggtgctgactcagaaatactttaacggatgcgttcccgcctgcggagagttgacagaatatgacaaggatacactgaaggaatttgcagatgtaaaagcggaagtagaaaaactgctgaatgtcttcaagttccgcgatgctcagaaagaagcaatgaatctggcacgtatcggtaacaaatatctggcagacaccgaaccgtggaaacttgccaagaccgatatgccgcgcgtggccactatcctgaatatagcattgcaactggtagctaatctggccattgcattcgaaccgttcctgccgttcagcagcgaaaaacttcgtaagatgttgaatatggatacctttgaatgggagcagttgggacgtaccgacctgttggcagaaggtcatcaactgaataaggctgaattgctgttcgagaagatagaagacgaaacaattcaggcacaggtagacaaattgttggctactaaaaaagagaatgaggctgcaagctataaggctaatcctatcaaaccgactatttcttttgaagagttcgagaagttggatatccgtgtaggaaccgtactggaatgtgaaacagttcccaagatgaagaaactgctgaagttcaagattgccgacggactggagaaccgtaccattgtcagcggtatcgcccagcactacgccccggaagaactggtaggaaaacaagtgttgttcattgcaaacctggctccccgccaattcaaaaacggcttggtaagcgaaggcatgattctaagcgccgagaactttgacggttcactggccgttacctctctattaaaagaggtaaaaccgggaagtgaagttaaataatcattataagaagagatactcttcgtgagggtgtgtcaaaatgataggctgattacttttggcacatcctcattggttttcatcagcattgtcttcagacaaagaagctgaagaagcataccataggcaaaacgataagaacagattatgacagagcaatctttgaaagacaagaccgcaaaaggacttttttggggaggactgagcaacggcatgcagcagttgctcaatcttattttcgggattgcattagcccgtatccttgatgccgaagactatggtatgatagggatgctcagcatattctcactgattgcttccaccctgcaggaaagcggatttaccgccgcacttgccaataagaaaaatatcagccatgaagactacaatgcagtcttttggttcagtttgtttacaagtgggctgctttacatattattatttttcttatccccatacattgcagagttttaccatactccggcattgataccattggcacggtatactttccttggcttttttatagccagtctcggcatagcacacaatgcctatttattccgtaatcttaaagtaaaacagaaagcttttatccaactgaccggtctgatactgtcaaacataacaggagtcacattggctctttgcggaatggcatattggggaatagcaacacaagggttggtatacgtgaccagcaataccattctgttttggcgctattccggctggaaaccaacgctacatatttctttcaagccactgaaaagcatgatcaacttcagttgtaagatattaataaccaatatattctcgaatataaacaacaacatgctgactgtcatattaggtcgtttttacagtcaagaggaagtggggtatttcaatcaagccaataaatggacatccatgggatattctaccatactaggtacgataaacggaatagcccaacctgtattgcgcaatgtgtcggaagatacagaacgccaatgccgcgtgtttcgcaagatgctccgctttacagcttttatatcattccccgctttgttcggtctttcactcatcgctcccgaactcatcacaataaccattacagacaaatggaacgaaagtgcaatcatcatgcagattctttgtatcggaagtgcttttcttcccattcagaatctttattccaaccttgtaatcagtaagggaaaatcggatatcttcatgtggaataccattttcctgggaatcatacaaattgcaactgccctgctatgctacccttatggcatccgaacgatgatttttgcctatatcagcatcaatatcagttggctgttcgtgtggcattactttatatggaaagagatacacctcactttatgggatgcactaaaagatgtcgttcctttcggagttatcgcagtaagctgcatgggtgctgcctactttctcacccgatctatcgataacctctatctaatcttaacagccaaaattgccattgcagccggactatacattataatcatgcaattgagcaagtctgcaacttttaaagaagtcataaactatctgtcaaaaaagaaataatatttgactttctgataaaatctcctttactttgtagcaaaatagcatttcaacaaagaaaagatatggaaacaatacctatattctttacattcgaccgttattatgtacttgcagcctgtgttgctttccattctttgttgactaatgccgcacccgaatatcagtatcagctctacgtagtacataccgacctccagcctcatcatatacaacgaataaaaaaagttgtctctcacttccataatgccaatatacagtttaaaaatgcttcccattatgacacggcatgggataaattgcgtaataagtcgcatttttcaaaagagatattctataaactgacagctgcggaaatgtttcctcagtatgagcgaattctcttttctgatgtagatgtactctttacagccgatatatcttcttccttctttctttatccgaatgagaaattttattatgccggcacacgtcctattcaggaaaatacaaacttgccgcgttatgctaaagaatttacacaggaagaaatccggttgatatctgattatgaaatatcggccggctatatgcttataaacctgaaatgcatacgtgaggacaacaagcaaatagaactgacacagtttttccataacaatttaaaccgcctgatactgcctgaacaagactgcattgcattatgctgtgctccatatcttcgtttcatgccttacaaatatgtagtttgtgcgtttcaattccatgaagacccgcaaagggtgaaattcaaccccaataatgcctcctttcaagacaaacaagttgccataaaagcttacaacgagatgcgtgaacaagtggtacaattgcattacccgggaagagaaaagccatggaactcacctttcgtatacaaatacaaagaatggctgaccggttgtcaccaagccaaccaacttggttactatctgctcatgcagcccttattctttacacaaagactgaaaaaatacagcttatcccgctttatcagaaaaataaaaaagaaataccatggttaatattctgcatcgtattccgctcatacgccattatgcacggaaatgggagtttgcctgttttcagaaaaaatggcgaaagcaaaaccgccataatcgcactgttgccatgaaccgttttcccataaaatctgtgcaagtaggaaaagacacgtatggcgaactgcatattttaagttatttgcccgaaacagaattcctgcaaataggaaattatgtgtccattgctcccgatgttcacttcattttgagtggaaaccatcagacagaaacgcttttcacttaccctattcaatcattgttaaccaatggacactgtccgaaagacagtgtgagcaaaggggccgttataatagaagatgaagtttggattggttatggcgccctcatcttatcgggagtaaccatcgggaaaggaagcattatagccgccggttcagtagtcacccgtgatgtgcctccttatgccattgtaggaggaaatccggccaagataatccgctatcgtttaccccgggaagtgatagagcttgtaaaagatacatatctgaaagatatttcacacgatatattaaaaaagaacttgaaacaactgtatactcctctgcacactccggccgaggcgagtcaactgatagaactaattaaaaatggaaaagaataaatataaagtacgggtcattgcattttacctgccacagttccatcctacccccgagaacgataaatggtgggggaaaggatttacggaatggaccaatgtgggcaaagccaaacctttgtttaaagggcattaccaacccaaggttccggccgacttaggatattatgatttgagagttcccgaaacccgccgtgagcaagcagaattagcacgtcaatatggaatagaaggcttctgctattggcattactggttcggtaacggcagacaattattacaacgtccgtttcaagaagttttggcttcgggagagcctgatttccccttttgcctggcatgggccaaccatagctgggaagataaacagtttaacaaagagggagggaacaaaatgttaatggagcaattatatccgggtgacgaagattatatcgcccatttcaatgctgttctcccggcattcaaagatccgcgctatatccgtgtaaacggtgagccactgtttatgatttatgctcccatgaaagtgcctgatatagcacactttatcgaactttggcaaaaactggccgagcctcatggtttccgcattcattttgtggggcataccagtaaaacagaggaattgcctttattccgccaatgggggtttaatgccaccaatctggtacgtctgtttgatgtgttccaaaagaactatagcctcttaggacgtatcaaaaccaaattccagcgcatcaccttccatcagggacaaagaatagactatgaaagagccgcccgatacttttcaggaccggaagaccaaaacacagactgttaccctacactgattcccaactgggaccattctccccgttcgggacgatccggacatatattaatcaattccacgccgaaaaagtttgaggaacatgcggaaagaactttccgtaatgtcatacacaaaccgaaggaagaacgcattgtctttctgaaatcttggaatgaatgggcagaaggaaactacatggaaccggatttaaagttcggaagaggctatctggaagctctattaaaagctattaacaacgtttttaactgacagaatcatgaataaactcaaaatagcattagttaagcaagaggtctatcaagatctgtacgtttgtcctgttacagaaaaagatccgggtcaaattttgttctcatctatgggacgtgtaggtcccatagcactaatgagcgacctgaatgcggatttctatattgtaaaagaagagtccaataaagaaacccggatttatcagaaagtcatcccacatatagctccttatttgcatttgcttaaaaccgaaacgctggataaaatacccgggcaagaatttaaaagtccgggaagtccgtacccgaacgggaaatatgctgtcagctgctatactatagactggggacaatacgatattgttatttccatcaatataagtcttcccacacaattgatattgaaatatccacaaacgcttttcgcttatatgataggcgaggctaatatggctaccggaaaagccaggtttggatacgatgccactctcaaccaaatggcaaggggcagaatatcgcataaatgtggcgctatagattttccctatacctttgttgcaaaagatactttagagaaaattatgcaacaatacttaggcagaccttctgcaagaaaaggtatctttatggaaatcaattcaactacagaacgaccggtaacacgcatacccgaccattttcaaccgctggcggatgccggatatgaaattatcctgcatcaacagaaaatagcagataacctgaaaaacatttatgacgccaaatattttgtcaaaatgggaggtcggagtatccgaggaaactccgtagccgaagccgtatcacttggcacactcgctatcatgaaccgtgatgaggtaattcaccacgagctgattattgatgaatgcaatgtgaaaaccatggatgaaatgatatcactcatcaaccgactagaaaatgaccccgaattatatcggactttacagcagaagcaacgtcaggtactgcacacttacttttttgacgcaccacttcaatcactcatcaactgcctaaaagaaaaacgaggattatccaaaccaaggacttatagtcgatggaacagattatttgataacttatatttcctaaaactcagataatatgatgttagcccccattcttctatttgtatataatcgtcctgcacatgcaaaacgtgcaatagaagcactgttgcacaatactttggctgccgaaagcgagctgtttatttactcggatgcggcccgtagccccgaagattgcaaatcggtaaacgaagtgcgcagttttatccactccgtcaatggatttaaaaaggtacacatcatagaacgtgaaaagaactatggtttggcacgaagtattattgacggagttaccacacaagtcaatgcatacggacgcaccattgtattggaagatgatctggtaaccgccccttacttcctgcaatttatgaacagcgcactggaaatgtataaagacgagccccggataggacatatacaagcttgcgactttactcaggacccatcgttaccggatacttttcttattaaatggaccggaagctggggctgggcaacctgggatcgcgcttggaaatatttcaatcctgacggtaaagcactcttaaatgagctggaaaaacgaaagttaacctatacctttgatttcaatggtaaatatggttatacccgtatgcttcgccggcaaacggaaggcaaaaataattcatgggctattcgctggaatgcatctttatttctaaaagacattctatcgttaaatgtaggcaaatcactgatacagaacaacggatttgacggaagcggaacaaattgtgggggaggaaatctttacgcctccaatttatatatgaaagaattgcctctcgttcccatcactccggtcgttgagaatttacaggcacgccaggcctatgtcaactattatgcacggaccaactcatttatggccaaagccatccggcgtatcaaacgaactttaaaaggagatttcggagcataaaaaggcaaaaagataccaaacatttcttctaaaaaacgtacctttgcataaacgttaatgcacatgagagtacttatcatcaatacgtctgagcgaataggaggagccgccattgcagcccaccgcctgatggaagccctgaagaacaatggtataaaagccaagatgcttgtccgcgacaagcagactgaccaaatcagtgtggtgcaactgaaaaaatcgtggtggaaagtatggcaattcatctgggagcgcatcgtcatctggaaagcaaaccgatttaaaaaacataatctttttgctgtcgacattgccaacacgggtacaaacatttccgcactccccgagttcaatcaggcagatgtgattcatctgcattggattaaccaaggtatgctctcactgacagatatacgccgcatcatcgagtcgggaaagcccatcgtatggaccatgcacgatatgtggccttttacaggcatttgccattacgcaagtgattgtgataaatataccaaagaatgccattactgccctttgttattcaaaggaggaaagaaagacctttcctatcgcactttcgagaaaaaaagaaagctttttgacggggcaaacatcacattcgtggcatgcagccgttggctggaaggaatggccaaacaaagtgaactgctgaaaggacagaccattaccaatattcccaatgccatcaacaccaacctgttcaaaccgcgcaacaagaaacaggcacgggagaaatgccatctgccgcaagacaagaaattattgctcttcggctcggtaaaaatcacagataagcgaaaaggcattgactatttggtggaagcatgtaaaattctagcctcacaagaccccggattaagtaaacaattgggggtcgtggtgtttggcaaacaagccgagcagtatgcctccttattccctttccccatttacccgatgaactatgtgagcaacgaaaaggaactggtggatatctacaatgctgtcgacctatatgtcactccctccttgcaggacaatcttcccaacaccattgtagaagcgatggcatgtggcattccctgcgtaggtttcaatgtaggaggcattccccaaatgatagaccatctgcataatggatacgtagccgaatatcaatcggctaaagacctcgccaatggcatccggtggacattgaccgaaggcgaatacgataacctgagtgaagaagcttgccggaaagcactctccagttattccgaaagtattatctcaatgagatatatcgatatctataataagattacaggaagccatgcataatattcatcctcatcccaagttctccatcatcaccgtgacctataatgcggagaaagtgctggaagacacgatacaaagcattgttacccaatcttataagaacgtggaatatatcattgtagacggaggttccaccgatggcacgttgaccattgtcaacaaatataaagagcacatacataccattgtcagcgaacccgacaaaggcttgtatgatgccatgaataaaggcatcaaactggcaacaggagattacctttgttttctgaatgcaggagacggacttcatgaagatgatacacttttacgaatcgttcattccctgaccggaacaatactgccggatgtgatttatggcgaaacggacatagtagacgatgaaggacatttcctttacaagcgacgtctttctgctcccgaaacacttcactggaagagtttcaaaaaaggaatgttggtctgccatcaagccttctttgcacgcagagagctggccttagaagaaccatacgatttacaataccgcttttcggcagactttgattggtgcatccgtatcatgaagaaggcgaaagtattgcataatacacatctcacgctcattgattatctgaacgaaggaatgaccacccgaaaccataaagcctcactgaaagagcgtttccacatcatggcgaagcattacggattggtcagcaccgtgttgcatcatgcttggtttgcagtgcgtctggcttataaatgaaagccattgctccggttaatataataagagaatgatgatgagcatcataaagcttttccaaaacaaggtgagctccgcaactcccctttgacaagtttcctcctgcccattctttatcccttctttccccaaagagcttttccctgtaacaccagcaacagcagcaccgccattgccagcaatcccaatgcgacaaaagcaattgtttccgtcgtatgcaatgacttcgggtcgaacttgaactcaaccgtatgttttcctgccggcacattcatagcacgtaaaatatagtctgccctgccgtgaggagcctcaactccgtcgatataagcctgccaacccggataatagatttcggagaaaacaacaactccacccttctccgagcttacctcatatttcaagtcattcggttcgtatgccaccagcttaacgaaacgcaacgaatcagacaccgccaccggctttacctgctcggcaaacttcttgtcaactactgccaccttcgcaggcatcactttatgtaaagattctatttcctcgttcgcattattcacatactgcactttgtccacaaaccatgcattacctaaagtataaggattttgtataggcatagtctttccaccctgtaggggaaaaataaaataacgagtattcagcatattcaataccggaaacgcagacgcatctactttcgccatatcgccgccggcttcagacacagccttgaacaaattactcatttccggactgatatgttcctctatcatttcctgataacggcgcaatttagcggcatgataaccacctatgctcttatgccaataagaagtattattctcgttaaatgtattcgaagccaagttcagtaccctataatccaatgtcttatcctccaaaatagccttatccgtttccgtcggccggaagctttccgttcgaaccgtttgaggtacaaactgtgcatcatacagatagcgtttgtttacattccacatttccaccaggcagagcaacaacaatacaccaatagtcaactctgatttcagcttacccatgccataaagccacaacagcacagccccaattgataccacaaagaaactacgccaggcatccgaagtgaaaatacttacgcgaacctcttccaaattggctatcagtggtgccaactggtcagccggaatactctgcaaagcctgcatttccatgctcgacacataagaaggaaagaaaaatcgtggagccagtgcaaacagcaaagcaataccgcctgtcaatccaaaactgatataaaacgcctttgcctgttctttcatgatttgcggacgtgcaataatctgcttcaatgccaacattgccaacaacggaattgtaaactcggcaataaccaatatagaagataccgcacgaaacttatcgtacatcggaatataatcaaggaagaaatccgtaaatcccataaaattctttccccaagaaagcaatacagacaatacagtagcagccaaaagcgcccatttcatcggcccttttacaacaaatagccctaaaatgaacagaaacattacaaatgccccgacatacaccggacctgacgttccgggctgctcaccccaatactgaccaagctgattgtaaatacttccatacatcggattggccttttccatcgccttctcattggcagcaagaggcaccgatgctccacctttcacattaggcaccaataaagaaaaggtctcaccgatgccgtaactccattgcgtaatataatcgcgctccaatccaccctttgtctgattatgcgtatccggtttcaccaattcgctctttccacgcatggtttccttactatattcatacgtgtgataaagatttgacaaattgatacatacccccaatacacctgctactaccaatacacctgttgccttaaaaaaacggggtagttctttcttctgataagcagataccccgaaagccactgccataaacaacatcacaaacaaaaaataatagctcatctgcacgtggttcgatacaatttgcaaagctacaaatatggccgtcagtaatccaccaaacaagtattttcctctgtaaaccaacaccataccggctatggtaggcggaatataagccaacgttacaaatttccagatatgacctgccgcaataataataaagaaataggacgaaaaagcccatataatcgctcccaatgaagcaagccacaccgagaaatcaaacgcacgcatcagaatatagaaacccagcagcatcacaaacacataccacacataagaaggcaaatataaatgatacaaattttccatccctttcaacatatccgtagaattgtagctgggagccatctgataagtaggcatacctccaaaaatcgaattcgtccagcgtgtacgctctcctgtacgttccaagtactctttcgattcctcaccggcaccgattcccgccacagcatcatgctgagacagaacacgtccctcggtcacagccgggaaaaagtaaacaaacgagatgacggcaaataagataatcactactatatcaggtagtattcttttaaataagttcataagtatatctgtttattagtgacgcaaagttactacaaaaaagtgaaatgcg

SEQ ID NO: 6704 - DNA, 22173 bp, Unknown
  gut microbiota DNA sequence
agtcagttacacactgtttcagtgccgcatctctctcgattgcggatgcaaaggtaggcggtttcaacctaactgccaaacatatcatctgatttttcttacactttttttgaaacttgtttgtaacacgctgatttacaacaggacatcacaagttctttttgaaaacaacagaacaggaagaaaatggaatatacattattatattaaaagcgcgtatacgaacacaagaaaagtcttaaatatactcacggtttaatcctgttttatagaaagaataaactaaaaaaacaggcaccacacgataacttattatagtatttatattacctttgaaaccataaaacaaataatccaataatattaatttaattatgaccatacatcatcttgctatctggacctttaggctagaagagttaaaaacattctataccacctattttaaagggaaaagtaatgaaaagtatattaatcctcaaaagggattcgagtcttattttatttcttttaacggaggtgctactttggagctgatgagccgcacagatatccaacatgcccctatagaggaaaacagacaagggctaactcattttgccttttccttcgacagcaaagaagaagtactccaaaccacggaattactccgtaccaaaggatatatcattgcaagcgagccccgaacatcgggtgacggatattttgaaagtgtaatactagacccggatggaaatcgaatagaatgtgtttacaagtagtaaaaagagcattctaaaagtttttggacagggaaagtgtgccaaaacaaaatccaacttactaatgaatactattcaagcacggatgatacgaaaaaagtaaatttattcgtatgaatccatgcctgagaatcgtgattacttaaaataatatagaaagattgcaataccttccaatgcctttttaggctggtctttaatctcgatagtaaatttgatttcagcttttgctaccccacgcaggttctgcaaagagtgcaagcttgctctcatacgaatactttgtcccgacaagacagcctggccgaacttcatcttatccattccatagttaatcatcatcttcaaattattcacttctataatctgattccacatgtgcggaagcaaagaaagggtaagataaccatgtacaatcgtgctatgataaggactttccaccttcgcacgttctgtatccacgtgaatccactgatgatccaatgttgcatcggcaaaaaggttaatacgttcttgagaaacttccacatagtcagaaacacctatttcctgtcccactaatttctcaaaatcttcatacgaattaattattactttatccattattctttatttataaggttaattctttaacataagggcaaaaatagtaaaaataacactacctttgtcttcattcttcattaaaaataaaataaagtggatagaattcaattttatgaaataatatacagcattgtcaaggagattcctgtcggctatgtcatgacttacggacaaatcgcttatctggcaggagaaccccaatatgcacgcatggtaggttgggccatgtttcatgcccccaaagaatggtgcctcccctgccaccgtgttgttaacagccaaggaagattggttccaggatggcaagaacaaaaagcattgttagagaaagaaggagttactctcaaagccaacggctgtgtaaacatgaaacttcatcaatggcaaccggcagaccatgaatagtccttattcacaacggcaataggtattggctccacaccggcatctcggcaaaagctgctcactcagttcatcccggtagaactcatacagttgtctgtgcatcaaatcatatacttcagccacctgttgttccaccaagtcctcgtcattataataagcttgaaaaggatcattatacaaaaaatgcttccaatttctcaccacattatcaaaatctttcctgctttcttccgcttcccgacaaagtgttaccacataatcccaaggctgatgacaatacagctccacatccacaggctttttgtgggacaaatgatacccattttgttccatcacactgaaaacagtatcaggaataccatttcccggcaacactcctgccgtaaagactttcattcctcttccaaaagaagtcaatatttccatagccattctgctacgacaagcatcattattactgactatcaatatattcatcataacactctctactttatgcttactattacatatattataacagttcccgtgccataaatgttcgtaccgtatgtgtcttcctgtgaaagaaatacatttcgaacggccaataagtcatatagctgttacctataaacacaattttcatctccatatcccactatctttttactaacttgcgtggatcaccactccaagagcatcccaaacaaaacacctcattcatatcaaaaccttctgtcgatacatcctcatacttaggaataacttcccctttatcagatacataaaccaacaatctctcccctgtagcattcttcacatacataccggatatcttgcactgcggacacaataattttctcattctgttcatctttatttaacttttatacatcacttcattacccactcgagcaggtaatacaaaaataaacaaagaaaggatgcatattgattattccaatttaatttttgttatctcgacacaaatactcatctttgcacccaaaatagaaaataacgaaatacagatatgctgcatcatttcacccgctccattgctcacattgcattgccggacaagtttacctatccttttcattacacccctcaccccctgtgtgtgatggcggctgatgaagtacaagtctatttacagcatcaggctcaatggcaagatgaattgcagcaaggcaaaatgttcggcgtactgattgtgcaaaccacagagggcgaaatcggttatctggctgctttctcaggcattctggccggaaaaaatatccatccttattttgttcctcccatctacgatttactccaaccggacggattcttcaagaaagaagaagaacatatctccgccatcaaccaccgcatacgtgagctggaagaggatacctcttatcagaaatgccgacaagcattggaagaagaaacagcacgatgcagccgactcctttcacaagccaaagccaaactgaaggctgccaaagaactgcgcgactgccgccgtcagacggaacaactgagtgaatccgaacaggctgccatgatccgagaaagccagtttcaaaaggccgaactgaagcgtttggagcgtagtttgaaagaacacctatcctccttgcaaaaagaaacggacacatacgtttctcaaatagaagcattaaagaatgaacgcaaaagccgttccgccactttgcaacagcaattgtttgaacaattccgcttgctgaacgcccgcggagaagtgaaagatctgtgcagcatctttgcgcacaccgtccataagattcccccagcaggcgccggcgaatgtgccgctcctaagctattgcaatacgcctatttccaccattaccgccctgtggctatggcagaattttggtggggcgattccccaaaagcggagatacggcatcacggtcactattatccggcttgcaaaggaaagtgcgaacccatcctgggtcacatgcttcaagggctggaagtagaagaaaatccattgctggaagacaatcaccggacaacggtgctcgatataatctatgaagacgattatctattgatagtcaataagcctgcgggtatgttatccgtgcccggaaaagaaacagccgattccgtttacagtcgcatacgccacctgtacccggatgccaccggcccgttggtagtccatcgcttggacatggccacctccggtcttctgctcattgccaagatgaaagaggtacatcaaaatctgcaagcccagttcagcaaccgcagtatcaaaaaacgctataccgctcttctggaaggcatagtgtctgatgaggaaggaacgattgatcttcccttatacctaaatcctttagatcgtccccgtcaaatagtggataaagaacatggaaagcctgccatcacacgttaccgggtgcttgcccgaacaaaatcgcaaacacttgtcgccttttacccactcaccgggcgcactcaccaactgcgagttcattcggcacattccctcggactacactgccctatcaaaggcgacgaactctacggcagcaaggccgacagactttatctgcacgcagagtctctggagtttacccatcctgtcagcaaggaaaaagtaactatcgaggtgaaagccgactttacgcaacagtggctgccccaaccgaaggcggaacaatccgtttgattcttccatatacgtagataaaggcaggaatcaaaaacaagtcggcaaaaacccatgcagtcggatcaccgaaacaaacagcaaaatatccccatgccggtactgcaaacagactgaccagcgtgcgggcaatcatttccgatacccccgaaagcatggcaaggttagtgtatccggctccctgaatggtatagcgcagaatgcaaagcagtcccaataccggaaagaagattaccgatatatgcaaaaacagttctgtatctttcagaatctccagttcggatgcttctacaaatagcaaggcaaaggtctttgctcccaacaggagtaccacaaacacaaaagcgcagtaaaccaacatcatccatccgctagccttgatacccgcccagattcgctcaggctttcctgccccatagttctgcccgctatacgttgccattgcgatacccaaactctccaacggacacatacagaacatcttgatacgcatggccgccgtgaatgccgctacacatgctgtacctaatgcattgttagcgctttgaagcatgatgctgccaatggcggttatggagaactgcaaccccatcggcacaccgatatataataaggtacgagccagtgacgtttgaaacttacgttcggcaacagtagttttcagtatttcaaacttacgcatcatatagaagtaacacaatcccgccgacactccttgtgaaatgaccgtagcaatggcagcacctgttactccccaatccaaaacaaggatacaaaacaaatcaagcaacacattcagtactgtggaaaacaacagaaaccaaaaaggtgttttactatcgcccaatgccctgataatactggataataagttataaaagaacgtgcagggcactcctataaaagtcacaagcagataataatacgcatttcggaaaattgtttcaggagtacgcatcaccttcagaatatctgcacagaatagactggtaacaatcgctatcacaaccgacattactacggctagttgcagactgaccgacaccagccgccgcatcgtgccgtaatccctcgcaccgaacttctgtgccaccggaatgccgaatcccccacagcagccgttgcaaaagccaagaatcagaaaaaccaccgaagtaccggctcccacagcagccaaatcatttatacccaaaaactgtccgacaatcgcagcatccaccaatgaataagtctgctgaagcaaatttcccaataataacggcagtgcaaaattaaaaatcaaaggaaacggccgccctgatgtcatctctttagaagttgccataaagtataagtattgtaaatcgtgcgtaaagatagatgatattccacaattatatgtatttttgtaaccacatttaaacagacaacctcaattacatgacacatatcaagagccgcatcacccgcgaaaagaaaatagtagaactgatgattcgcctctattgcaaaaggaaggaaagaaaccgggagttgtgccccgcttgtcaggatttactaaaatatgcccatgcccgtctggagcattgtcctttcggagaaaaaaaatccacctgccgtttatgtaccgtccactgctacaagcccgaaatgcgacaacgaatgcaaagcgtaatgcgttatgcaggtccccgcatgcttctttatcaccccattgcggctatccgacatttgatggaagaaacaggccatctcttctttactcacacaaactagctcaagatatttcatattagcaatcattttattaattttgcagcgaaattaagtttaccacaaaagcaagactagattttctttatttgaatgacaggacgattgtggattttttctacacatgtagcaccaattccacattttattcatcggctgttcaatgcctaaacctctgattatgaataaagaaaaatactgagtagtcccgtggcacgctgcttgtagttctgtttgtggcatcttaacattaacaaattaaggtatgagacatttttttacacacaaagaaatcaagctgaaaaaaaagagaacagcaattgcagtcataggtattggactagtattaggtatttattttatagtatcgcgtcggccggcgcaccaacaggaaaccccggtagtagccatagaaccggtcacacgtgaagacgttgaaatctatggtgagtatgtaggtcgtatacgtgcccaacagtttgtcgaagtacgtgcccgtgtagaaggttacctcgaacagatgctttttgccgaaggaacttatgtcacaaaaaatcaagtactttttgtaattaatcaggaacaatatcgtgccaaagccgacaaagcacgtgctcagttgaagaaggatgaagcacaggcattgaaagccaaacgtgacttggagcgtatccgcccgctatatgagcagaacgctgccagccagttggatttggataatgccatcgctgcttttgaaacggccgaagcctctgttgccatgagtcaggcagacctcgaccaagccgagcaggagttaggctataccatcgtccgttctccgctggcaggtcacatcagtgaacgccatgtcgacctcggaacactggtcggtccgggtgccaaatctcttttggccactgtcgtaaagagtgacacagtacttgtggatttcagcatgaccgctctcgactatctgaagagtaaagagcgcaacgtagagctcggtcgtaaagactccacccgttcatggcagcccaatatcactatcacactggccgacaacaccgtctatcctttcaagggactggtagactttgccgaaccgcaggtagacccccgtaccggtacattctccgttcgtgccgagatgcccaaccccgaacgtgtactgcttccgggacagtttaccaaagtaaaacttctgcttgacgtaagagaaaatgccgatgtcgttcctctgaaatctgttattatcgaaaaaggcggagcctatatttatgtcatgcgcaaagactccactgtagagagacgttttgtcgaactcggccccgaattccaaaacaatgtagtggtagaaagaggtatcgctgccggggaaatgattgttaccgaaggataccacaaattaaatccgggcatgaaagtcaaagtcagtgatgccgcagaagacaaaaagccggaagaaaccctgtaaaagaagggaagttacacattccaaataaaaaaacattatgaaagtaagtttctttatagacagacccgtattctcggctgtcatctctatattgattgtcatcgtgggtatcatcggacttacgatgctccccatcgaccaatacccgcaaatcactccgccggtggtcaaaatcagcgcctcttatccgggtgcaagcgccctgaccgtatcgcaggcggttgccactcccatcgaacaggagctgaacggtaccccgggcatgctttacatggagtcaaacagttctaactcgggaggtttctcggctaccgtcactttcgatatctcagccgatcccgacttggcagccgtagaaatccagaatcgtatcaagctggccgaatcgcgccttcctgccgaagtgattcaaaacggtatctcggtggaaaaacaggcagccagccagttgatgaccatctgcctcacctcgaccgaccctaagtttgacgaaatctacctgagtaacttcgctaccctgaatgtgcttgacctgatccgtcgtattcccggtgtgggacgtgtatcaaacatcggtagccgttactatgccatgcagatttgggtacagcccgacaagctggccaacttcggtctgaccgtagccgacctgcaaaatgccttgaaagaccaaaaccgcgaatcggcagccggtgtattgggacaacagcctgtgcaaggcttggatgttaccatccccatcaccacacaaggtcgtctgtccaccgtcagccagtttgaggaaatcgttgtccgcgccaatgccgacggttccatcatccgcttgcgcgatgtagcacgcatctcgctcgaagcacagtcctacaacacggaaagtgccatcaacaatggaaatgctgccgtattgggcatctatatgctgccgggagccaatgccatggaagtagcccagaaagtaaaagaggcaatggaagaaatcagcagcaacttccccgaagggatgagctatgaaattcctttcgatatgaccacctatatttcagagtctatccacgaggtatacaagaccttgttcgaggccctgatactggttatcgccgtggtattcctctctttgcagaactggcgtgcaacagtcatcccgctggttgccgtgcctatctcgctgatcggtactttcggctttatgctgatctttggcttctcgctgaacatacttactttgctggggctggtacttgccatcggtattgtggtagacgatgccatcgtggtggtggaaaacgtggaacgcatcatggaagaagagcacctgtctccctatgaggccaccaagaaagcaatggaaggactgacaggcgccatcatcgccacttcactggtactggctgcggtattcgtcccggtcagcttcttgggaggtatcaccggacagctctaccgccagttcaccgtgaccatcgttgtgtccgtattgctctctaccgtagtggcgctgaccctgagcccggtgatgtgttcgctcatcatgaaggctaaggaccccaacaagaaaccgaatgtcgtgttccgccgcatcaaccactggctggctgtcggcaaccataaatatgtgaaaatcatttcacgccttgtgaagcatccgcgccgggtactcagcagttttggtgttgtactcatcgccatcctgctcatccaccgcatcatccccaccagcttcctccccatcgaggatcagggatattttaagatagagttggaattacccgaaggagctacactggagcgcacccgcatcgtaacggaacgtgctgtagactacctgatgcaacaacctgccgtagaatatgtgcagagtgtggcaggaagcagtccccgtgtgggaagcagccaggcacgcagcgaactcacagtcatcctgaaaccgtgggaagaacgcggcgagcagaccattgacgaagtcatggcacaagtcaagaaaagcctgaacgagtatcccgagtgcaaggtttacctctccactcctccggtgattcccggtctgggtagctcgggcggtttcgagatgcagcttgaagcccgcggagaagcaaccttcgaaaatctggtaaatgcggcggatacgctgatgtactacgcttccaagcgcaaagagctgtcgggattgtcatctgccctccaagcagatattccccaactctacttcgatgtagaccgtgataaagtgaaattttcgggtgtgccattggcagatgtattctccaccatgaaggcatacacaggttctgtatacgtcaatgactttaacatgttcaaccgtatctaccgtgtgtacatccaggcagaagctccctaccgcgagcataaagagaacatcaacctgttctttgtgcgcggtgcagacaatgccatgataccgctgacctcactgggtactacttcttacaccacgggtccgggtagcatcaagcgtttcaatatgttcaacagtgccgtaattcagggccaggctgccgacggatacagttccggtcaggctatggaaatcatggaacaaattgcccgcgaacaccttcccgacaatatcggagtggaatggagcggactttccttccaggaaaaacaagcaggcgggcaaacaggtctggtactgacactggtattcatgttcgtattcctgttccttgccgccctatacgaaagctggatggttccggttgccgtattgctctcccttccggtagctgccttgggcgcttacctcggcgtatggggatgcggactggaaaatgatgtttacttccaaatcggattggtgatgctggtaggacttgcagccaaaaacgccatcctgattgtggaatttgccaaggaacaagtagaccgcggcgttgatgtggttcaggcagccatgcatgcttccgaactccgtttccgccctatcctgatgacttcactggcattcatcctcggtatgttgccgatggttatcgccagcggtccgggttctgccagccgccaagccatcggtacgggtgtattcttcggaatgatttgcgccgtgacagtgggtatcttgctggtaccgttcttctttgtcctgatttataagatgaaagcaaaaatgaaacgctaataattgaagagttatgaaattgaaatctacattattatatataactgcggcaacactcacattcagttcctgccagatagggaaacactatacgcgtcccgaactgaacttgccggagcaactggactctacccaacaagatacgctcaccattgccgaaatgcagtggtgggaaatctataccgataccacactccaaaatctgatagacaagacactggagcacaacaaagatatcaagatggctgccgcccgtgtcaaagaactggctgccatgaaacgaattgactttgccaatctctttccgcaactgaacggaagtgtgtacactcagaaggaggcttccaattatggaggcgacaaatacatcaacgaccccgagacaggagccaaagccactgtcagctgggaagtggacttgtggggtaacctccgctgggcaaaagacaaaagtatagctgactttttgggaagcatagaggcacagcgtgcactgaagatgagcctgatagcagaagtagctcaggcttacttcgaactggtggcactcgataatgagctggctattgtcaagcaaaccttaaatgcgcgtgaagaaggtgtccgcctcgccaaaatccgttttgaaggcggtctcacttccgaaacgtcctaccagcaggcacaggtggaatatgcccgtactgccacattggtccccgacctggaacgcaaaatctccatcaaggaaaacgacattgcttttctggcaggcgaatatcccaaacagatagaacgttccatcatgcccgatgaagtgaagttgcctgaaagtcttcccatcggattaccgtccactttgctggaacgccgtcccgatgtgcgtcaggcagagcaaaggctgatagccgccaatgccgctgtaggcatcgcctataccaatatgtttccgaaattgtcgctcactgctcaatacgggctggaaagcggagagatgtccgacttgctgaaatcacccatccactatctgagtgccaatctgctcggtcccatctttgccatgggtaagaaccgcgccatcgtaaaggctaaaaaggccgcttatgaacaagagtgttacaattatgagaaatccgtactgactgctttcaaggatgcccgtaatgcgattgtcgacttcaacaagataaaggaaatctatgaatcacggttgcagttggaacgctcttccaaaacaaacatggaactggcgcaattacaatatatcaacggagtaatcggctatctggatgtgctcgatgcgcagcgtagttattttgacgcacagattggcttgagcaatgccgtcagagacaaacaaatcaccatggtgagactatataaagctttgggaggaggatggcaataagccatccttctttcatttttatgctgctttacaaacagtttatcacatctttttcccgctctttgggagtcaccgtcagcttcaccagtttttcccctctccattccgcttccacggtggtctgccccggagcatgcagtttgaagtgcacatcccatccgcgaggccatgccggaaaaagcaaaatctttccattcacctcctgcaacagcatctcctgcatccccatcataccggcattcccttcattcaaatcaggcgtccacgcgtcattagtctgtcggaaagccgggaaacgataaggaccgtcggagagtcttttcaaagtcagctcggacgcctgttccgtcagtcccaggcaggcagcccacacattgtccagcttctccccggtctgcgcacgacacttctgcacatccctgtcaaacagatacgtgttacgggctgtttccaatccttccctgcccactccgtatattctccacggaaagacagggagcaactggggcgtacctgcctcacctgtccgttcccacacctcagccggaagaatcctctcttttccttcctccgtccgcaaaggaatggaaggaatacgcgccagcatatcgggtttacgtccgtaggcctccagcaccgaacggagtgcggcaatggtcgacgacggattatatgccatcttataggttgcccctgccgaagccggatacagaaccagcttgccttttccgtccaaatcgctgtatccccggcgggcagccgtgccgcgataataaacatcaaagaaattcagcgaactctctatcaggggaatgtagcggctgatgtccatactgtcatagcttacagcgtccagcaccatgcggcacgtctccagcacaccgtcccattcatactccgaagaaggatgatattccctccctttatcaaagccttcgggacggttcagtccgtacgccgccggattcaccaagccgaagttttccgtctcttcactgaaacaagccccggaatatccccaatacacctgcgaacggagttgcgccgtgggcagcagacggcgataacactcaaacaggggcttcatcaggtcggtatctccgtttttcagcatcggccaatataccagtgccatcctgtgtgccgtcagcgtacccgcccctccccttcggtagtcgggcgtgagttgcgattcacctcccgttgtcgaaggatcgaacgtaaacagccctccgtcgggcttcgtcggccattgtccgaatgcattacaagctgccatatagcgatacaaatcatagttgcgtgccgcacgagccgcttctccttccgcccgcacgaaactgcgctgccagaactcattccaccatcggcggctcgcctctttgtcctttgccgcatgcagttccttttccgttttctccagtccggcttcccaatcggacacaacaggagtctgtaccgcatgcaaggtgattctgaaagactgtctgttggcgggtttcctgcttttatatgtccatgcctcatactccgttccgcagtaatgcccccggcgtgtgccgctgaatatcaaatcacccgcaatgcggcctccgaatatcagatttctcaacgggttatataaatgagaagcctcgctttccaggccttgctgctttatgacagcatcgacaatggtatgcgaggcatttcgatgaaaaaaagtcaggttctcttctcctaccaggatggaatcgtgtgtggtgaccaccgttccgggccactctcccgcataagaacattgtagtccttcctcgcgactcatcacccggtctgccgttctccaactttcataactgacacgcatggaggtcacttccttggtttccacctccacatgcaccacaggatggaacacatccgcccaaatatgcatctgccccaccggagtagtgacggacacatatccgtctttcagatgaagcgtctggcggaaatcactcctgccggcaaacggattgggggtaagccggatacggaaacgtccctgcttcagcagcgtgttgttctcatcaaacgaaccgctgcgacacaaatagaagaagacatcatcatcctctacccacacattcataccgatatctcctccgccacaaggcatggagccggatgaattccggctctgactgttccataccacatcggcaggctgtccccacaaggccgtacttccgaggagccagacaaacaataacgtaaaaaaaaccttcatatcttatttttatttatctcctagtataccgcagaagcgataatctggataaagagtatcagcaccaccatggcaatcggatataccgtagcgtatgccacactcggaatattgctgtccaccatcgaatcggcggcggcaagtcccggtgtactcgtcataccgcccgtaatggtacccaacaagtccagcagactgatgttaaacaccagtcgtcccaccaaaacggctaccaacataggtacaagggtaatggctgctcccactccgaacagcagcataccgctttcttcaaacgtagccacgaggttctttcctgccgatgttcccacttctgccaggaacagcagtaaacccaattggcgcaataactggttggcaggtccggacatcgaccacaagacaggtcctgtcttacctacggcactcagcaccaatgccaccatcaacacgcctcccgtcaatcccggagaaaaagaaagcccgccggggaaagaaagattcagtttgccgaacaacacgcccagcacgatacccatggcaatagggaaaaagtccgtatcggacagctgcttggcattgttacccagcaagcgtgccacacctctcagtccttccttctcgcccaccaccatcagtttgtcaccaaacttcagttccagttcgggcgacggagaaagatcgataccgcttcggcgaatacgagttaccgtacaactgaaatttcgttgcaggttcaaatcgcccaactgcttgtttatcatatctttcttagtcagtaacaatgactctatctcttgtgtatggtccagcggcaactccccttcccggcgttcgcccaccagcaccgcaaactgctgcaacgactcttcgctgcccaccgcctgcacataatctccttcctgcaacagcgttccggctgtcggcatcagaattttttcttcatgcttcacacgtgacaccactgcccctgtcatggcacgcgcattgatctgtgccagcgtacgtccgaatacggcacggtttgtcacacggaagatgcaagtacccagctcggggaaactgccgcgacgctctgcttccagcctgcgtgcctccttatccaaatccacatgcataatcttcggcaacaacttcacaaacaaaatcacaccgatgacaccaaacggataagcgataccataggcaatggaagccaaaggcgaatttgtgctgtcgatagccaccgcaagtcccggagtactggtcaatgcccccgctatcaggcccaccacactgggcgtatctatgtcaaacgcatatttcagtcccactgccgtcagtccggctgacagaataatgagtacggtcagaataatcagtgtctttcccttactcctgaaagaatcgaaaaatcccgggcctgcctgtataccaatcgtaaagataaacaacaccagaccgaagtttcctaactccttgggaataatcacaccgaaatgtccgaacaacaacgcaatgaaaataacagccgacacatccagcgacagccctttaatcttgattcttcccaacataaagcccaacgccacaatgaggaagagcgaaaaataagaggattttaataggtctattaacatgtttttatatggttagtttctaattgcaaagataagtaaaaaagcaaatgccttccaagcgtttatctatgaataaattgaatttcgatgaaataaaaacaccgttttcttttataacacaagactttttctatattttctaagtactaaagaatattttttaatattatcaaaatattaacgtttatataaaaaaagcaaagaagaatttgttattacaattaataatgtataactttgtccccacaaaaaagggattatgccaatatatataattacaaccgttcgcgatagtcttttgataaaaaatattatctaacacagcattattactactccgaacgatcttcaaagacataagaaaagaattttataaagagtgaaattatgatacaggttcaaagatttaacaaagccttaaaatcagcagtcattattggggatttagtcattctggatgtccttttcgttttacaatatatattatggactacctgtttggaacaaaaagtatctgacggaacattgcctcagattttggttcttttcagcttgtgctattttgcctgcaccatttcgagaggcatcatcctgcaccgtcgcggcgtacgtgccgaccaggttgtgcaacacaatctgctcaatatgttttatttcatattgctgtccatgactactttcacattggcagatttcggtcaatactcccatcctttttttatccttttttatctgttgttcaccctttgccttatttgctaccggctggctttccgttcctgccttaaaatatacagaaaacgcggaggcaactcacgcacggcagtctatatgggaagtacagaaaatatgacggaactttatcatgagatgaccaacgaccccaccagcggatatcgtgtaatcggttatttcgattccgtacccaacgaaaatttcccggtctcctgtccttatctgggcaagcccgaagaaaccatcgactacttgaaacagcatcgtgtggagcagctttattgcagtcttccatcctcgatgggcaattgcattctgccggtcatcaattattgcgaaaacaatctggtacatttctacagtgtgcccaatgtgcgcaactaccttcaccaccgcatgagcttcggtctgataggcagtgtgcctatcctgcggttgcacgaagagcctctcagcagttttgaaaacaggctgataaagcgcaccttcgacttctttttctcactcttattcctctgcaccctgttccctgtcattttcctgatagtcagcgcagtgattaagattacctcgccgggccccatcttcttcaaacaaaaaagaaacggactgaacggcaaagaattctggtgttacaaattccgttcgatgaaagtgaacaaagatgcggacaagatacaggctacgctaaacgacccccgcaagacaaagttcggcaactttatgcgcaagaccaacattgacgagcttccccagttcatcaacgtgctgctgggcgatatgtccattgtcggtccccgcccccacatgctgaaacatacggcagaatactcgcagcttatcaataaatatatggtgcgccactttatcaaaccgggcatcacaggctgggcgcaagtgaccggtttccgtggagagacacgcgaactgagccaaatggaaggacgcataaaagcagacatctggtacatggaacactggacattcatgctcgacctctacattatttataaaaccgtggcaaatgtgctccacaaagacaaacaagcttattaaccaaaaagacaaaacataaaaaacgaatagacaaatgaaaaaaatgaattatgccttgctggttcttcttgccttcgtattggcaagctgttccgcctacaaacaagttccatacttgcaagcatccgagtatctggacacttccggccagaatactcccctctatgatgcccgcatcatgcccaaggacttgctgaccatcacagtcaatactacggacccggaaacagcagcaccattcaacctgaccgtagccactgccgtcagcaatcaaaacagaagcctgacgagccaacccgtattgcagcaatatctggtagacaacaaaggcaatatcgacttccccgtactgggcagcctgcacatcggcggactcaccaagagcgaagccgaaaacctcatcagagagaagctgaaaacctacatcacggaagtacccatcgtcaatgtacgcatggccaactataaaatttccgtgatgggagaagtgaccaaacccggcagctttgttatcaccaacgagaaagtaaacctgtttgaagcacttgccatggcaggcgatatgaccatctacggacaacgcgacaacgtgaagctcatccgtgaagatgcacagggacaccgtgaaatcatccctctgaacctgaacgatgcaagcattgtgctgtctccctattattacttgcagcaaaacgatgtgatttacgtcacccccaataagaccaaggccaaaaacgccggcatcagtaacagtaccaccatctggttctccgtagtgggtacactcgtgtcgcttgccagccttattgttactatttcccgataaaacaacccgatttcattatgaaagaaaatttatacgacgatctttataccgaacaagaagaacaggtagactacaaagccctcttcttcaaatacctcatccactggaaatggtttgttgccagcattgtggtatgcctgataggaggatggatttatctgcactataccacaccggtgtacagcattaccggctctgtcattatcaaagacaacaagaaaaacagcagcgccggcaccggactgggcgatttggaagacctcggtttttactcgtccaccagcaacttcgacaatgaagtggaagtactgcactcacgtaccctgctgaaaaaggtagtggaggaactggacctgtatatcaactacagaacccgtgagaacctccgccctgtagagctttacaaagacacaccggtaaaagtgtggctcacccccgaagaggcagaaaaactgcccaatggcgcagcagtgcttgaagtggtactgaaacccggaggaaagctgagtgtcagcacggaaatagacgaacaggaattcaaacaggatttcgacaaacttcctgccctgctcactactccttacggtacgttcagctttactcccggcgactcggcaatcgttgaaaaggaacaggaaatcaccgtcaccgtggcagctccgcgcatcatggcaaacggatatgccgatgcgctttccgtggaaccgacctccaagaccacaaccattgcccaaatcactttacagaataccagtccccaacgcggcgtggacttcatcaacaagctgatagaaatctataaccgtgatgccaacgacgataagaacgaagtggcaagcaagactgccgaattcatcgacgagcgtatcaaaatcatcaacggagagctgggaaccaccgaaaaagagctggaaaccttcaagcgagatgccggactgaccgacctgaagagtgacgctcaactggcactcagcgagaactccgaatacgaaaagaaacgtgccgaaaacagcacccagctccgtctggtgcaattcctgtcagagtatgccaataaccccgaccatgcctacgaggtattgccggtcaacgtgggtctgacagacaccggcctgaccgaactcatcaaccgctacaacgaaatgctgctggaacgcaaacgcctcctccgcacctcttcggaaagcaaccccgtggtggtgaacctggacgccagcatccgtgccatgcgcagcaacgtgcagaccaccatcctgagtgtgcagaaaggattgatgattaccaaagccgaccttgaacgccaggcaggaaaatacgccggacgaatcaccagcgcaccgggtcaggaacgccagttggtgagcatctcgcgccaacaggaaatcaaggcgggactgtacctcatgctgttgcagaaacgcgaagagaacgccattacgctggcttctaccgccaacaacgcccgtatcgtggacgaagcacaggcaggtctgctccccgtctctcccaaaggcaaactcatctacctgattgccttcgtcttgggaatcgccatcccggtgggcatcatttatatcatcgaactgctgagatacaagatagaagaccgttcggacgtagagaaactgactaccgtacccatcatcggcgatattcccgcatcagacaatatgccgaaagaaggttcggtggtggtacacgaaaaccagaacgacatgatggccgaaaccttccgcaatgtccgtaccaacgtgcagtatatgttgggcaacaatcagaaggtggtgttaatcacttctaccaccagtggcgaaggaaaatcatttgtggctgccaaccttgccatcagctttgccctgctgggcaagaaagtggtcatcgtggggctggatatccgcaagccgggactgaacaaagccttccagatgtcgcataaggaagacggtatcacccgttaccttgccgacccggaacacaccgacctaatgtcgttgctgcaacagtccaatgtcacccccaacctgtacatcctgcccggcggtgccatccctcccaacccgaccgaactggtggcacgcgactcgctggtacaggctgtcgaccggttgaaaaaggaattcgactatgtgatactcgataccgctcccatcggtatggtgaccgacacccaactgatttcgcgcgtggcagacatgagtatttacgtatgccgtgccggttatacacccaaagcaggctatctgttcatcaacgaactgagagaccataagaagttgcccaacctgtgcaccatcatcaatgatgtaaacatcaaaaccggaaagtacggatatggcacgtatggcaaatacggctatggtagaacctatggctacggttacggatacgatgaaaaaagtaaataaataatacttcattttttagttacataatagacaactagaaatcccttccccaaaatgttaattatttaacacaaagggaagggattttcatttatctacggacaaatcatataaatattttactcatacaatttacttgtcacctcaaaacagggacattccttcacccactcttcggggctgatgcgtccgtctccgttgcggtcgggactcaaatcccggtgtccgcacacccggcagccgggataatccatcaacaacgttcggataagcaccctcaaagagtgtttctgccattcggtacgcgtatctgcgggacgataacggacatccagtccgccttcataacaaataccgatgctgcgcgcattgtagcccagcgcatgtgctcccggcttctctagggggcgcgtattcttaatatccccattcttgcggatatagaaatgataacccgccccattgaatccgcgatgccgatgacacacctccaagtcgttttcagtaaagtccctgtccgcacgtgtggcggaacagtggactacaatcaggttaatctctctcattctttcttctcttggctctgaggagcagcatgatgcactccagaatcttaataatcaagtttttcatatttcctcctttttcaaacgattaaaactctattccgaaactttttttagggatatgccaaaacgtttataatgctgtcatttcatcggtagagacgaggttcgcccactccaaacagcttgtttgtgtattactcccaaggtcgtgaccgttggtaagggcaggcaacccctccccctacagttgacgatttggcagaccggttcagttttgacacaccctcagaggttagccctcgtttacaccggagacttcctcttcaggcttcttctcctccttcttaggcagcttgttcaccttgctgaacgacagcgccgtcagcatgccgctcaacgccagtccgggacggaaattgatacgcgccttgttaatcatggaaacatcatacttgtcttccgaatcggcccccttgccgctcacaccaatctgaaacgtaagtattcgataaactccctcgtatattgg

SEQ ID NO: 6705 - DNA, 48636 bp, Unknown
  gut microbiota DNA sequence
agccaagttcttttaaacggaagattattacagtccactgcaacgaaccatacagtccgctgccgaagactgtagtaattcgacggacagacaggcataattgaaagaatgaaaacgtttagtccggctaatgaaacgatttaggaaactcaaaaaactcgttatcttttccaaaaacgtccttgtcttttggaaggtgcatgatttcatgttagtacgcataagtctgcacgtacgttcgtatagccctctacgtacgtttcgaggcggataagacaggtctcactcctccctgtttttggagactgagtctgaaaaactttcacacggaatccccatggataggaggttgcaatacctgttatgtgtgaaagcagattgtatcaactttgctgataggcagctttccttcaccggtataacttcatcttttcttcaaaagaattggaatttctcggaatgcattgcgatttttgatagaaaaactcaagaccttttttcgagaagtttcatggttttggggaatttttattggccccttcttcgttcttaccggagattataataaattaatactttagagtgcagtgttcccttattgcatgcattttaaaattacagaagaaaacattgtttattgatttcgttaactttaaaaaaataattatggatgtattttcgaaagtaaataagtggctggtttggggaatgggcattgtgtttgccatggggtttcagtcttgtttggatgatgacaatgacaattggtatgggaaagtaatacccaatgcattggtaacggtaaaaaacgtggatgatggttcgtttttcctgcaattggacgacagcacgacattgttgcctataaatgttgcgtcatctccttttggtgaaaaggaagtgagagcgttagtcaattatgatgaagtggacgaggttagcggcagatacagtaaggctgtacatattaactggattgacagtatcctgactaaaccgattgctcctgatttgggagaagaaaatgatgtcgtgtatggtactgatccggtagaaatagtgcgcgactgggttactattgcagaagatggttatctgacacttcgcttcagaacagaatggggagatcgtactgaaccgcatttcgttaatttgttgaagagtcaagatccggctaatccttatgaagtagaattccgccacaattcacatggtaatacgtggggagagttggcagatgctcttgtagcatttgatttgagtgatttgccggatacacagggtaaaacagtgaagttgaagttgaaatggaaatcttttgatggcgataagtctgcggaatttgattattgtactcgcaagggaactccggccgcttcttctgccattctgtctcaaagaagtattttgaagattcaataacgtgatgacgtgaattgcaatcgtttctgatgatgagcaatgagaaaataaggaaggaggactgtccaaagtaactgtccggtcatcgatgatagaacgatgaaatgatagttactttggacagtctctttcttttatttataaccggtttgtgtgcagaagaagagtccccttaaggcgtaagggtaaactctccatccagacgtatatcattggaagctgtgccgaccataactttaaactctcccggttctactacttgcttcatttccatattataaagtgataactcttcttttcccagggtaaaggttacttgtttgctttctcctttctttaaaaagatacgtcggaatccttttaacaggataggagcttgtgatacggaagctactttgtcgcagatgtagagctgcactacctcttcaccatctctgtcaccgatattggttatcgtgcaactcactttttgcaaaatgtcaggagaattccctttttccaattttaagtgactgtaatcaaattgagtatagctcaaaccgtaaccgaatgcatatagtggagttccggcttcttctacataagaccgttgctctccttgtgaataaaacaggggtagttgcccttcacttcgaggaatggataccggtaaacgtccggccgggttgtaatctccaaacaaaacatcggctatggctgcacctccttgttcgccgggataccaagcggtcaataaggcttgtgctttttctgctgccagattcatattgagcggacgaccttggatataaatgactattaccggttttcctgtagaggttatagcttccatcagtttttcttgatatcccaataacttcaaagtgctgcggtcatagccttctccacattccatgtcggataattgttggttctcttcttgagtaaccgtggccgctccggtttcaatgtatttggttttgaagtcacgggcactcgaaccgcctactaccaatacgacggcatccgctttttgtgcggcttccacagcagcaggaatgtgatgggcggtggtgtcacgaatagcacatcctttgacataagtcacctgtgtggaagctgagacggtatttcgtatgccgtctaaaacggtggtaatctctttacgttcctgaggtgctgtgtaatctcccaactgattgtacatattgtcagcgttcgggccgatgactgcaatgcttttcagttgtttgcttaaaggcaatataccttcatttttcagtaataccactcctttgcgtgctacttggcgtgccaattccttatgtgcccgggagcgtaccgtccgtccggctttctcaggagatacatacgggttttcgaataatcccatacggaatttgagacggagtatattggcaaccgccctgtctatatcctgcataccgataagtttttcttttaatgcctgtcgaaggttttttccataggcgtttccccctaaatccatatctactccggcctttaaagccaatactgaggcttctttgtgattttgggcaacccgggcgccggttatgccttcaatacttgataaatcggaatatacgaagccattaaatccccattctttgcgcagtatatcactgagtaaatatttattggccgtacagggaacaccatcaatggaattgtaagaagtcatgattgtgcctgctcctgcttccactgctttcttgaaaggatgcagatagtctgaaaataattgtcgcataccgatattggcgcgtgcaccattgtgtccggattcagggataccgtaagcagcaaaatgcttgagggtggagaaaagatgttttccgtcattttgcacttctccctgcatacctttcataaaagcaactcccaaagtagaggtcagtacaggatcttcgccaaaagtttcctccatacgtgaccatcgtggctctcgtgcaatgtccaataccggaccgtatccgatattagccccttgcaaacgtgcctccaatgctattgtttcacccattttgtacattaactctttatcccatgtgctggcttgtgccaatgaagtgggaaagacggtagtaccgatggccatatgaccgtgtggacattcttcggcaaagagaatgggaattcccaagcgagtactgtcgatggcatatttctgtaatgcattcaatgcttttgcaccggattggggatttagtccggtttctaaagtcttttgtgtccatggatcggcacgtagcactgcccagaaagaaccgatgggtgcagcactcatccgttctttatatagttcggaaggcactacacccttggatgttttggtatacatttcccatcctagcggacagcatagctgcccgattttttcgtctacagtcatacgtcccagcaaatctttcactctgctttcaacagttgcggaagattgtttgtataaaggggtttgtgccgacacatggacggcacaaatcacaaaacaggttgttaatatactttttatattcattgattcaataattgtttgatggctgcattgtcttttgttccctttttgtgcttgacagaaggtgcaaacaaggcatccaattgatatatttgtaactctttgacaggagtaaatgcttttgatgctacatagtttttcacagaatggagtaactgtctcattgcagggcgtttctctatgtccttatccgggtcggcacataagataaataggctgcctttacctatacgtgcttcaaaagcaatacccagtttttggttgtattcataggtatcgatactttgtatgatgggggtgatatcggtcaaatcattaagttccatagcggtggcatagtttaaaatgtcccaccattgccaatcggcataagaggtagttgggaattcgccaaaggccgggtgattactgtctatgagtgtcccgacaatcatagggttccagttgaacataatcggattccagaagtggctggcaaatttagttttgcgtcctttaacgttttcggggataagtaatactttctttccttgttgcaaagctgtttttactttttcgtcataagtgcgtgcatatacatagtcatcggctgctgtttgttggcagggatatacccaaatgtcccattcattatggtaggtatcattcagggtggtatgtaaagtcaatttttcggcatgactcacattgttgaggctgatgtttactttgcctaaagagtcaacagtagcacagggtatagctggggttgagatatttcctttttttacagtgttccctttgccatctttcagttcccaattcagttttccgcgttttaacggatgttctccataatgataaatttccagttttgccgtgaaagtttcattgttcatataagtacgtttcggcatacgtgctaaaagaacggtaggtgcacaggattcgcgatacttttcggggctgaccaatcctttgctttcccaaaaggcatcaagaataccgacaaaagcacttccttgtcccggaaaatctgcaagtcccagcaattggaaaccacccgaatttgcagtacggagtaatgattcgtttacttctttatattgtaagactgtatgggcaccggttgcacggaaaaaatcatctgcttgatgtagcattccattgcgtgccaatctttctctgaatacctcaaaattacgaggagatacgactccggtatatttttccatttctgcaaaattaggatacatgcagcgctgtccggtttcgtgtgcaatgacagggcagtcaatatccgattcttttttacggtcccagtctgtagatggtttaccttcgtatacagttatccatcctttttctgtcacatgcgatacataatattgatcggagggggtgtgcgtacgggcggtagatgcagagtagagtcggcgattgtcatgcttttgagctttcttcaccaagtcttccaaaacattaaaattaccttcgttttcatttccgttacacattaaaataaaggaaggatggtttccatattcttccaatatggcatacatttctttctcgaaaaagtcacgtcgtgcaggatattgtccgacgtctttaatccacataggcaattctgcttgcaggtatattcctacttcatcggcagcatggaaagcggcttcggggggacaccacgaatgaaaacggatatgattcatgccataatcttttacggtcaggaagatacgtttccagtcttcgatagttgttgacggatatccggtcaagggaaagacacagcagtccaatgctcctcttaagtgaacattgcgcccgtttatttggatatgatgtttgccttgcgtgacttctcgcataccgaaagttatatttttgctgtcctgtttgttatcggcggtaagcattgcttttacttcgtatagataaggagtaaattcattccataattttatatttttacccatgctgatttctttaatcagttggttgcttccttcttttaaagtaatgggaaaagattgttcactgacagttttgccacctttttcgttgataatcagttgtaatagtccattagtcggttgtccggtggtattatttacagtgatgtccaatgttaccgttcgtgtttctatatctggatatgcttttaaagcatgtatatttgtcttttcgtatgccgttaattctatttttcctactatgccgttccaattggtttgcgtgtattctgtagttccatgattccattgatccattggatatttcaagcgattgtctacacaaatcgtaagaatatgcatgccgggagtcatttgcttgctcagtaaaaaacggtttgggacactaaggtgttctttggcaccgatttcttttccatctacataaacagttgtttcccaatggcatctttccaagttgagtgtgatttctttgtctttccattcttcgggaataatcacttcgcgttgataccatgcttggccgcagtattcaaatttacgggtaagacggtctacatatcgggcggttgtcaacataccttttccgccttcgtcggtactgcccggcaacatgatagattcggtaagttttgcttgatagagttctgagcccggtgtctttccgaatcccatggggtcagcctgaaaacgccatgttcccgataaatcgattctttcttgttgtgcagacagtagttgcgcacagcacagcatcatggcgaataagaaactttttttcatatataatcttgattaaaagaattagattaagatatctttgtggatacaaagaaacactattttccttgattaaagaatagattaaataaataactgaatggattattttacggaagggctccaatttagttattcttattatatacttgttctatctcgattttcagcttttgagctaattggggatatgcaaatattagattgtgtaattctgaagggtcattctctaaattataaagttcggcatttttattctttctttgcggtaaaaatttccatttcccttttcgtatggctatctctcctccgttgttttgagtcatgatatattcacgatataaaggagcttggacttgtgtgaatagagatgcaccactacggctgtcttttagttctttttttgtgatgggaagatttaacatatcagcaaaagtggcaagcatatccaagtagataaatggttgtgtctgaatgaaaggtctttttattttttgaggccaggaaaatatgaatggaactttatttcctccttcatgcaaagaatatttttctcctcttaaattgccatacggattgtgtccatttatgttttccaaagcaccgtcttgataaccttcctttatcattggggcattatcacttgacaggacaataattgtattttcgtaaatgcctgtttcttttaatgtttggatgattttgcctacatagtaatcgaattcttcaatgacatccccataaattccggcttttgatttgtttttaaaggcaggggacggaacacgtggttcatgagcattatgaggggcataatataggaagaaaggggagtcggcatgtttttttatgtaagaaatcgttttattcaacagatgttctcccattttatcatcttgccaccgtgctgaatttcctccactcatccatccaatgcgactaataccgtttataattgtcccgtcgtgtcctaaatgtggtttcatgattagtttgtcaggattctctttgcctgtatcatcacttcctattttttgtttataagatacatttataggatcattaggagtaaggccatctactttttcattattgatatatatgcaaggtacccggtcatttgttgccggaaaatagtaagcatagtcgaaccctattgctaatggtccttctttgatttctctattgaagtctaccggtatatcttttgttcccagtcctaaatgccatttaccgacgatagctgtttgatatccgtttcttcgaaacatttccggcaatgttgttgtggcaggactaattgtcaatggggcatctgccggtaatattcctacattttttctccatgcatactctccggtaagaagtgcatatcgagagggggatgaggtggaggccggtgcataggcattggtgaatataatactttgccgggctagttgatcaatagccggcgtcttgattttttttgctccatagcatcctaagtctgtatagcctatatcatctgctaatataataatgacattaggatgttgttctgcttgctgagcataactggtatgtgctatagataaagttgttaatattccggtaaaagaaatgattttagtattcatcatgagtatggggtgttaattattgtaagtggaaggaaggttctttatgatttagccatttcccgaggggagagtcccatttgctgcttaaatatacgtgaaaaatactgaggcgattgaaaaccacaaagaaaacaaacctctttgacggatttttcagtattctttagcagttcgatggatttattgattctaatctgattcagataatctaaaggagaaagattcaagttctgtgagaataattttcttaaataacgttcactgatacttgcatattcggctatatcattgatgttgatgtctgtttggtagttgtgccggatatagcaaactgctttctttaacagctcatttgtgcagatagacagataggtctcatgcatatatctatagagaagaattaataattctgcataatacattactaccaggtatcgataatgcggtcctttatgttccatttcattgacaatgcgttgtatagttctcattacacctacattgttcactattttaatcaatctgttttctttagaaaacaaaaaggaaggtgtaggtataggttctgtgccaactttgatatttgaatgaaaaagagaaaatatttcgggtaaaaattctaattgcattaatatcgtgccatttgcaccggcttcaaattgatgttctacatgtggagtgataatcatgatgtcaccttcatggaaacttatgctttcattgtccagatgcaatatgcaatttcctttttttatataattaatctcaatgcgcatgtgtttgtgaggaccatacgtttcgaaagggcagaaggaggtaaaacgaaagacatctgccagacgtttactttttaaacttgatgtaatctgttccaatacttcccaaagggaatattccgttattttattcatagtatttcatttttgtataaaacaaagtttgtatggacactagaatttgccggttttattcagtagaattctagtgtcctatgtcccgatattcgggtccttattttgactaaacctattaatagacagactggggagtttcctcctttttacctttcgagcttggttttactaacgaacaaagttcttcaaatgaaatggatttaacgggagcaaaagcattggatttcatatagttaatcaaactatataacaattgctttttttcaggaaatgtatcctgatggtttagcaagtccatgctgcatactattaatttcccatttagacaattagtttcaaaaagagttgctaatcggcggttattggcaaagttgtctacacattccactaatggagtaatgtgttgatatatgctatcgattactaaagtgcgcgattgggttgtcagactccaccattgccagttggtatgtccctctgttgggaaatgtgcaaaagctttatgagtaggatctaacaacagtcccattgtacctgcttgtttgggaaagtggacaggactccagaacaccggaacaaacttgccttgtaaacctgcacaaagttgataagggggactgaataatactgttttaccggctgcaagagctttttgtgtttcggtaagtttgtctgttactacaatctcttctttttctatcgttaaagtggccggatatacccatatattccaagtgtttttataactggaattttcgatggaaactcttaaagtcagtcgttctgcttttttaacttctgataaagaacaagaaatcttaccggctatattcccgcctccgatttttatgtttgttaaaggtataataccctcttgtaatggctgaccggatgcattggttaatgcccatttgatattcttattgttgatttcctcagaactataattagcgatctcaatgtcggccgtaaactgctcgttgtttttgtatacagcttttgagaagcgagctaatgggacaactggagcagagaattgacgaaattctttggcattggctacgcctttgctttcccaaaaagcatttagtaagccgactaatgcagttccttggccgggaaaatcatgtaaatctaaaagttgaaaaccgctgatgccgggagtcttcatggcacgttctatttcttctttatataaaatggcagccaaatgaccggatgcagacaaataatcatctgccttttctagcagatttttgttttccaactcttgtttaactcctttaaaattaagaggctctaatacacctgtgtatttttctatttcttttaaatcaggatacacagcatactgtcctatttcgtgcgtaataaccggaacgggcatgctatctacagaagcagaataatctttattaaagtttggcatttctacatcaaaaactccttgtccgcgcacccaaccttttttagtccattgagtgataaagaaatcatcgtgcggctcaggccaatcgccatgtcctttttcaaaagtaaaagaagtcgttgtatacaaatgtctggaatcaagggcttttaccgaattcaataaacctcccaaaaattcaaagtccggttgcaattcatttccaaggctcaaaaagcagaaagagggatggttaccatattccgataaaattcgttttgcctcattatataagaattgattcatttcaggattttcacctacggtcaaagaccaaagtggtaattccacctgcaaataaaaaccgagtgaatccgctacttcaaatgctgctttaggagggcaccaagagtgaaaccgaaggtggttcagcccccattctttagcggaacggaagacttttaaccatccttctttagtggttggggggtaacctgttaatgggaaaatgcaacattccaatgtaccacgaaggaacacttttttaccattgactaataaatcggctccgttacggctaatttggcgcattccgaattcaattttctcttgcgccagactctctttggttttcatctttatttccagctcatacattatcggagtaaattcactccaaagccgtacgtcctcgcccatgggacaaacaaagtccagcattgtttcgcctgccgaaaggtccatttgctgttctatttccgtaacagatttgcctgtgtttttctcttttacatgaacagtcaatgtccccgaagctttattccctgtgttttgtagtttcccttttacatggatttcccgggtttgaatatcgggatatatctgtatatctttcataaagacagcatctttcgcccgcaaagagatttctcccaaaataccattccacatgatttgtgtttcattggtatatgcatgtgccatatcaccggcagtgatgtcgtatttttttctgttatctactcgaatggctatccgatgtttccccggtgacagatattctgttaggtcaaagtaatgggggcttatcaagctttcttgctctccatttacttctttaccgtctatccatacatttgtttgccaaataacacgctccaacttcagttctatgttctttccctcccaatctgaaggaacggatatttcacgtatgtaccaagccggtcctacataactgtgtttgcgagtgagatgcaatatttgaggtttgcttattgagggtaataaccgattggggataccgtatcctgcatcatccatcgttccgggcaattttattttgtcgggaaaagattgggtataccaatgttttgaaatacctatatccatactgtctatggcaaattcccattctccggctaaagaaagaattgacgtactttctttacatcctgtcaaaaagaccatgcctaaaatagcaagtaataattgatttaataacttcatattgtatttgtcttatggtattatatccaaatttggaaattaggatttatttcttttatataactgaagcacttgtcggctttctctttattatctagtcctaaatgccccagccccatgagatagtggcaatggattcgatttttcttattcatgtcgtcttcccaaatctgtaaatcaggtaaagacacagcaaagtaatccattacaaaagtatcatataaatgtttttcaccgtaggaaattagggaattaaatcttccgcgtgcctccgcttcttttcctactttccgtaaagctaaaccttgataatagattttatcgggcttttggtcattgtagtacatggcagctgtgggttgtccattgcccgaagcagcttttgtgaatgatgaatgtgcttcatcatgattacccattgcttccaaaatgcatcctttataataaaggaaatcattttcttgtgcaccatacagttttccttctcccaaatgatgagggtagacaaaacattcttcaatcaaggcaagtgcatgctcgtattctcctgcctttagagatttctttgctaattgtatacgtgcatattgatattgggcaggtactttaccttctcctccttcccaaggatggaattggcgttggtcaatgagttgcatggcttgttcgtattctccggtcagattaagcaatgtagcatattccaaatagagatcatcgcgagtagctattatttctttatgtttgtttaatagatgcaaacgttctttcggggaataatccatgcgtttatataattgatccaattccattaagatgcgtgcgtctgtttcatcaagcataaatgcctgttcaagtaattgtactgcttcttttttctttccaagtttgttgaaataagctaatgaaagatttcgtaatacggtagggaagccgttgtccatttctttagaatgttcccatgcatcgacagcttcctggtattgacgtttatcataccatatattacctaatagataaaaagctttcggtgcatgtatcggtaaattggttacgcactgaagagctaaaatcgcttccagactattggggaaatattcatctaatggactgttttctgcttgacttactacacagacagcttcgtcttgttgattcattctacataggaaccacgctttataatataacagcattgttgaaggagccgatatattggttaatgctgcatttaccacagccaatgcatcttcccagttgccggcttgggcgtagtctgtagctagttcttcataattacgtgattcatcacgcattaatattcttaaacttgatggcatttctttttcaccggactgaagccatgcttcaaaacgacatccaaagttgaatttatctatattgagtgactctttaatcagttctatggcttctttttctcgtcccaatttacgaagaatcattgcttttaaatgacgtccgcgatgattatgccagttacgaaccaaagactgattaatttcgtacaatgcattatcccactcattatgtgcagccgataattgagccaaagagtaataacctgaatcttgccaagcagcgttccagcatgctttatagaacgcatcgtatgcttcaacagttttatcttggtattttaatacaagacctaaattataataaggttctccgtcgtagggatttggattacgttctgtcagagtgttaatagccttgcgtaaataaagttcggctttcttgaattgtcctttacggaatagccataatcccatagcgttgttattgcgtatatcgctgttgtctctacgtagggcttctaaataataatcagttggattgtaagtagcatgtctgtattgttccaaatgtaatcctgtcaggtaaagctgttctgtagagcgtacttctgaaggaggcaatgcaggttttgcaggttcaggaattggtttgatttcagttgattcagccttccatgaaagtagtaacttgccggttgaacaataaatataaacctctgcttcatcaggcgatatatttttaatggtatgagtaaataccgcttctggagtcaaatctgtaatattttcccaaatgatgtcttcttggcgtttaatcacaattcgtaaacctttctgtgcggatgtagcaaatagtttgagtattgcattctttgtgtcttcagtttctatattcattagtaaatcagaagtggcattctttactacccctaattcacgataaggaataaaatattgagtgaaaattttttcctcataaggttgcaaccaagtaaagtctggttgattgtcggtataaactccggtcattaattcgatatatggcccatctgtgtctgtcagattacgatcccaggcttgtccgaaatctccatttccccaagtccattgttttttcccgggagagatgtgatggttggctacgtgtaatactcctgcttgagtatcgttttcataaccgcctacaaagttgtattttgagcggatagccatatatgaagtgggtaccggtatatttttataacgtgagatgtctacacctgctgaataatccattttataataaatgccggtagcgataggatattttgatacatctcgcttaccgtgatcaaatacagcattgacatcggcagggaaaaccgattgataggcttcattgacagcgacggccgggttagcccaccataggaaggtttgtggaacaggagtcggattatatagttttccttgaatttcaagtacagctttgccgggacgtagggtaaaaccagccatacctttctgatggaacatccgttcgcgttcgctcacccatacggtagcacttccatctgcattttcttcaattgtaaaatctacaggtagataagtgctgggtcggtgatgctgaggccaattgaattcaataccgccggaaatccaaggcccggtcagtcctaccaaagcaggttttataacatggttgtaataaataaaatggcgtttctttattttatcataagccatttgtacacgtccgcccaattcaggaagaatcataatcttgatatactcattctccagataaacagcatgataggtttcttcttgacaagtatctgaaatcttttctatgacaggataaggataaaccaccccactacttccttgataaactctattttcaaaaaacatcggattcttttccggtttgccaataccataggtaggaagcagaatatcttcttcccaaacatttacttttatatccatatcagttttatttttttgttatttctttttctatatcttccaaacttttcccttttgtttccggtagtcgggcacgaataaaaaagaagccagttaagcatatgccaccatataaccaaaacgttccggctgcctgtaatgattcatttaataggggaaaactgtaggtgagtatgaagctggctatccataagaagagggtagagatagccatagctgttccacgaatctgttgtggaaatatttcggataatactacccatacaatgggggctaatgacatggcataacaggcaattgccatcattaccagtattaacattatccaaccactcattcctgcaaagtaacaacatcccatcagcagatagataacagcaagtcctgccgagccgattaacattaatgtccttctaccccaatggtcaacagtataaatggcaacaaaagtaaagattacgttagttactcccgttattacaatattcatcaagacatctgatacttcataaccggcagccgaaaagacttcgtgggcataattgaatataacattgatgccacaccactgttggaaaacagccaaaacaattcccagtattaatacccgccgtacaccaggttgtgataatgctctccaatcgtatttttctttcacctctttggcggctaaccaacgtggactttcagggataatgaaagctaatataaaaaataaggcagccggtaatgcttctgcccagaacatccatcgccacgcctgttctattccttccgcaggaagttgtgaggttccttctgtaaataggtttgctatcatccaattggcaagttgtgcagataatatacctaatacaatagtcagttggtttaaagataccagttttccacgtatctcagtcggtgatacctcagctatatatatgggagaaacattggaagcaattcctatacccagtccacctacaatacgatagaatatgaaccaggaaaaattatcgacagctcctgtaccgacagcagacagcaaaaataatagagcggataatattaatagttttttgcgaccatatttatcactccaactaccagagaagcctgctccgactaaacatcctagtaaggcgctactcattgcccaaccgcgtaaagctgctgaatcttcgatagcgaagaatagttcataaaaaattttggctccgccaattactacccaatcataaccaaacaggtagccacccatagcagaaataaagcagataaatagtaaattctttgaattaatgtttttcattgtgtattattatataaatcatactgcaaaggaattgtatttttctggaatagggaatagataaattattgaattggatggataatcttatgataataactttgctgcctgtataaaaatcactatctttgttactgttaactataacttctacagcaatgattaaacgcaaagatggattttcgggtgaaagagctttagtacttcctgcatcaattatacatacgatggaaaataatcctttagccaatgcgctgcatattacggacataggatactatccacgggcagaacatcattttagaaaacgggaaactcccatctctcaatacgtatttatttattgtgtggaggggagaggatggtttagcgtgaatgatgaacgttatgaaataaagagtaatcaatgctttattttacctgcgaatgtacctcatagttacggagccgatgacacagatccatggacaatttattggatacattttaaaggagacttagcagaatattatgctttacgtttattgacccctattgatatcaaacctactatttactcacgtattaatggacgtttgaatttgtttgaagaaatatatcatactttggaattgggatatagtaaagaaaatctgttgtattcttgttcggctttccatcattttcttggtaccatttgctatttgcaagaatatagaaatgctacagtcaatgatatttcaaatgatttagtagatgcggctattcattttatgaaagagaatataggaaaaaaactcagtatctctgaaatagccgagcatacgggatattctgtttctcatttttctaccatttttaatcaccgtacaggacactcgcctgtcaattacttcaatttgttaaagatacaacatgcttgttatctgatagactgtacagatatcaagataaatcaagtttgccataaaataggaatagaggattgctattatttttcccgtttgttttctaagataatgggaatgtctcccagcaagtatagaaaacataagaaaggatgaaataagaccttatttggtgaatatttacttcataatacttcctgcaaataggcttttaccttgtcgattgaatatttttactgtataaaagccattgggcaatgatactaaagatagtttatgaacataaccggttttccatatttcttcgttggtcatattatagatgataatagtttgtgcatcctttatttccggcaggtaaagcatattccctttatttaataaaggtatatccatatccgaaaccgtattcagagttaatggagcgctttcattgccaaagcggtcagcggcagtgacggcaaagtatcgtttttgtaaccaagggagcttggctgtatattcatactcattggcaatgagatgggtagctattaaattttgaggttgcttaatgtcaacaggatatgtatcggaaccgtataaatggtatacaacagattgattgctgttatcggctgatgcttgccaactcatgcgaagtttgccgttcgctatttgttgcaccgaaggatgggatggaacagaaggtggaatactatctgaccatgtcataggagggatcaatgccgggtaagtataaaagttttcttccagttcgtctaatactccttttgtgttatcaagtaaaaagcgattgcgaaaataggcttgtccgtttagctttatctgacgggtgaaatggatttgacgaactatttcgtccaatggccaatcttgttcacgaggggagaggaaataaattcccagtccgggaataatccaacgtttgccgtcgttctctttccagtccaaagcaaagggatagaaattgtttccttggaaatacatcattgggaacaaggcatcatggattccttcttttaaccatctttgtgcatcttgatagactacatgataagcattccagccgcgagagggataacggttagtgtcacgatatttgccaatgggcgaactactcacttttacccatggcttgatagacttgatatcagtataaaggcggcgtacaatgtcggtaatgttatcccgacgccattgtttcagctccttcccttttccgtatctgcggtaggtgtctttatcagggaatttatctgcctgttcgggatagcggatatagtcgaaatggataccatctatgtcatattgtgaagtgatttctttcacaatgcgagagaggtattcttttgtttcaggattgcccggatccagataccagttacctttatatagtttgcatatttttctattcctttgtacgatggagtttcgtcccaacagcttcacttgccgagtgtttccggccgggatagtcactatccaagcgtgcaattccatgcctcgtttgtgacattcttcaatagcaaaagccaatgggtcatatcccggattacgtccggtatatcccgtcagcgattcggcaaaggtctcaatggaggacggatatatcatatccccacgtaggcgggtttgcaataatactgtattgaaattcgcagctttcaaacggtcgagtatatcacataattcttttttctggcgttgaattcctgttgcgcttccggctttggtacgcggccagtccattccgcccaaggtcgtgagccaagtggcgcgaatttcgtatttgggctgtgatataacaggtaaagattttagtattatcagtaataaagttagaaatagtgttcgcattcgctttaattttattgcaaagataagaagtaatcatttaaatcgttatttttgcaataataaaacaattaaatagagtatatgataacctttattattgcattattggttcttataggaggatattttttatatggaagctatgtagagcatctgtttagtcctgataaaaataaaaaaacaccggctctgactatggaggatggcgtagactttattccccttcccacttggaagattttcatgattcagtttcttaatattgcaggtctgggtcctatcttcggtgccattatgggagcaaaattcggtacggcctcttatctatggattgtactgggaactatttttgccggtgctgtacacgattatttatcaggaatgctttctttaaggcataatggtgagagtcttcctgaaataatcggccgttatctgggacttcctaccaaacagttgatgcgtggctttactgtggttctgatgatattggtcggggctgtgtttgttgccggacctgccggtttgttggccaagctaacacccgattatatggacgtaaccttttggattattattgttttcatttattatatgttggctaccctgctgccggtagataagattattggcaagatttatccattgtttgccattgctttgttgtttatggcagttggaatattagttatgttgatatggcaccatctggctttgcccgaaataacagacggtatacaaaatactcatcctgccggtttgcctatttttcctatcatgtttgtgtctattgcttgtggtgccattagtggtttccatgctacacagtcacctttgatggcacgttgcatgaagaatgaaaagtatggccgtccaatcttttacggagcaatggtgacagaaggtattgtggcattgatatgggcagcggctgccacttatttctttcatcagaatggaatggaagaaagtaatgcttcaataatagtagatcgtataacaaaagaatggttaggaaccattggcggattgctggctgtgctgggggtgattgcagcgcctatcaccagtggagataccgcattgcgttcagctcggttgattgttgccgactttatgcatttggaacaaaaaagtataacgagacgtttattgatttgtattcctatctttgctgtgactattggtattttgctatatagtcagcgcgatgcggcaggatttgatatgatttggcgttattttgcatggtgtaatcaaacattgtctgtctttactctatgggcgataactgtatatttggtgcgcatgaaaaagaattattatgtcacactgttgccggctttgtttatgacagctgtttgttctacttatatttgcattgcgcccgaaggattggctctttccggctatatctcttatgtgttgggaggaatatgtacgctggttgcagttataggatttataacttggtataaaaaacaaaatagtatagtatatgaggaaatataagaaatcaacctggttgcctgtggctttatttatttacaccacgataatggctgtttattttattccgcggaatacggagattggtaatgcagaaaaatatgtcactataggggtatcctatcttattattgctttgctttggattgttcttcgtaagcaggagaaacgcagagaacaggaaggtcagaatatggagaacaaaaaatagaatatttacttaaacgacaattgtatgaagaaatttttagtcagcttggtgatgttggtagtaacaacattgggtgcacatgcacaatttgaaaaggatgtttggtatgtgaatgcctcactgacaggacttgacctctctcatagtaagtatgaaggaaccaactttggttttacattgggaggtggtgcttttgtagccgataactttgcagtattgttaaactttaaaggacagtatgtggaacatggaacagatgagactagtattggcgcgcagggacgctattatttatccagctgtggagtatacggtggactaggaatggcttacaaacatctttctagtggggattataagaaaaatcttgtttgcctgacaccggaagtgggctacgcattctttttaggacgaaatctgacagtagaacctgctgtatattatgatttgagttttaatcatacttctgaatacagcaaattgggattcaaaataggattcgggctttatttttaaaggtatgaagtaaaaaaatacggtagggatggggtttaaaccttccctaccgtaaatgataaattctcagagcttgtttctcttttttctttatttagtgggcatataaatgagtgaacggaatctctttaccatcatttccactaactttcattttcagttgaccgccgttttgatcaaagtaacgaatttcaatcgggtgatatcctttagctaaagctttttgacctactacttcacgaggaccatgaggaccgtcattatcaattacttgttcgccatcaatcactaacgtactgccatcatccgacaagagtgcaaaagtataaatatcatcctgaggagcattaatgtaacctttgataatcaaaccgatattaccttttactttcttgggaatcattacatcttcgatagaataatttccatttaccggtgccttttcaatttcggtacatttatttcctttgaactcataccaagtagctttcaatccgggattggatggtgcagctgtaacggccggagtatactcgctcttgataaaacgagtggtggtgatatctcccggtttaccgttcgggcggaatgtgcggaatgtgcggaatgtgaaatcagttgtttcagttacttttaccggaccgtcatacttaggcgactgcaaagtgggaacagaaccgtctgtggtatagtgtatttcagcacttgggtcgagacaggtgatgttgacaataccttcaccgataaaggcatttgtcttgttaaaaccctccaaatcaggaatacggtaattgatattcataatgttgaggcgttcaaattggttggcaagacgccgggcaaatgcattccagtctttctgtgaaggattgctccaacccaattcggcgatagccaacagacgaggaattgccatatattgcatacgttcacgtgaaggaatccattcgcaccaaacattaccttgcacacctaatactaacggttgcatttcagcgttttgaatttcgctcatcggatcataattataaatattggctactgaattcttatcttcctgatagtctagatagaactgtccgttaggagtgaaaatgataggatttccttgtcctgttgttttagaaggagcattcttagcccaactgcgccaccacatgacagttgctgtttttgaaagtccgccttcgataatctcatcccaaccgatcatttcttttcctttatcgttaaagaatttttccatatcatgaatgaaccatgattgtagttcttcttcagtcttcagcttattgtcacgcatacgtttttgacagtcgggacatttcttccagttggttttttctacttcatcaccaccgatatgtacatatttgtaagggaagagttcgatgagttcgctatatacattcttgcaaaattctattgccgagtcttttccgggacaaacgggagaggagaaggtggttccccaaccggtttcatcgaaacaagataccccttcataattgcttatggcagccagcatatgtcccggcatatctatttcgggaacaatgtcaataccacgtactttagcgtatgcaatcacctctttgatatcttcctgagtataataaccgccatacagtgtatcaccttctacaatgcgaatcttgctttcgggaatagccatgtcaggattatcgttcacctttgattggcggatgcattctttgtcatgagaattgaatttgcgccaagcacctttttcggtcagcaaaggatatttctttatttcgatacgccaaccctggtcgtcggtgagatgccagtggaacttattcatcttataaagtgccattacatccaacagttcttttacttcatctttggaatagaaatggcgtgaaacatccagcatgatgcctcgccaagtaaagcggggggcatcattgatttccacactcggaatagcccaatctacaccgtccactatttgtttggattcaatttgaggagggaataattggcgtaaagattcaattccggcaataactccaccataagagtttccttttatattgattttcttagtgtcggtttttaattggtatgcaccctctttgccttcaacttcccccaatgagagggtgatggttccttctccgtcttgtacttttatgttatatccggtggaaggagaaagtattcctgtcagatattcggcagccggagccagccgggaatcagtgatgccgatggtgcaacttttaggaagaacgaatgcgctgctgtcttgttgaacattgttcggcagcgggacgatagaaacgtctctgacagagggaggagtggaagtacaagcacccaacagcaatgagctcgtcacggtgcaagcagcaatccattttttataagtctgcttaatcataagataattttttaggtagttaatatattagtattggaatgtcactaaaacacctttatggtctgtcggccatacattctgcggttcgatgaatttatcttttgaagtttcctgtacacgctgagaacgtacaatagaacctttaggaccaaagattgctgcatctttcacggtcagccctttttcgggatagaaccaaatatagtcgatacggtcgcgttcatcggctttgggtgcccaagtgattttttcggcaggtttggccggattgtcagaaggataagtaaagccgggatagtcaagcacattgggatagaaagaacggtaagcatcaacgaaaccggcttcatccagcaagacgggcactgtccaaggaattactaatccgtggtggtcgtaaaggttcttggtttcttctgtccaatcctggtgcgagggttcattgaaatcaccacccaaaataatggtatatccggcttcccggtctttctttgcctgctcgataaacatcttgatggcatcatcacgttgtgacgcgacatttctttccagaacttcttcaactgtagtgggaataggaatttcttcccaagtagaaccgtcatatccacgtacattataatatgcatcatccagataatccagatgagaggtataaacggccattttctttccattcatgtcggttgtcaaacggtaaatacttccgtggtcaccgttttcggggaagacagtcagtgagtcggtaatcggatagcggctaagtaaaccggtatcgtatgtatagaaggaataataagtttctcctttttctttcagcgaccgggtgaggcgtgctgtaaaattggtgttattataattacgcacttcactgagggttacaaaatcggggcgaagacgaataatttcatcgacaatagcctcataaccgccgggaaccatggttccttcttgccagatattccattgcaaaacggtaaattcctttttttcctgtgtgcatcctgtgagaacaagccataggaacatggataaataaagtagttttttcattgtttatttatttaagattataaatatttctcttttaagaactgtccggtataagaggctgcacattgggctatttcttccggtgtgccggcaacgaccagattaccacccatttttccaccttccggtccaaggtcgatgacataatcggcgcattttattacgtccagattatgttcgatgataacgatggtatgccctctgctgataagcgcgtcaaaagcttccaacaacttcttgatatcatggaaatgcaaaccggtagtgggttcgtcaaagacaaaaatagtaggctgtgtcttttccacacttaggaaataggccagtttcacacgttggttctcaccaccggacagtgtagacgaagattgtcccaatttaatatatcccaatcccacgtcttgcagcggagtgagtttcttcacaatctttttttgtccgtgttcggtaaagaattctatagcttgattcacggtcatttccagtatatcatatatattcttatcttggaatttcacttccaaagtatcgcttttaaagcgcttgccgtgacaagattcacattccagcaccaagtcggccataaactgcatctccaccgtaactgttccgtcgcctttgcattcttcacaacgtcctccttcggtgttgaatgaaaagtatccggctgtgtaacccatttgtttggccaagggttgctctgcgtaaagtttacggatttcgtcgtatgcttttacataagtcaccgggttgctgcgtgatgacttcccgattggattttgatcgacaaactcaatgtccttaaccatctgtatgtcaccgctgatagaaacgaattctcccggtcgctcactgctttcactgtattcccgtttcagcgctttatagaaaacatcacgcaccaatgtgctctttcccgaaccgctgacacctgtaactactgtcattatatttagagggaaacgtacatccactcctttcagattgttttctctggctccttttatttcgatataattattccaggggcggtgtgattggggtatttcgatggtttcttctccaagtaaataacgaaccgtatagctgttactgttttttttcaagtctttcatgtctccctgatagacgatttctcctcccaagcgtccggctttgggaccgatatctataatgtagtcggcggcacggatgatttcctcatcatgctctaccactacgacggtatttcccagttcttgtaattggcgtaatactttaataaggcgttcggtatcgcgactatgaagtccgatacttggttcatccaatatataaagcgatcctacaaggctgcttcccagggaagttgccaagttgatacgttggctttcaccacccgacaatgtattgctaaggcggtttaatgtgaggtagcctaaaccgacatccatcaggaagttgattcggttattaatctctgtcagtatacgtttggctatagcagtatcgtgtgtatccaattctaatgtgcggaagaattcctttaggtcatgaatgggtaaatctaccaattcggatatagagcgtccgtctacttttacatatccggcttcttttttcagtctggttccgtggcacatggggcaaagagtctttccgcggtaacgtgccaacatcacacgatactgaattttatattgattctcttccagcattttaaagaatgagtctatgcaggctttctcttttggaccatgccacaagtagtctttctgctcttgcgtcagttcataataaggagtaaagataggaaaatcgtgtttcggggcttcacggatgaattctttcagccattcgcccatcttttcgccacgccaacaaatcaccgctccgtcatatacactcagagcgcgattggggatgacaagatgttcatctattccgattaccttgccgaagccttcgcaattggggcaggcaccaatgggggagttgaaagaaaacatttggtcgttgggttcctcaaaggtaataccgtctgcttcaaacttcgtgctgaaggaaaaaagttgtgtgctgccgtccgatgaataaaagcggagcatgcaggctccgtcaccttcatacatggctgtttcggccgagtcggtcagtcggctgatgctgtctttgctgtcatcggccgtcatacggtctatcagtaagtagatattttgtttttttccttcggccggcacttgttgcaggaagtcctcgatacgcataacctcgcggttcacttccacgcgcgtaaatccctgttttaagtcaatgtccagttgttcggcaatgctgcgtccttcgcgtggcagtagtggagcgagcacggtatatttagtccctttgggaaaagaaagcatacaattcacgatgtcttccgcactgtgtttcttcaccacttgtccgctgatgggggagtatgttttccccacacgtgcgtacagcaatcgcagatattcatatatttcggtcgaggttcctacggtggaacgcgggttgcgactgtttactttctgttcgatggcaatggcagggggaattcctttgataaaatcacattccggtttgctcattctgcccaaaaactggcgggcgtaagatgataagctttccacatagcgacgctggccttcggcgtataacgtgtcaaaagccaatgatgattttccggaaccggataagcctgtaatgactaccagtttattgcggggaatatccacatcaatgtttttgaggttgttgaccttggctcctttgatagatatataattactttctgacattctttttgcatttagttggatatgcaaagatagtcaatcctgctcggatacgtttcattccgtagggtgaaaaaatgttgttctatagaaatttttcagtagttttcttctgacgggtgttttggggtaattaggtcacttctccaaaagattatgatgaaacctgtggcaacagtgctgaactggctgatgtagtctcttatttgccggttcttgactcttgtttaaactttagttcaagctgtttttatcatgttgtggatgctgtaggtctggtgtttatttaggaatacgtaagatgttgtaaatttacagaattaaaattatccttcaagagttcgtattgatttatttgaagatagaggcatgaaatctttattttgcctgtcgttatctcgctgtttcatattttatctttatctttgtctgcgaaaactattaaaatagcgaagacttaaaatgagagcaaaaacgatttttcttttattgataacgctccttctgacatcggcggtcaatgccaggtcacgttatcctaagcgtgaatttcggggtgcatggattcaatgtgtaaatgggcagtttcaaggaatgcctgcagagaagatgcagcagttattaatcagacaactgaacagcttacaagaagctggtattaatgctattatttttcaggtgcgtgctgaagcagatgccttgtataaatcatcttacgagccgtggagccgcttccttaccggggtgcagggcagggtaccgtcaccttattgggaccctatgcagtttatgatagatgaatgtcataagcgtggaatggagtttcatgcctggataaatccttatcgtgccaaaacaaagggaacggtagccttgtcgcccattcatccttacaacaggaaccctgaacgttttgtgacttatgccggacaattgtattttgatccggcattacctgagaatcgtaaatatatttgtaagattgtacgcgatattgttacccgttatgatgtggatgccattcatatggatgattatttttatccttatcctaatccgggagaggattttcccgacaatatcagttttgcacagtatggtcgcggatacagtaataaagccgattggcgacgtgacaacgtgaatgtgttgataaaggaaatccatgagacggtgcgcgagtgcaagccgtgggtgaagtttggaatttctccttttggaatttatcgtaatgtgaagagtgaccccaatggcagcaacacacgtggtttgcaaaattatgacgacttgtatgctgatgtgttgatgtgggtgaacaatggttgggtggactataatattcctcaagtttattgggaaatcggtcatccggctgccgattatgatacattgatccgttggtgggcgaagaatgcttccgcccgtcctttgtatattggtcaggatgtgatgcgtacggtgaataagcccgacctccataatccgcttatcaatcagatgccggctaagatgaaactccaacgtgctttgcctactgtgcagggaagttgtcagtggtatgcttcggctgtggtggataatgcaggaaactatcgcaccatgcttgtaaaagattaccaccgttatccggctttgccgcctacatcgccatttatggatgataaggctcctgataaagtaaagaaagtgaaagatgtttggacacaggatggattgttgcttttctggcaggcaccaaaggcgaaaacggaaatggataaggctgtgcaatatgtggtttatcgttttgataaaaaagaaaaagtgaatctggaggacccttctcatattgttgctatcacgcgtgatacttattataaattgccttatgaaaacggcaagacaaaatacaactatgttgtgacggctctcgatcgtttgcataacgaatctaaaggggcaaagaagaaagtaaaactgtagacaaacagcataatagtactgagatattagtaagtaagaaccacgtttcacacgtgttatggggctaatttgttgttttacaggtgtttaaggtgaaatgtttaactcaagccgccgagagcaacggattatgttcatgacaggtatgatgcgtggttttgtattttgggggaatagtttgaacacttaacatatcatatcaccaacaaagggaagaataagccgtttcttagggttggctaaggccttttaaacggaagattgttacagtctccgacagtggaccgtacagtccgttgcggtggactgtatagtccgttaccgtagactgtatagtccattgccgtagactgtagtaatccgactgaccgacaggcataatagaaaggatgaaaacgcttagcccggctaatgaaacgacttagggagtttaaaacgtatgcagaggttgaaaaccggaggagacaacacacggtgacagaatcaagttctttttttgaagacctcttcggctttttgaagtaaattcctccttttgtccgattattatcttgtaactgttacaaattcataagaaatttatatgttaattcatttttatttcgttactttgtagcctgataacaaaaaggaacacgaatatgcgatatgtgtacgtaacgggctatctatcactggctgctatcatacaactgttaatgggaaattttccattgtcgtttgtggcatttccgctgaatattgtttttgcggttatttggctgttcttattgtggaaattatataaggaaagtagaaaatcggcttttacacgcttcctttactcccctcaaacaagtattttatctattttcctgctcatagcaggtagtctgattattggcttatttcctcagttgtctgatgtggaagctgctatgcgcaccggtgtttgggccttgttgggctgttataattttatgacttcttggatattcattgccattctctttttgctgttaagcaatttggcaatgattacttttcatgcttattaccatcgaaagactgcccgttggcgtttcctgctgaaccatgcaggattatggctggcacttttcgccggattctttggaagcagtgatacccggacattgcgtattcctctttataaaggagaaccggcacgtgaggcttttgacatgaatggcgtttcctatcatttggattatgagatggaactgcgttccttttccgtggaatactatcctaatggaagcccttcccgttttgctgccgaggtgcgcttgggtgatgatgaggcactgttggaagtgaatcatccatacagttatcggttgggagaagatgtgtatctcacaagctatgacatggcaagtggcaatgaaagtaaatattgtgttttacaagttgtgatacaaccgtggaaatatataatggtggccggcatattgatgatgttggcgggagctgttctcttatttattaatggtccgaaaaagtgtgttaatctgaaaaaggtatgataaattgggataacttctatgtatttgcgacactgtctgttggtttatggttggcaggggcagtgtttgcacttcgttcttcaacgaggagcagaatggctgttggtttcaccattgccggaattatggtattgggcatttttattgccggattatgggaatacctgcaacgcccacctttgcggacaatgggagaaacgcgtttatggtattcattcttcatgggaatagccggacttctgacatatatacgatggaagtatcgttggatattgtcgttttctactttattgtctactgtatttgtcgtgattaatttgttaaagccggagatacatgaccagtcgctgatgccggctttgcaaagtgtatggttcattcctcatgttactgtatatatgttttcttattcggtgttggggtgcgcattcattattgccgtcaccggattgttctgccacaaggaggagtatttgcagacagccgataatttggtctatgcaggagtcgctttcctgtcaatcggtatgttgctcggttctctttgggcgaaagaggcatggggaaattattggagttgggacccgaaggaaacatgggcagtcatcacttggatggggtatttgatatatatccaccttcgtctgttcggacgtgtgggcagcaaatcactgtatgtgttgctcattttttcctttttggcgttgcaaatgtgttggtatggagtgaattatcttccggcggcacagcaaagtatacatttatataatcgtaataactaatcaaaaaaacaagcgtaacatgaagaaaagtacaaaattaatggtggcactgttggttatagtggcggcattagctgttacttaccggctgatgaaccgtgtgccttctgccgatttggaggcaaatgcgcagatgcagcaaatcattacggatgccggatgtttgagatgtcacacctcaaaccccgatttgccgttctatgccaatatgcccgtggcaggaaagattgtgatggaggacgtgagcaaggcttatcgtgcttttgacatgactcggatggcggcagacttgaaagccggtaatccggtcgatcaggtggctttggcaaaagtagaaaaagtgattctggatggcaagatgcctcagcccaaatactatttggtgcattggggagcttccatcagcgatacgaaaaaggaattggttcttaattgggtgaagaatcatcgtatggggctgatgggcgatgcgaatgtggctcctgaattcatcaatgagcctattcgcccgattgccgattctatttcggtagatgtgcgcaaggtgctattgggtgatatgctttatcacgacactcgtttgtcggctgataatacggtgtcttgtgcctcttgtcacggtttggatatgggcggcgtggacaataagcagtattcggaaggagtgggcggtcagcttggcggagtaaatgctccgactgtttataatgcagcttataattttgttcagttttgggacggtcgtgccggcacattggcagaacaggctgcaggtcctcccttgaatccggttgaaatggcttgtgaatcctttgaccagataacagcaaaattagccgaagacaaggactttgtaaaagcttttacagaggtatattcagacggactgaatgaaaagaatattaccgatgcgattcaggaatttgaaaagacgttgctgactcccaattcacgtttcgacctttatctgaaaggtgacaagaatgctatcactgccgatgaacttgccggatatgagcttttcaagaaatatgattgtgcaacttgccatgtaggtgaaatccttggaggacagtcatatgagttaattggcgtacaacatgattattttgcagaccgtgcggctgaaatgacagaagaagacaacggtcggtttaagcaaacaaagatagagcgtgaccgtcatcgttttaaagtgccgggattgagaaatgtggaattgacttatccttatttccacgatggaagcatgaagacaatggatgacgccgtgcgtgcgatggctaaatatcagttgggcattgaccttccgcagcaggaagtggataagattgtatcttttctccgtactttgaccggacagtataaaggacagactctgacaaataaaaatatgagtatctaggagcttggagagtgctctgaaaaccgagaagatgcttgatatagcacatgaatgtgtcataactaaagtagcacattaaatcatcaactgtaggggcagggtttgcctgcccgaatgcacaaataaactgctttcgggcgagcgaacctcgccctaccggttaaatgacagcattatcgacgttttgacacgtccctttctttatagactaataaagcaagaatcctgccaatccgcagaggataatcattaatatagggtttatcttatatttgcgtgttccgaagaaagctgcaaggaagatgatgatactgataatgaattgataccaatctactttatagctgccgaagttttctttattcattaaaacgagggctgccgcagccagcaagcctaccactgcggggcgcaatccactgaatacggcttcaacagccgggtgtttttgatatttcagaaagaatttgctgatggcaatcattaagatgaaggaaggaaagacaacagcaaatgttgccacaatggagccgatgacggcgaaagcttcgctgtatcccgcgttcagtacggcagtatatcctacataagtggcggaattaatgccaataggacccggagtcatctggctgatagctacgatatcagtaaattcaccggcattaatccaatgataacgcgtcactacttctccctgaatcaaggaaagcatggcataaccgcctccaaaaccgaagagacctatcttaaagaatgtgtagaataaataaaggaatatcattttgatgcatgtttatgtttgtacttaccatagaaaaagcctcctactccggcaatgatgataatatacacaggggatatacccaataaccagataagaagtgccgatactataggtatccatattgtatagcggtttatctttgctgatgttgccattgagaaagtaggagcggcaatcaatgcgaccactgccgggcggattcctttgaatatattttctactacttcataattcttgaattgttggaaaaacaaggctatggctaaaataatgaagaaggagggaagtatggttccgagcgccatggctagagctcctttgaatttgcgtaacttatatcctataaagatagctatgtttacggcaaatatgcctggaacagactgagtaagtgccaataagtcgataaagtcttctttatcaatccatttccttttctccactatttcatcttgtatgagtggaaccattgcataacctcctccgatggtaaacaggccaatctttaaaaagatggcgaatgattttaaatagaaattcatgtcttaattttgtttcatataaacgcttggcggtacatcaaagtatttcttaaagctatctgtaaaatatttcgggtcgccaaagcccagcatatctgaaacttcggataccgtgtatttcttgcttttcaatagtatggcagcttcattcatacgcactttacggataaactcgctgggtgaataatttgttaatgcttttattttattataaaaactacttctactcatattgaaagcagcacataaagtgtctacatttagttctttgctcagattttttttaatggtttcggttacttttataataaattcctgatctaagtccaatggtgggtgaggcacattttcctcttccgtggtgaactggaattgactgtaacgtttgcgtataagctccctgatagcaagtacgttggttatgttggcttttaagacgccgacatcaaacggtttaatgatgtatctgtctgctttgctctgtaatcctttgataatactttctttatcattcaatgcagttagtagaatgacaggaatatgacttgtttctacatcatttttcacaatacggcacatttgttctccattcagttccggcatcataatgtctgaaagaatgaggtcgggctgtttggttttgatagaattaatcacttcttgtccgttgctgactcctgttacttgatattcatcggataatatctgtaataagaaagtacgtaactccacattgtcttcggctaccagaatataaggagcttctttatctgcctgtttaagttgcggaatagggggaatggtgacctcctctttgttttcttctctcacgataggaagcggatcgatgacatcagctttggggaagagtttgttattatattttctgctttttatagggaatgatagtttaaaggtagtacccatattctctatgctgctcatactaattttgccacagtggttcttgatgagcttgtaagtaagcatcatgccgataccgctgccggtaatttgtaaattagtggcatttttccctctgaacagttctttgaacatttttttctggtcattggatgaaattccgattccggtatctgtgatgaacagaaaccaatggcttttacttttggaagtctgaattttgatacttcctccttgttgagtgtatttcagtgcattagtcatcaggtttctgatgatggaatccatcttgtttctatccaaccatacttcttgagaagtaaaattggattcaaaatgaatttcaatttgttttttctctgcgtatagcttgaattgctcaatgtaagacttaatatatgaatttaattcgtatctggatacataaacgttgggcgtataaagttcctctttttcgaaattaatcagattacttgccaaatcagataaattgtctgtattctgaatagcaaggttgatattaattttcccttgttctgtcagttgttcattcttcagaatttctcccaacggagcctttatcaaggtcagtggcgtacgtatgtcatgggcggtgttgataaagaattggattttctctttagaattgttcctgtctttccttaaccataagaaacgtaaaatacttactgtaattaatattatgataataagataaatgattccggcccaaaaagttgcccaaaaagggggagttatggttatttttatagctctttcttccaatacatgctcgtcatccatcagaatggctctcaccctcagtttataatgcccgggattgatgttggtataacgtatcagattatctgctgtgggacttgtccattcatcgtaaaatccttctaatttccaagtgtatagaatattagacggattgtcgtaattaatggaagatacatttaacgagaatatattttgattataatccaaagtgatgtgttctgtatcgtctatatcttgggttaaaggggaatttttttcaccggggaaaaccttttgatataagatgctgaaatcactgaatatcattttagacttgaaacgattgggcagacttacggtgtctgctatttcaatggctccgtttcctgttccgaatataaaatatcctgatcgggtgtgtatgcccgatgagggattgaagttcacagccatcaatccttgttcttttgtccaattggagaatattctttcttttactttgaaacgagttaattcattttcggtactgataaccagatccgtttccgaagccggcaaaatgcaatagatattattggaaatcaacgctgagttttttatatgataacgcacgactttgtcagtgttattattatatacccacatgcccgaaccatgagtaccgatataggtaatatgggcaacagtatcttgataaatcgtattgatacatccaatttcagaatccagattgaccggtttcagtgtttggtttcgtttattgaattggtatagcccattgatggtacctatccacaggttgtattggtctttgttcttaatacaggtaaccggaaaatccataccgtagcactgaatttcttttgtttgtatattataacttttcaggttataatagccacctgcccaaatgattccatcattgtccttgtagatgcaacgtatgtatttatcagggcggatattggtccatcctagagtggattgatgagaaaaatatttaggcaccatgtctttcttgttgatttgatacattcccgacatatatcctcctaccaatatggtgccgggggctgtttcgcacatggaaataaagacatggttctgattttgtgtgtcgttctgataagtggaaagaaggcacttccactgtttattctgagaattgtaaaaacagatgccattacttgtagcataccaaatatcaccttccgaatcctctaaaatagagttcacttgattgtctattagtgaatttggattgtcataagaatgttgtatccatttatagcccggatatttattcgagaataaggtaattccgacaggataaatggccatccataatttgtcatctttatcaatgaatatatcattcacaatattcccattcattttgtttgaatgattgtgatcggcaatcagaaaaggggataattcgcgagtgaataaattgagtttgtaaacacctgctccattagtggctatcaggacttcgtctattttcttggggttggctatgattgtattgactgtaatgtccaacaactttgtgggaacatccattagttgttgagtattgatgttatatagatatataccgtctctcagtgttcctataataagagtctgagtgcttttgtgaaaatacagataagtaacaatttggaattggtccaattggggatgtttttgtatctgtagttgatgcttatcaattagttcaacgcaaaatatattatgatttgttcctaaaaagtattggttatttccggcttctgtaatgcaggtaatctcttcctgaatagaactggtcaggcgaatcagtttttcctggtcgatatcaaaaatgtattgtttgtctttggtacaaagccaaatattgtttttgttgtccaaataagtgctgatgagtggaagcccactgttgcttttgtctttgctggcaaaattataggccagctcgtatttgtcttgtagtgaattgtacttaaaaatatatccgttttttcctatttcccaaattacgccggctgtatctatttccaaagtattcaggttgggaaaagatttcatattaggttgaccgtctactgataagctgtaatgaacatattgcttgccattgtacctgtcgattccttcatgggtgaggaaccacatatatcctttattgtctttttgtatggacaggactctacgactgctcaagccatcgttagtatctagatactggtaaagttgggcagagacagaagttataaaaataattgtaaagtatataagtaaaagagtccttttcataatggtatttagacgcgaaaaccttacaaagctcgcaaattttcttgtcatttcaaaatctattatatgtaaaaaaagcggcaatcagtatgatataccgcttttttagtaaatataacaaatcgttttatcatttgttcatttcaacccattttcttgcgttgacaaatgcttcaatccatggtgttacttggtctttgtttattctgtcagaaggatagtaagcattttgccacgggaaacaagagcgttctaagtgaggcatcattgccaagtggcgtccgtctgaacttgctaatccggctacgctgtagtctgaaccgttcggattaccgggatattcatcgtatgagtatttcaatactacattatacttatcttcttcgtagggtaatgagaatttgccttctccgtgtgccacccaaatacctaatttgctgccgcttaatgagccgagcataacacttctgttcatgggaactgttacaccgacaaacttagattcaaacttgtgtgagtcgttatgcagcattttggctttcttgttatgctcaggattaatcagtcccaattcaatcatcaattggcaaccgttacatactcccagtgacagggtgtctttgcgtgcgtagaaattatccagtgctgctttggctttcggattgaataagaatgcacctgcccatcctttggcagaacccagaacatcggaattggagaatcctccacagaatacaatcatattaatgtcttctaatgtttcgcgtccgcttatcaggtcggtcatagtgacatctttcacatcgaagcctgccaggtaaagcatatatgccatttcgcgttcaccattggtgcctttttcacgaatgatggcagccttaatgccggtcggtgtacgacgttcgggagtgattccatattgtgagaacttcccggtgaatgatttatcgaatacaaactccagtggttgctctttgtaattttcaaaacgtttcttggcgcaaccgttcatgctttgtttgcggtcaagcaaataagaagtagaataccaaacatcacgcagatagtcaataccgaattggtaagtggcatcttctttggttactagaatatggcgttcgtctgtgggggtacccaatttcacgtagccgattccggcatcttccaatatcttcttgacttcggctttgtctttatctttcacctgaatgacgatacccggattttcggcaaacagaattttgatgatatcgttttcctttattttattaaggtcgatttccataccaccttccatgtttgagaagcacatttcgagcagtgtagtaatgagaccaccggctgagatatcatgacctgccataatcaggcccttgttgataagttcttgtatggcaaggaaagcatcgcggaaatattcgggattttgaactgtcgggacatcatctcctattttatttaatgactgtgcgaaagcagaaccacctaaacgcaacttgtcaaaactgaagtcgatatgataaatggtactcttggcatcatttaccaatacaggagaaacgactttctttacatcggatacttctccgccggctgaaacgataactgttcccgggctgatgattttttctccgtttggatatttttgagtcatagacagggaatccttaccggtcggcacattgatttgcagtgcgcagcagaagtcagacagcgccttgacagccgtataaagacgggcatcttcaccttcctgtgcacggcatggccacatccagttggcagacagggagatgctgtccattccttctgccattggagcccaaacaagattggtcaacgcttcggctaccgacaatacagaacctgcagccggattagccaaggcagcttgcggagcatgtcccaaagaagtggcaatacctttttcgcctcgatagtcaagggcaacgacaccacagtcgctcaacggtagctggatttcgccctgacattgctggcgggcaatcttacctgttacggaacggtctactttgttggttaaccaatccttgcaggcaacagcttccagttgaagtacgcggcggatatattcgtttaattttgaagtttcgtaagttacgttttcataatggcgttctacagtcttgtccaccatataagttttcggagaagaaccgaacatttgatctactgccaaatcaaatgggcggacaccatcagcttgttcaaaagcaaaacgggcatcaccggtagtttcacctacagtatacattggggcacgttcgcggtcggctatcttttgtacgtgttcaatagccgattcatcaatcagcaaccccatacgttcttgagactcattggcaataatctctttggcagacagtgttttgtcaccgataggcagtttgtccatgtggattaatccgccgttttcttctactagctcagacaaacagtttacgtgacctgccgaaccgtggtcgtggatagaaacaatcggattgttttcttcttcacacaaggcgcgaactacattataagcacgtttctgcatttctgcattggcacgttgaactgcattgagttcgattcccgatgagtatcgacctgtttcaacagaggaaacagaaccgccacccaaaccgattcgatagttgtcaccacccataacaacaattttgtttcctgtttcggggtgacctttcaggcagtcgcgttgagtaccgtaacccacgccaccggccagcatgataactttgtcgtatgcatacttttcaccgttctcctgatgctcgaaggtcaatacagaaccacaaatcagcggctgaccgaatttgttaccaaaatcggaagcaccgttggaagccttaattaaaatttgttcgggagtctggtataaccattggcgtaccggcaagatatcttcccattcacgtccttcttcagtgcgcggataagaagtcatatagacagctgtacctgcaatgggccatgaacctttaccgccacccatgcggtcgcggatttcacctccggtaccggttgatgcaccgttgaacggctctacggtagtggggaagttatgtgtttcagcttttagcgagatgactgttttgatatctttgataatgaaatagtcggaagtggagtggtcggccggagagaattgttccacaaccgggccttctgcaaaagccacattatctttataagcagaaataattttattgggattttcggcagtcgtttttttaatcatctgaaataaagatgattccatctcttcaccatcaatgatgaatgttccgccgaagattttatggcggcagtgttccgaattaatctgtgcaaagccgaatacttcagagtcagttaatttacgtcccaggtctttttcgactttcagcaggtagtccatttcttcacgagaaagtgcaagaccttctttttcattatattcttccagattctcaatgtaaacaatcggttgaggtttaatgttaacagtgaaaatctcctggttcaatcctttatacatgcgttgtagcatggggtcgtattcggcattttcatctttcacagggaaatattcttcaatgcgttgtatacctgtcaaccccatgttctgagtaatttctacagcatttgtactccaaggggttatcatttcccgacgcggtccgatgaagcagcctttcaggttttcttcgttttctacagtggcttctccataaagccaactcagtttttgaatatcttcagaagccagttcatgattgacttctgttgctattacacttttagtgggtgttctgaaaaatagaatcatagcacttttatagttgttttgttaattgaaaactaggttgtaatatcaagagtctattaataaggtgcaaagttacataaaagagccgggctatgaaagaaatttgtgtgtaaatataggtactttcgcaaaaaaataccatctttgcagcatgaattggatagaacaagtaaccatactcgatttgctggtgaaaggacttatagttggcgtagtggtttctgcgcccttaggtcctgttggggtactttgtattcagcgcacactgaacaaaggacgatggtatggatttgttaccgggttgggagcggctttgagcgatataggctatgctctgataacaggatatggaatgagtttcatggatgaatttctggcaaagaaccaggtgcttttacagattgttggtagcgtcatgttattaatgttcggtatttacactttccgtagcaatcctgtccattctatccgacctgtatcttctacaccaggcagttatctacataattttgtcacagctttctttgtgacattctctaatcctttgattattttcctatttatcggtttgttcgcccgtttttcttttgtgatgccgggtagtccgttggggcttcagttggtcggttatctggccattgtactgggagcacttttatggtggttcggtattacgtattttgtcaataaagtacgtactcgtttcaatttacgtggcatttggattttgaaccgtgttatcggtgttatagtgatgttgatgtctgtagtcggcttcatttatactatattaggaaaaacgatgtactgacaggaaaacatatcttgtgtgaagcacgttgaaccttataattttcaatttgtaacttaaaaaataaagaaatgtttatttccaaacagttaaaagagaataatatagccgaataccttatatatatgtggcaagtggaagatatgatacgtgccaacggctgtgatatggagaagataaagaaaaacattgttgactcttaccctctgacggaagaacagaaagtagaattgacacaatggtatatagacctgattgaaatgatgcgtcgtgaaaatgtaatggagaaaggtcatctgcagattaacaagaatattatcacttggttgaccgacttgcatctgcagttgcttcgttcttccaagtttccttattatagtgcagcgtattataaagctttgccttatatagtagaacttcgtgccaaaggtgctaataaagaagaacctgaactggaaacctgctttgaggcactttatgggatattgttattgaagttgcaaaagaaagaaatcagcgaagaaacaaagaaggcacagcaggctatttccggtttgcttgctatgttgtccaattattatatagaggacaaaaaaggagaattggaattctagcgagtcatttcttcttgaggataaggttgctcctaaaggtatattgcactgtttttttgctctgttattccgagtgcaatgaaggaactatagacataaagtggatatttcagatttttcacggtattcatagatgacaaaatactagggcttttggggagcagccttttgtaatgaagagaaaataaataaaatgaaaatgaaaaatatattggtgaccggtgctaatggccaattaggaaacgaaatgcgtgtgctttcgcttgagaataaggaatataactatttttttacggatgtagccgagttggatatctgtgatgaaaaagctgtaatggctttcgtcaaggaaaatgaaatcgatgtcattgtgaattgtgctgcttatacagctgtggataaagcggaagacaatcaggaattatgtgccaaactaaatagtgaggcagtcggttatctggcaaaggctgcagaggagaatcaggcggaatttattcagatttctacagattacgtatttgacggaaccaattatgtaccatatagagaaaccgaaccgacttgtcctaattctgtatatggtgttactaaattggctggtgaaaaaaaggctttggaatattgcagtaaggcaatgattatccgtacggcatggctgtattctgtatttggcaataattttgtgaaaaccatgattcgtttagggaaggaaagggaatcattgggagttattttcgaccagataggtacgccgacttatgcccgcgatttggcgtctgctgtttttgcagctatccgtaaaggtattattcccggtatctatcatttcagtaatgaaggagtctgctcctggtatgattttaccaagtccattcaccgtatagccggtattggcaattgcaaggtaagtcctttgcatacagatgaatatcctgcaaaagctcctcggcctcactattctgtattggataagacaaagataaaacatacgtatggcatcgagattcctcattgggaagagagtctggaacagtgtatcaaggaattaaatgtataatgatatatgaacaacgaaatagaaagaagacgaacgtttgcgattatcgcacacccggacgccggtaaaacatcattgacagagaagttgttgcttttcggtggacagattcaagtggcaggagccgtgaagagcaataaaataaagaaaactgcaacatccgactggatggatattgaaaagcagcgtggtatctctgttaccacttctgtgatggagtttgattatcatgattataaaatcaatattctcgatactccgggacaccaggactttgccgaagatacttatcgtactctgacggctgtggatagtgtaattattgtggtggatggtgcaaaaggtgtggaaacacagacacgtaaactgatggaagtctgccgtatgcgtaacactcctgttattatatttgtcaataagatggaccgtgaagctaaagatccgttcgatttgttggatgagctggaagaagaacttgccattagtgtccgtcctttgacatggcctattgaaagtggtccccgcttcaaaggcgtatataatatttatgaacaaaaacttaacctctttcaaccttccaagcaagtagtgactgaaaaggtggaagtagatattcataccgaagagcttgacaatcggattggagcacctttggcagaaaaactgcgtaatgagcttgaacttattgatggtgtttatcccgaatttgatgtagagagttatttgaaaggagagctggctccggtattcttcggttcggcattgaataacttcggtgtgcaggagctgctcgattgttttgtggagattgctccaagtccgcgtcctaccaagacagaagaacgtgaggtggaaccggatgaatctaagttcaccggatttgtattcaaaatcactgccaatattgacccaaatcatcgctcttgtatcgctttctgtaaagtgtgctcgggaaagttttctcgcaatacaccttattatcatgtacggcatgataagacgatgcgtttttcttcgcctacgcagttcatggcacagcgtaagactactgttgatgaggcatgggcaggcgatatcatcggtttgccggacaatggtacctttaaaattggtgatacattgaccgaaggcgagaaattacatttccggggtattcccagtttttctcctgaaatgtttaaatatatcgagaatgccgacccgatgaagcagaaacagttggcaaaaggtatcgaccaattgatggatgagggtgtagctcagttgtttgtcaatcagtttaatggacgtaagattatcggtacagtaggacagttgcagtttgaggttatccaatatcgtttggaaaacgaatacaatgcaaaatgccgttgggagcccatcagcctttataaggcgtgttggatagaaagtgatgatgtcgaagaattggaggctttcaaaaaacgtaagtatcagtatatggcaaaagaccgtgatggacgggatgtcttccttgccgacagtaattatgttctccagatggctcaaatggattttaagcatattaagtttcattttactagtgagttttaaaaagaaccaatgaaaagaaagaaaatatgctgtttttcagtggattttctttcttttttaaatcatatttcctttctttggtttctgttgttttcttatttattggattatttttgttacttgtttgttactcgttagaagaaatgttattatctttggagcaggtaataaatcgaagatgaagtaataatgaaaaagaaaatagcaacagacgtcaaagaacccattaagctaagaacgaaacagctagcgaatggtagtaaatctatttatttggatatttatagaaatggtgtgcgagaatatgagtttttaaagctttaccttattcctgagagaaataggttggataagcagaggaatgaggaaacattaagaactgcttatgccataaaatctcaaagaatcgtatcattgcaaaatgcggaatacggtttttctgttgctcataagtcaaagataaattttattgcttatatgagggcgcaggtaaatagctataaagaacgtaatagcattgcttatagtaaaagtgtaagagttactatagagcatttaaaaatgtatagaggcgaaaatataactttaaatcaggttaataagtcttttttattgggttttatagattatcttgacaaggttgagagtaagcatcataagccattatcagaagcatctaaaactttatattataatgtagtttctatagcattaaataaagcagttaaagatgatttaattcctttgaatccggctacaaaaatactatactctgacagaccccggaaagggaatgctacaaaagagtatttaactttggatgaggtaaaagaacttattaaaactccgtgcaaatatgatatgctaaaacgtgcttttttgtttgcttgcttttgcggtttacgttatagtgatatccggcggcttacatggaataaaatgcataaagtagatggtaataagtttcaagtggaaataaagcagcaaaaaacaggagaaacattgtatttacctttgtctgaaaatgcattgagctggttaccggagcagaaagaaacaaatgataatatctttttattgcctaatagcactactacaatagaaaaacatttgggtatatggtctaaaactgcggggataaacaagcatataacatttcacgttgcaagacataaaggatttcctttcttgctaaaattcaatagcttacaaaatatctcggcttaataggtaacgatttagaaaccagcgaaattctgtgttttacctcgttttgcagtaattcaaaagaacgcttttcctaaatgcaaaggtaatattattttttgaataacaaacctttgcagatagtcaaattcaacaaaatcggctatggttgcctgaatttatatttcaatccatattcttcaagtttgccatatagagttgttctgcttattccaagcagttcggcagcggcactccggttgccgtttgtctgttttaacgcacgcaatatccgctccttatcctccgcgtcattgcgcagggcgaagctgacaggtgaggtcagtttcgtcacggcaagttccagatgctctttcgtgaccacaccttcctgcgcctgtaatacggctcccattatcttctgccgaagctcacgcacgttgcccggccatgtgtatatcagtaatgctctccggagtctcctgaaccttaaaattgacgcaaacctccatgacatcatccgcatccggttttatgttgctcatctgcatctggagattggctctgtgcggactggat

SEQ ID NO: 6706 - DNA, 342 bp, Unknown
  gut microbiota DNA sequence
gaacctgacagtatgccgcgtccttcgggacaaggcaatagtgcgcgtaagcatgctgccgagaaaatccgctaaacttaatcctgcaggtacccgtaccgcaaacggacacacgtagtcgggatgaatattctaaggcgcttgagtgattcacggttaaggaactaggcaaactgaccctgtaacttcgggataaagggtccctacccttttatgggagggcgcagagaatcggtccaggcaactgtttaacaaaaacacagggctgtgccaaatcgaaagatccagtatacagcctgacacctgcccggtgctggaaggttaagaggagatgtcatcgat

SEQ ID NO: 6707 - DNA, 9194 bp, Unknown
  gut microbiota DNA sequence
gtcgtttaatgtactcaggtatatgttcttgaagatacttatactctgcagatcctgttgattcgttgtcagtctccgtaccgaaaagctcgtgcagatgatgctcgtccatttttaacaggcgttcaagttctatacccatatcttcatatatacggatatatcgtttgactgtattacgtgaaatcagaagagaagagctgatactacggatactcattcctgactggtaacaccgcagtatgtgcttgattcttattttcattcttttaaaaattttattcggttaataataccgggctaaaatgctttgtaaagtacaaaaacaagactgaaatatggtaattctataaggtcaatttttattataatccaagtgggtcaggtgacttttataatagtgggtcaaccgactttaaattttccatatttactctataaacattatttgcttcatccttaaatcgtccactttgttataccgtctttctatgaattgttgttaattgttttcctttaacatgaactttaactttatatgaactgttattttgtagtaattttaagccaccattaactatatgaatctgattatagccatagttcccgtattatcactgatagtgctaatggcattttttaaaatgtcaggtgataaaagcagcattatatctttagtagttaccatgctaattgcctttttcgggtttcatttccctttggatgatttattattctcctttctttatggagccatgaaagcagtttcacctattttgattattatcctgatggctatattcagttacaacgttttgcttaaaactgaaaaaatggaaattattaaacaacagttttcttctatctcaactgataaaagcattcaggtgttattgcttacatggggattcggaggattgctagaggctatggccggatttggaacagccgtagccattcctgctgccattctgattagcttaggatttaaaccaatcttttcggcaacagtcagcctgattgccaacagtgtagccacagctttcggcgctattggcacaccagtacttgtacttgccaaagaaacaagcctgaatgtacaaacattaagcacaaatgttgtcctccaactttcagtcttgatgtttttaattccattaatattactctttcttacaaatcctaaattaaaatcactacctaaaaacgtattattaacactattggtaggcagtgtttctttggggagtcaatatatagcaacacgttatatgggtgctgaatctcctgctatcattggaagtatattgtccattattgttattattttatatggtaaactgactgcaacaaaagaagaaaagaatcagagaaacattttaaaaagtaaggatatattcaaggcgtggagcatctatctctttattcttttattgataattgtgacaagcccattatttccgggactgagaaacacattggagaataattgggtaacacacatcagtcttcctataaatatgtcgacagtgaattatacgatttcgtggctgacccatgcaggcgttttgctttttgtgggtacatttgcaggtggccttatccagggagcaactgtcaaggaactgttcgttgtactttggaaaacggtgaaacaattggaaaagacatttataacagtgatttgtctggtaggcctgtccactgtcatggatacttccggtatgatatccgtaatagctactgcacttgcaactattaccggaaatctttatcccttttttgcaccgataatcggttgcttgggcacatttattacaggtagtgatacctcttccaatatcctattcggtaaattacaagctagtgttgccggacatattcaggtaagtcccgattggttatcggctgcaaataccgtaggagcaacaggagggaaaataatttcgcctcagagcattgcaatcgctacttccgccggaaaccaacaagggaaagaaggagaaatattaaaagctgccattccttatgcattggtgtatgtgtgtataacaggtatcatcgtctatcttttcagctaaaaatgttgaaaaactgtaaaaaacaagcatgttaaagcgtattctaacaaaaaaggatttaatttgaatccgatttaataattaataaataaatagtaagatgaacgaattagttgcaaaaatcaaggaattaagcaatgcattctttatggatgctgaattgcaaacagaaaaaggtaataaagctgcaggtacacgtgcacgcaaagcttctttagagctggaaaaattactgaaagagtttagaaaggcttctttggaagaagctaaaaagtaatttcatgattatttgagcacaaagaaaagctgtccataaccggatagcttttttagttttatgatttgccatgaaattcacagtcccctatttttttatcatctctatttcttgaaagattaatctctttttcattgatacttattcgtttttaatttatggaataatcggaatttttgtatttttgtttgctgcttataacctagagaaaaaatatccaatgaagaaaatgcgtttattgcttatttgtgcaagtatattgacagtcacaggaagtttcttctcgtgtgaaaacgaaaaagatgcttctttataccttcgggccgactcacttaatcaagttgcttataaagtgcgttacaaagatttgaaggcttcttgcaaagctgcccatgaagcatatcgtttttctttgaacaattcttccttgcgtgccgaagcactgaataatataggattttgtgcctttattcacatggattttgaaacggctgaaaagttctttcaacaagtatacgaaacaacgacaaatgaacttgagtgtctgatagctgacattggcatgatgaagatttgccagcgtaccgccatgaataaagaattttatgattaccgtaacagtgccttacgccgtatgaagcgtattaacgatgatcgttctgccatcaccgatcctacgatattagaacgtttgaactatgcacattccgagttctcgattgcatcagccatctactattattatttacagcaagaacagcagtctttggaggccataaatgaaattaaagtagacgaaggactggagcgcgacacggcacaactgctctattattattacatgaaaggttcgggaggtatgtatgaagcacctacacaagaggaagttgtattgggcgagtttaattacttagtggattgtttgcgcatcagtcatgatttaggatatgtatactttgaagctaatgcttcgcaagcaatggcggaattactgaaagagagaaagaattatgatttgttgatggcacgccgtcccagtgtgatgagaggcattaatacagaagatttaccatgggaagaattggtgatgtcttttgccgaaaatgctctacaattatttaaaacctatggagatttatatcagatatcaggaacttatcgcactttggcctcctgttgtaatgagcaaggaaggtatgaggaagcattaagttatctatctgaggctttaggatatgtgaaccgccatcatgagaaattttatcattgtacagatacgacagatcgtcttcgcccttatgttcccatggcatccacttccatcgaacttcaatggattaatgatgatggtatcaaaacggttcccgaatggattgcccgctttcgtgaacaacttagtgtaacttatgctgccctgggaatgaaaccggaatctgattataacagaaacatttatcttgatatacttgattatacacgacaagacaaagaactggaaagccgctatattgcattagaaaaggaatccgagcaattaactggcttattggctgttgtcattatcggaattatagtactgattgtgctgttctggatactaaacagacaatggaaagttcgcaatacgttatatattgccaagttgaaacgtactctcgatatttgcagaaagattacagcttccgtaccttcggatgcaaatgaagtggatgatgtcataagtgccatgcacactgcagtaggtgaagatattctgcagttgataggagcatcgctattgcaaattgtcgtttacgaaaatgaaacgaaacaaccgatacagtatgatggcagttgtactcggtttattctaagtgtccccaacaaagaacaaccgttaggagaaataaacttgtattcttcacagaaaatgaaaaaggatgataaagctttgatgaaggttataattccttatatatcatggacattggaaaacggactggcttttatttcattgggagatgaacgcaaacggctggaaaaagaacaatatatacacgaacaacatttggcagaaaacaaacggcaaaatctggtaaagaaagcatgtctcttcattgttatgggtatcatgccttatatcgaccgtattattaatgagacgcataagcttacagtgaataattatattgacaatgaagatattaagaaaagcaaatatcattatatagatgaattgataacccgtatcaacgagtataacgacatcctggctttatggataaagatgaaacaaggaacacttagtttaagtattgaaaattttgaattaaatgacctgtttaaggtcttagtcaaaggaagaaagaccttcgaaatgaagcaacagacattgacgataatacctaccgaagccatagtaaaggcagataaggcactaacactctttatgattaacactctaatggaaaatgcccgtaagtatacccaacaaggagggaaaatttctgtgtatgcagaagaaaacgaaaattatgtagaaatatctattcaagataatggtttggggctttctgtagaagacaaagaacgaatattgagtgaaaaagtatatgattccggaaaaattggtttacaaaataccgagaatgcagcagaacttcaaaagaataaaggacatgggttcggactgatgaattgtaaaggcattatcgataaatatagaaaaacgaacgacatctttcgaatatgcacatttaatattgaaagtgaaccgggcagaggcagtcgcttttattttcgcctccccaaaggaatacggaaaatactgatgttgattcttatatctactctatcgctattgagcagttgtggagagaatcatttggagcgccaggaaacaatgacaccggaagactccgtccaatgctatgacaaatggttaacggcagcaaataattatgcttatgatgtatacaattgcaatatcgaaggactttatcaacaagccttatcatatgctgacagcgcattattttgcctgaatgcccactataaacagtattctcatcaaacagcacctttattgagattggaaggagaagggacagcagccgaactggagtggttcaacaatcattttgacacggattattataccctgttggacgtacgtaatgaatcagcagtggcatttttggcgttgggccatttagatgcttatcgatacaataacaatgcatatactgcgctttataaacagataagtgaagacacctctcttgaggaatattgccggcagatgcaactgtcggcaaataataagattgtcgctattattctttgtattgtcatattgctgctgttactgacaggttattatttgctttattttcgccatcgtttgctgtaccggtataatttggagcaggtgcttgagattaatcaacaggtttttacaggatcgttgctgaacgaacaggccgataaagatattgcggaaagtttggttaatgccatgtttgagggaataaatgaattaattgccattgatgtacttggcatagccgtttatagtgaagacagtcataacttgaaatgcagtttttctttatcggatgagggaaatgaggatatgcgtgaacttataacacgttgttttgagacacagactgtatattggacggaaaaaaatcgtattaaatgccttcctttgtgggtagaaaccggaggagaaaatcgttgcaccggtgtactggctttaagatgttcttttgatagcgagcgcgaagatgaccgcttaatggtagagttagtagccggatatgttgctataatcgcttataatgcggtggtgctgatggcacaaaaatatcgtgatatagagacggctcaagacgatgctcgccgggctatccgtgaagaaaaccagcttcatgtacagaatttagttttggacaactgtttgtccaccattaagcatgaaacaatttattatcctaataaaataaagcagattatcgacaaactaaacaatgaaccggttcgtgagaacgaaagaagacaaatagagactgtaagtgagctgattagttattacaaagatatttttacaatattaagttcctgtgctgctcgacaattagaagaaataacttttaaacgcagtattgtaaaggcccaggatttagctgattatgcagaacgctacatgaaacgtgtgggaaaacgttttttttgtaaagtagaactaaaaatagaggtggaaaatgtttcaatgcttggagatatgattcaattaaaatatatgcttgaaaatttaatagatgaagccttgtcttatgaggttgacggaagactgtatttacatatatataaggacacagactttgccaggttcgactttatagataaacgtcgcgataaaactcaagaagaactgaatcaattattctatccgcatttatcacgaatgaaacgtggtagcgaaggagttctgacaggtacggaatatctaatatgcaagcaggtaattcgtgaacatgacgagtttgcaggcaggcgtggctgtcgtattaatgcccagccggtaagcaatggaggttttatgatatggtttactattcctgcaagataacaaaataatgaaatataataaatcaagataatatggaaagcaagaaatttaaagttataattgttgaagacgttaagttagaattaaaaggtactgaagagattttcagacatgaaattcctaatgccgaggtgattggtacagctatgactgaaaatgaattttgggaacttcttaaagtacatactcctgacatggtattactcgatttaggattgggtggttccactaccataggtgtagatatatgttcttctttacggaagaatcaccctgaaataaaagtacttatattcacaggtgaggtgttgaatgaaaagctttgggtagatgttttgaatgccggtgcagatggtattattctcaaaacaggcgagcttctgacggcgaccgatgtgcaagccgtaatggatggtaagaaacttgtgtttaattatcccatactcgaaaaaataatagaacgtttcaaacaatctgtcgcgcaagaacaacgtcggcaggaagctatcatcaattatgatattgatgaatatgacgaacgtcttcttcgacatttggcactagggtataccaaagaaatgattacaaatctaaaaggtatgcctttcggtgtaaaatcaatagaaaagcggcaaaacgatcttattaatcgcttgtttactattaatgagcgaagcggtgtcaatgcatgtcgtcttgtaacgcgcgctttagagttgcgtattattgatattgataatttagagccggatgaagaataattactattttccccatgtagctacattcttctttttattgacagtaatagtggcattagtctcatggataggcagtatttacgggcttggcacagtgcaaagtctacttagtccggaaggtatccgctgggagcttagacatattacaagtaattatgttaagactcccgctttgggaattataatgattttactctttggccttggaatagcttcttatagcggcatggttaatgccattggcaggattttgaaaagaggaaagcagttaacgcgaaaagaaaagcgtgccctactgttttctgcttgtattttatttatctattcgttgacaatcatcatgactacttttgctccttggacgatattgcgaagtattaccggctccttaggaaattcaccttttcagcaaggcatatattatcttatttcattcggaataggtttgtcaggagtagtttttggctatacttccgggcgtttgcgtaatgacagagatataattcgaggaatgactttcttgtttattcgctttgccgattactttgttattttgttttttattgttcagttcttctcttcgctactatatactaatttgacagaatggattggaatagactcaagcataatggtttacgtctttcatgtttgttgttttattccttttattggaatgctaaatagaaaaaaataagttatgagcgaaaatagttgctaagatttttggaacttttgataaaagctattatctttgcacccgcaaacaaggatggttccgtagctcagctggatagagcaacgcccttctaaggcgtgggtcctgcgttcgaatcgcagcggaatcacttttacaaaacgctgattaccaataagataatcagcgttttctcttctaaagcagctggaaaatataaagtcacttgacccactattatactcctgattaacccatcaaaaaaatatgagatttaagtagagaaaaatgcattttaacccggaacagtttcagttataattcttggctcagtttgaaaacttgggggaattagttaaaaacactatctttgtggcatgaaacagaaccttcacccccctgccactccactggagatgttgagcttgttccttcctgcaggcctgcttgactattttgacctggttaaccatgtctctcaagagacttgcttcattttttttcttgaggaaaagccttccattcctcaagagcattcccatttacatctacattccaaaggtttcttcccggaaatagaagtgcaagactttcctgttcgcggcaaggctgtatatctacgcatcaagcggcgtcgttgggaagacccggaaacaggacaaacttatagtcgtgattggaacttagtagcctccggtactcgcataacagctgagttcggagcttttttaaaagcgttacttagacaatcatgcggttagtt

SEQ ID NO: 6708 - DNA, 291 bp, Unknown
  gut microbiota DNA sequence
ttagcgttgatcaggaaacctgagtcttgcggcgagggggtttctcaccccctttatcgttacttatacctacatttgcttttccacacgctccagcagggctcacgcccaaccttcgacgcagagtggaatgctcccctaccgatcattatatgatcccactgcttcggtaaacagcttaatacccgattattatccacgccaaactcctcgactagtgagctgttacgcactctttaaatgaatggctgcttccaagccaacatcctagctgtcttagcaatctgactt

SEQ ID NO: 6709 - DNA, 221 bp, Unknown
  gut microbiota DNA sequence
gcgagggcttcaccgcctatcaagtcttgataaactccgaatgcgcattagtttgaggtcaggagtgagggcatgggtgctaaggtccgtgcccgagaggagaagaatccggaccacctgctaaggtcccgaaataacagctaagttaaactaacgaagtcagattgctaagacagctaggatgttggcttggaagcagccattcatttaaagagtgcgta

SEQ ID NO: 6710 - DNA, 155362 bp, Unknown
  gut microbiota DNA sequence
attatatataatatatattctccgaaggagattcccctgaaggggaagttcttccgaaggaacctcccccttcaagggggataaccatccggatgggtatacattcggagctgcaaattttgcatgccgatttgcaaattttgcagctccgttttttttttattattttattattcttcgttcgcaaacatcgggtcccatgccggcaggcgaatcggtttttgcttgaggatatccagcaccttggcagggacatatttcttttccgccaccacgcggaacatatactcatcaaaccatttgtccgtcataatgagatggcctttgtatccgttggtgcttccccaactgttttccaccatccattttttcggtttcccggccttatccaaatccacagccatcagcgtcatggcatggctgctgccactggcaaatgtctggatacgctgtttcttgtccataccgaaagttgtccccatcagtgactcataatcgtaattatcagggtccagcagtcctctcttgctatcaaggaacttacccacatcgcaagaaaaatacatcattgtgctgtctttgatggaagcaatggctatttccttgatatcttctataggcagattgacatacgtccagttcttaccgtcatagctatggcggtcatagtctatctcgtagcatttataaaactcacggctggggtcattcatcagcatcacgtaattattggtcaggtcattgcccagaaattccttgtagaaagacaagggagtgtactctttcgcttcgcctcccttcaagctccaagtgaacgtagacaccggctcaccgagtgtcagcaccagcatgcgatagaccgtagccagcatttccgttttctttttttccagttcggcgggcttggctccggcagcagcagcctcacggagttgtaagccgaattctttcagtttcagtcctatcagattattcatttttcctgtgttgtcactgctgaaagtctccaccatcgcgctcttcggtacaagtccgtatttacctataatgtccgacacaccagtaaattgccctccatcgctcaagggatgcttaaagagccactccaccatcttgtcgtccatcggcttttcacgcgtatcaatgattccctgtaagaaaagattcgatttttccagctggtcataaaagaagcagtagttctgcgaaaactccatttcatccaggccgtacttggctatcatctggctgcgaagcacattcagtcccgtaaacaaccagcagcgtcctgacgagcgttgattggtaatgcctttcgataagactttattagagaaatgagtgtcaaagtctgcctgattttcctgattaagtgccaaggtattgatacttgttccgcctaaagcattgcggattgccttgtcggtaggagttgcctgataactttgtttgatttgattcagcatctcgctcgaaatgcctccctgttgtgcctgcgcggtcaatgctgccgcaaaaagcaaggcaaaagtgatgtgtctcttcataatatgaaaatataaattgattatttttaggtctgtaaaaatacaagttatttttgaaatccccactcttcgggacatttttttcccggtgtacccattcctgcctgcacaccgggggaaaaaattattcggttattttcttctttatcttataaccgataactgccaccgtgatactcatcagcggactaatcagattaaagaaagaatatggaagataagtgagtgtaggcacactcagaatagttgcctgagtcataccgcaggtattccaggggataagcggtgaggtgactgttacagcatcttcggtggtacggctcagtaatcggctttcatatccgtttgcctcataaatatccttaaacatattgccggtcagaataatggagatatattggtcggcagtggccaggttgaggaacaatcccgatgcaacggtagaagacaccatccctatacgtctcttggtgaaacggataaacacagaggtgatactgcccagcatgcctcctgccgtcatagcccctccaaagcacatggcacagacaatcagccaaatggtattcatcattcccgacataccgcgtgtggcaaccaactcatttatctctgcactgcctgtctccagttgggtgccaccgaagagcatgcccatgcctcctttgaaaagtgcagtaagacctgctaccccctgccctgctatctcgcgcaacaaatccggctggaatataagtgcaaagacagtggccagtgtggtggagataaacaaagtaatgaccgaaggaaccttgcgggcaatcaaaactcccgtcacgacgggaacaatcatcagccaccaggaaatattgaatttggagtcgagtgcctgcatgtattcggtaatatgacctgtgtccgttgcctcgtgagacagtccggcaacagtgaaaataatcaatgtgatgaccaatgaggggatggtggttatcatcaaatagcgtatgtgtgtaaacagcggagtgtccgtcacggaagacgccaaaatagtggtatcggacagcggggataccttatcgccgaaataagcacccgaaataatcgctcccgctatccagccttcgctgaaaccttgtgccttgccgattcccatcaatgcgatgccgatagtggctatggttgtccacgaactgcctgtcatgactgaaacaatggcacaaatcacacaggtagacaccagaaaaaagtgaggatgtatcacctgaatgccataataaatcaatgtgggaaccacgccgctaatcatccatgcccccgacaaagcaccgataatcagcagaataatcaatgccgtacttactccggctatattattcgtaatagccaattcaaaatctttccaagctcttcggtaccctgccatccctatcaatacacaaacagccgtagccgtaagcaaacaaacctgacttccgcccgacaacgcatcgctgccaaagacacggatggtgacaaacaataataaaataagtacaaatacgggtaacaaagaaataaacggagaaggaattctgttatctttcattctttttttattcagtttttattcaaaaatgctaataaagtgaatctttttgctttcaccgtgcaaagttcggaatattttttgagttctaaaagtcaagtgcagctatttaaatactttttttgtatttatgggcaaacatttttgtatagaggacgttattagttgaaattataacctaaaacttaacaaacatgaatgaattagttggtggcttgggctacgcggtaaagaactggtggatgtccctattattgggattgctttacatcgcagtagcattatgccttttgtttgctcccgtgagcagttatgtggcactgagtgtcattttcagtatttcaattctggtcagcggtatcctcgaaatcttttttgccgtcggcaacaaaaagattatcaacagttggggatggtatctggcaggcggtatcattgatttgctgataggtatttatttggtattctatccgctggtaagcatggaactgattccgtttatcgtcgcattctggcttatgttcagaggattcaccctttgcggttattccaccgacctgaaacgctacggcaccaaagactggggatggtatctggtattcggcattctggccattttatgttccatggctatcatctggcaaccgggactcggagcagtcactgtgctttatatgctgtccgttactttcctcattatcggttgtttccgtatcattttctcgtttgagttgaaaagattgcataaaaacaagtaaaaatccaagtttattttgggctacttcggacgtatttcgtacctttgttagcccaaaataagcaatgatatcaagcaaaagtcttaaatatacagttcgcatactgctaggtattctcttgggagtttatctggggataattgtgcttctgaacattccatacgttcaggacaaattgtcttatatagtgaccaaagagctccgcaaagtgctcaacacggaagtttctgtaggaaaaatcgacatgggcctgctgaaccgcattattgtggaagatgtgttgctggaagaccgccggggcagggaaatgctgaaagtggcgcgtctgtctgccaaatttgaaatactccccctgctgaaagggaaaatcactattaccagtgttcagcttttcggcttttcggccaatatggagcgggaaacgcctcagtctcctcccaattatcaatttgttctggatgcttttgcttccaaagacacggtgaagactcagacaaatctggatttacgcatcaactctttattgataagacgcggacgtatcacatacgatgtcttgtcggagcccgaaacccccggacggttcaataccggccatcttgccgtaaagaacttcgcagccaccgtttcgctgaaggcgctccgcaacgactcgctgaacgcctccatccgtcgtctgagctttgaagaacagtgtggatttgctttacaaaagttctcaatgaaagtcactgccaacaataagcgactgaatataaaggatttttccctcgagctttccaattctgctttaagcattgacagcctttccatgcgttacgacagtttgccggatcttcctaaactgacagacaatgtgcaatatcaaggaagcgtcaatgcctctgtcgtactcaaagacatagccccttttgtcccggctttggccaagttcgatactccgttacatttcaacatggatttctccggtaaaggaaagaatatagactgccctaccctgcgactgaccgacaaccacagtctgatgatcaacggagaagcatccgttgccgactggaacgcaggaagaaatatgtatatcatgggaaagctgaccgacgtaaacctgaataaagaaggcatcagcaccgttatgagtaatgtggccgggaaagttcctcctatttttcagcagttggaatatgtacgttttagcggtgatgccaccggatatcttcacgatttgattatcacaggactcctgcacaccggcgtaggtacaatcaaagccgatgttatgatgagcattgacaaccaacagaaccgtacctattcgggaaatatcgccagtgccgacctgaatgtgggcaaactgcttgataacgaaaagaaattcggtacggcagacttcaatctggaattgaaagggttcaactataaaaatcactatcccgaatcttatatcaaagggaatattgcctctttcgaatacagccaatataaatatgagaatatagcactggacggcgtgtataaagacggaggcttcaacggcaagctggcaatggatgatgacaacggctctgttcagataaacggcaatttcaacgtggcgtgcgccatacccgaattcaacttgaaggccgtcttaaagaatctccgaccggataacctgcatttgtccgacaaatacaaagatacggacatttccctaaacgtaacagcagactttaccgggaagtctatcgacgacatgaacggaaaaatccgtttggacagcttgcaaatgaatacccccgaagggaacaactatttccttgacaaccttaccattacggcaggacaggtagaaggacaaaaagaaatacaagtgctttcctcgttcatgacggctgtcatacgtggagactattcttataacacaattccggccagcatattgcagactgttcaacgctatatcccttccctgctgacgctgaacgaaaacatgccggttcctcacaacaacttcaaattcgacatcagagtaaataatacggagttctttcaaaaactctttcaaataccgatggaattaaagttccctgcctccatcaaagggtatttcaacgaccgcgaagagaaattgcgcgttgaaggacattttccggctttcaaatataatggaacccattatgattcgggggtactcatctgcgaaaatccgtcagactggttcaaatgttccctcagaaccggtatgttgatgaacagtggtgcaatggtgaatcttactgtcgatacccaagccaaaaacgaccggctggaaacaactgtcaattgggggaataacacaaatgtcacttacggaggtaagtttgctgccgtgacccgattctataaaacggaggggaaacaccccatcttacaggccgacattaacatcaaacccacgaaagtggtattgaacgatacgatttggaatatacatccttcgcatattgccgtagactccggacgtgtctatatcgacaattttctgtttgaacatgaaaaccagcatttacgcatcaacggaaagttgacaaaaagcaaggaagactcctgccatatcgatttaaagaatatcaatttggaatatgtactggatatagtgcattttgatgatgtggcattcaacggcttggttaccgggactgtcaacatgaagggagtaatgaaagagcctgccatgcacaccaaactcaatgtgcataatttctgcctgaataaagcattgttgggtgaagccgatattacaggcgtatgggactcggaactgggcggagtacgccttgatgcaaaaattgcggaagaaggtatttcggccactcatgtcaccggatacgtatctccgaaaatgaaaggactggacctgatgattgaagcagacagtaccaatatcggactcatccagccctttgtggaaggcatattcagcgatttaaccggacgtgtcaacggtcatatcagactctatggagacttcaagcacctggatttggaaggagaggcacgtgccaatatagataccaagattgatgtactgaacacctatttccaaatacgcgatgattcggtacatatttcctccggacaattactgtttaccgatgtacacgtgtacgaccgcgaaggaaacagtggagtagtcaatggctatctgcatcataccaaactaaaaaacctgatgtatcattttaatatcagtggcgacaatctgctgatgtatgatacccacgaaggcggcgatatgcctttctacggcaaggtgtacggttcgggaagcgtcatattggacggaggaaacaatgccatgaccgtagatgcctcactgacaacaggacacaacacctcttttacttatatcacaggcatcacgacagaggctaccaatacccagttcattacctttgtcgacaagacccccaaacgtatccatgataatgtggaaaccaatctgtaccatcactcgaatgtgcagaaagaaaaagaagaagagggtcctcccatggacctgcgcatcaatatgctgattaatgccacccccaatgccaccatgaaaatcgtgatggacccggtggcaggcgacaatattacagcaacaggcaacggcaatctgcaagtgaactactttaataaaggagactttaagatgttcggtaactacattatcgatcagggaatgtataagctcagcatgcaggaagtgattcgcaaagattttacattgaagtccggcggtacagtcaccttcacaggtgacccatatcaggccaatctggatcttcaggcgatttatacggtaaactctgcctcattgagtgatttaggtatcgacacttcactttcgcagggacaaagcaccgttaaagtaaactgcctgatgaacctgaccggcaacctgtccagccccgatattaaatttgacttggatttaccgacagtcagagaagaagaccgtgatgtggtgcgcagcatcaccagtacagaagaacaaatgaacacacaaatcatctatctgctgggtatcggtaagttctacacctacgattatgccaacaacgaccaatcttcaaacgctaccagttcattagccttcagcactttatccggtcagctcaataatatgctctcccaatggatggacaataagaactggaacatcggtgccaacctgagcacaggagacaaaggatggacggatgtagaagccgaagctgtcctttccggcagattattgaataatcgactgataatcaatggcaactttggttataaagataatgcaatggcaaacaccaactttgtaggtgactttgaagccatttggctgttgactaaaaacggagacttccgtctacgaggatacaatcagaccaacgaccgttatttcacaaaatcaaccctgaccacacaaggtatcggcatcatgtataaaaaagatttcgataaatggaatgatttgttccgttggttcttatggaaaagagcccataaaaaaaaggaaaaggaagacaccacctcttcctcccctgcttcgcaaacaaagcgaaacgacaactaattacatgctttcatattgatatatgtacatgaaattctgtttttgtcttagataatatacttttgcgtatttatctgacattaattaataataagttcttgataacgatttgaaaacattacagccgcattaatctgctacattttactaataacaaacaattctgaaacagaagtagccaaattccttattaggagcaaacaattgatcactttttcttactgtttattcttattcgtttcatagtggaaagaattacactatttcaactttaatctttatattaaacatattggctatacgttctatatcccgtttcttggtaagcgtattgctacatgtcatcagataccaaccattaccgacaggcttttgtgaacttttatatttcttatcaagcgtattggaaatcaaaggcactttattttgtttcattcctaaagtacgaatgcgttcggcacctacttccatcacaaacttacgaaaagtctcagctgcttgtggctcttgaatcacgtgaccatcagcaaatgtaatctttaatcgagtagccggtgcaatttcgcctttcggcccggtcttacctatttccttatgttccacctgtggatcaggaagaatctctttggcatccgctatatctgctgtgaaatttcgtttgcgagacaaatgtacgctaataggcgagccgggtacataatccacaacaagcactaattcacgctgcacttgctttaaagccggtgcaatcgtctcggttacaatcggaaggatttcttttttgatgatgttctcttccaaatcacttacttgtttttcgaggtcttcatttaacgaaagaccttctttgcgcaatgtttccattgctttatataggtcacttagtcgggacatagattattttagatttttttggtttgacttaaccgattgaagaataaactcttagcgaattatttgagaagtagcggtaacgagtcagtaaccgtgcgaatttcagcgctttacattgctatgctgtcaaataactctttcatttgcaaatgtaacatctttttctgaaagtacgaactatcggcggcaattttataaaatcggttggcaaaaaaaatcattcagcccattcacgggctgtaatgtgttaggggaatctgctttgtcattttgttaccggaatttatccgcatggagggagaaccacaccgatcagccaagtatgtcgtttcattatgcaacagccggcagagcgtttttggggtgtaatactccgatattactttctttttgttttctgatatgtgcaaatgcaaaaagcctccggagagctaccttgccggaggctttgtttatctctgtttttccttacttttcccgaagtagaactttggaaaaaccggatatttattgatatctgttgctgttggttgatgacagttcttgaccgttgaaatagagtcattcccaactctgaagttacagtgaaacggtcaaactatccggtacggcccaaaaacgtgattcatccgtagttagtactgatttgtcgcttaagtcaaagccactgaaccctttaggaacaagtattatctcgcggtcatggttgctgaatgcaggattattatcttcacggctataaccagttacctcccaagatataaaccaatagaggtttttggcccaatacatcttgtaataattgaaattattttctgaatctaataaggggcggtatataatttcttgtccgtttatgtaacgttcgcgcatttcagcgagagaaagaggtgttccgttttcatcttctgcccaagctctcatatcggaatcaagcatagcccatttttgtatttcgggtagccatacttgatttaccacatgacagtcagaatctaacgaatcagcgggaaggcaagtgacaaaacgattcactattccttccgacagcaataactcatgcaaaaggattgaatggaggcggcagttaaaagctggctctatcgtgcgggtatattcccaaagtcctattgcgttacatttctttggatagttattttgattggcatgaggaatattcttggctacgaaacgtgccaatgcaatagctctattccatgtgacttctgtaggtttcacaatggtatctaatctgaagtattcacggatttgctgtgctttggcagtatcttgctgataaacaaaattatatgacacactatctggtgcatactcaccagcgttctttaatagttctatcttatcctttcctaagggttcatttaattgtctgttgaatacataacgtactaacaataggactaatacagttaagagcaataagcctaatatgctcaaactaaaaactttaaatatcttcttcatgatgtcaataataggaattaaaacttctgtttatttaactgcaaatatagtgaaaaagcaattcgtaagtattatgaacggctcttttttccaacaagataaaacggttatatcttcattcccctacctttcctttgtggttgtatatgtcggcgcatgttctgccttaacttctcgaactgttccttgaaccactcggcaatgggctttcggtcaatggcaagaaccagtctcgtcccgtccgtagggtctttcacgacttgaaaccctgccttttcggtcgtgaatttccgtccgtgttcctccgagtagagtttccctgcatactccaacggctttcccttgacgagtgtttcggtctgcctttcatcgaatcccacgagtcggcacagtttttcaatgtgcaacatttcacagaaataggaaaaccatgccgctacccttgcgattaccgttttcagaaacgatatttcctgcttgtgccttgtgtccttgtccgctatctccctgccgtgcttctgctgcatttcccatacctctcggctatggtctgcctgcatggtctgtattctatcttacagggcttcgatgattttctcgtagtcgactacccctatgcagggcggtgttctcccctttcagcgtctttaccttgttgttaccgaaaagagaaccaaggctctcggcgatgttggcagctgcggtggttgccgtccctttcagcttctcggtctgtatttcttttttcgcccgtcttagttcctcctgcgccgtttctttctgctgttgcaaatccaccacttccgctttgaggttatcggcgagtttctgtatatcccgataatactgctgtgtggacttgtggcgagccttcgagccgtctatgcccctttacagcccgtatttcgccatcgcttcggcataggtatcttggtaggacttcaatttcaaccgtgtcataatatcgtctgcgcacagcctcacggtgtcaatcggtttcttgcggtatcgcttcttcgtctgttcttcccttttcctgcgcttgctctctcccttgacgatggggacgagcgtaacgtgtatgtgcggcattttctctccgtgcgcaaaaaatactcgaaatcgttgataaacgtaagattgagttcctttaacggaatatcctctcgcttgtaggtatggggcaaaaactcccgaatatggttgcagaccgtccgatagcgtgtaaatgtcccctgcgccctgctgtgcccgactttcttctcaaactcggcgttgtgctgctcgaacagcttcagcaaagtttcctgcttgatgccgataccgagataggcgtctttgagtttggcggcggtaacataaccgtccgtctgcatcagttcttggtagcggcggtttacctcaacacggattttatccaccgcaaggttgattttctgcgcttcgacgctcttgcccgaagcacggctgttcttcacttcccacaagcgtgggggaacgtccatcttgcaactgaactgtttaatctcgccgtccaccgtgatacggcgcatcagaggcaggttgccgttgggcttctcgctgcctttcttcacgtaaaataataccttgaatgtactacgcataactcactcttttttttggttacaaattagttattagtgagttaccgacagctatgtaaatctacgcaaaacgcagaaacataaccttttagcaagaaatctgcacccgttacgggagtaacgaagtggtaactgaacttctgcaccgtttggcttcgaggtggtatttcgttggctctgccccatagacaaacaaagcgtaacgaacgctctatcagctaattcgctacgctttgcccaaatttactttttcgctatgtgtttattttagatttttctcgattggatttaaccaattgataaataaacttttatcgaattatttaagaaatagggataacaatttaacaaccccagcgagttaccccaccgaaggcatagctcatttattacaatcaaatttctgaaatgtcttttcttcttttacaaccccttgctttatatgcctgcatattgctcattgcgctactttttaggcaacatttgtgtaccaagataattgtatgtcacttcttgtatgttataagggaagacattataataaccgtctgtttgtataatctccatgttcaaagctttttgaccgtatgctttacggagtgttgaccactcgaaatcgaatgatgttccgggacgcatcaccatggtacgtttatcgggaagtgataccggctgttggaggatgcgtacatatacatatagggtagccgttggcggtaaggtcgccgaggtcattttacgcatggtatagatgccttgagcaatggatttgtcacaaggtagggtggcaaatgacggagcattagtgaaatgaaaggcacaagttccccataagcaataaccttgttgggacaattccctattctgcttggtttccacattgacacacgttaagcccgaaagtgggaaacgctgttgattgatgtcgtacatttggagttccgacaaacatttgatacggaaaaccttattgaaatctgcctttgccacagcttgttccagttctttccgatatgttgtacgaagttcttccaatgcaaacgggtcattggctgcttctgcatactgttggggagcacagagagaggcataggtctcgactgatgctttgtcgataggtttgccgtaaagtttatgtgtgtaggcgaacaagatagccggggtaaggtcgacagctccatccatatgagaaacatgatgtccggacatgatgtttcctttggttaaagccatgtttagatatacgccaatcttgaaatcgccctgttcggcaaagactatttggggcgtttccggctgttggtaaatgccgaactgttgatagagtttgggctggtaagcaggtatgtcggtaatgacggcagtccgtccggttgagtttttcggattcagcttatcaaattgattgttggcgtttagttgcttaacaaatagatagcccgatagcaatggttcgccaatacggagcgtgtcgcctactttataagtacgaccgtcacaagcatcaatgctctgctgggcttggagtggttggcataacaaacagacaccacctaacaacaaagcggtcagattcattcttttcatacgtttttttatgcttaattctatagttctcatattaatatatttttataatagttgcagtaataattaagactattgatacaataaagagtgatatattgattttctttttcttctgaaacaaattagcgatgcaagcagatcccaaacctaaacgagctattattgaatcaatggtaagatcatcgataatgataggtacaatagtccataccacaataatccatattgagaaattgattatcaaatagataaatctttccatactattcacgaattaaataatatattgaaattccaataacaggaagtaataaaacaatcaagacatataatattctgcttccttgtgtgctttttgtgcgtacaatacttatagtacggctatatcaagcaagaaaatgagtattataagtaaaaggcttatatccatatctacataattttacgattctgtatttacttttatttgctctatccttattttgtgtgcaaatatataaaaagtgccattcataaggcattatgaacaacacttttttattgtttcccggcaagataaaatggttatatcttcattcccctgcctttcctttgcgactgtatagatcggtgtatgctctgccatagcttgtcgaattactctttgaaccactcggcaatgggctttctagcaatagcaagaaccagtttgccccatccgtcagggctttcaacacttgaaagcctgactttttcggtcgtgaatctccgtccgtgttcctccgagtagagtttccctgcatactccaacggctttcccttgacgagtgtttcggtctgcctttcatcgaattccacgagtcggcacagtttttcaatgtgcatttctttcgatgcggcaggtcaaacacaccttgaagccgcattatctgcccatattttatattccggttcgggtaatccggctttacgacattcagacatcatcagcccaatgccacgtccccaactttccaaaactttttgcttgtacaggacatttaccaataatggattttgtggtttcgattcatgctctgatttcatttttctgtatcccagttggacggaaaagttccggggttttctatcttcacacggttatcataaatggctatgcccaccgaaccagcgttttttttgtacgacctatgttgaagaacggtgtcccatccgaggtgactctctgccgcgtggagcacggtatcgataattcggcactggccaacaggatgcaggagtttacgaagtctttccaccgaaggctgtccaaggcagacggagataaggagataatctgtgtggatggcaaagccaagcgcagcactgtacaggccaacgaacgcaagcctgatattgtgtcagcatattcctacaacaccggcatcacattggctaccgaagcctgcaaagagaaaaacaatgagataattagattgggataaaagaataactttctgacatacagcaataaaaaaatacccgatttacgatgaatcgggtaagggagactatggctctacttagagattaaatgaaagagcatgatatagcaccaagtttttctaaaatcacctcgcttcgaaaagtgagtagctcatttttatttcctatctttgtcgggtaaaattaaagaatatgaagaaaacttatttgccggcagaatggcacaaacagagcctgatacaattgacatggccccatatagacactgattgggcctatatgttggaagaagtagatgcttgcttccttaatatagcttacgaaattttaaaacgtcagcctttgctggtagtagccccggaacctcatcgaatcggagacagaatctatgagcacggatgtaatgtgaagaatctcaccgtttcggccgtgaagactaacgatacatgggcacgcgaccacgcctttattaccatgctgaaagagaacggagaaccgctcttactggatttctgttttaacggttggggaatgaagtacgctgccaattatgataatatgataaactccaatctatattatcgctgcaaaacattgacaggagaatatgtataccaaagaaatttcattttggaaggaggttcgatagaaagtgatggaaaaggcacactccttaccacagaaaagtgcttgttgtcctacaaccgaaacgagaaaacgaaggaagaaacagaacaatatctgaaagaaacattcaacttgaaacaggtgttatggctgaagcacggttatttggccggcgatgatacagacagtcatatcgacacgctggcacgtttctgtcctgacgataccatcgtatatgtgcagtgcacagacaaaaaagacgagcattatgaagagctggtggcaatggaagaagaactgaaagctttccggacaccggagggaaatccctatcgcttacttcccctccctatggccgatgctatttatgatataaatggagaacggctgccggcaacctatgccaatttcctgattatgaatgaagccgttctgcttcccacatacaatcagcctcataatgatactcttgcaaaagaagtattggaaaaagcttttcccggaagagagattgtcggtgtggattgcacggcattgatcaaacaacatggctcgcttcattgcgtcaccatgcaatatcctgaaggtgtatattaatatagacgtatataatatgagaagaacaattaaagtaggactcattcagcagtcttgtacaggcaatacggctgaaaacatggataaactgaaacacagtatagaagatgtggcatccaagggcgcagagctagtggtgttgcaggaattgcacaatacgctttatttctgtcagacagaaaatacctctctgtttgacctggcagaaacgattccaggtccttccaccgaattctatagtggaattgcatccgccaatggtatcgtactggtcacttccttatttgagaaacgtgctccgggactttaccataacacggccgttgtattcgataaagacggaagtattgccgggaagtatagaaaaatgcatattccggacgatccggcatattatgaaaaattctatttcactccgggggatttaggtttcgaacctattcaaacttcaataggaaaattgggtgtacaagtttgctgggatcaatggtatcctgaaggagcgcgtctgatgaccttgaaaggtgctgaaattcttatctatcccactgctatcggttgggaaagcacagataccccggaagaaaaagctcgccaactggaagcatgggtaatttcccaacgaggacatgccgtagccaacggattacctgtaatagccgtcaatcgcgtagggcatgagcctgacccttcgaaacaaacaaacggaatccggttttggggaaatagctttgtagcaggtcctcaaggtgaaatactggcacaagccgacaacatgaaagaggaaaatatagtaacggaggtagacattacacgaagcgaagaagttcgccgctggtggccattcctcagagaccgcagaatagacgaatttgacaaattgaccaaacgatttgttgactaaaagatgaataagtagaaaaacagtagaaacgttatcgttatataaattcacatattcgttaaacaaattgcgattgaagttgttttgttatcagattatctaaaagatatattgattaacaaaacagctttaattatgaaaaaagtattattcttagcagcattgttacttgtttgcttcagcggagtaacaaatgcacaaaccagaaaacaaagagaagatgccaaacgcgaagcatggaaaaaagaacgtcaggaaaagaaggccttggaagcacagcaagattccgtgtctttcatgaaagctatcgatgccttgaaaaacggttcctttgttttggaagctgataacgtagtattccgtaacggtattatgcgttttgtgtcctcaaacaccaactatgtggaggtaaacgacggacaaggaattattcagaccgccttcactaactttgtgtataactggagcccgaacggtttgggcggtgtcactgtacaaggaagcgtaaacggtataagtatgcgccaggacaaggatggcaatatttattacaactacggcattaacggtattgccgtatcagccacagtctctatcgtgttaaccggtggtaccaatcaggccagtgtaaccatcaacccgaacttctccggaaatacgttgaccatgaacggttatttggtcccttacaatgaaagcggagtatttcagggaacaacttggtaagacttatcgaaaggcaatataaaaaaggagttgtgtcaaaacgtggataatgccatcatttagtcgtaggggcgaggttttcgctcgcccgaaaacagtttgctttgcgccttcgggcaggcaaaccctgcccctacagctgacgatgggataggccgtagttttggcacactcccttttatgtatctatcactttattctttgatatcgataaccagattcaactcatccaactgtttttgatccaaagcagcaggagcatccagcatcacatcacgcccactgttattcttcgggaacgcaatgcagtcacggatactgtcaaggccggcaaacagcgatacccaacggtcgagaccgtatgccaaaccaccatgaggaggagcaccatatttaaatgcattcatcaggaagccaaactgctcttgtgccttttcgggtgtaaagcccagaatctcgaacatcttggcctgcaactgagagtcatggatacgaatagatccccctcctacttctacaccattcacaaccatatcgtatgcatctgcacgaacggctgccggatctgtatccaacaaaggaatatcttcatctttcggatgagtaaacggatggtgcattgccatcaagcggttttcttcttcgctccactcaaacatcgggaagtcaataacccacagacaagcaaacttattcttatcacgcaaacctaattgacgtcccatttccaaacgaagttcgcacaactgtttacgagtcttcatggcatcgtcaccactcagaatcagaatcaaatcacccggcttagctccgaaagcttctttcatttgctgcagcacttcttgtgaatagaatttatctacgcttgattttacatttccatcagcttctacgcgagcatataccataccttttgcgccaatttgcggtctcttgacgaaatcggtcaactggtcaagctgtttacgggtataaacggcagcaccctctgcacaaataccaccaatatatgcagcatcatcgaatacagaaaagccgtggcctttcagaatatccatcagttccacaaatttcattccgaaacgcaaatcaggtttatcgctaccgtaatatttcatagcatctgcccacggcatacggataaacggctcggtaagctcaacaccacgcaattccttgaataaatgtttggccattccttcaaaggtagaaatgatatcttcctgctccacaaagctcatctcacagtctatctgagtaaactcaggctgacggtcggcacgaaggtcttcatcacgaaaacatttcacaatctggaaataacggtccatacctgataccatcaataactgtttcaatgtctgcggtgactgaggcaatgcatagaactgtcccggattcatgcgtgaaggaaccacaaagtcacgagccccttcaggagtagaaccgaccaacatgggtgtttctatctcaagaaaacctttgctgtccaaatagcggcgtacttccatcgtcattctatggcgtaattccaaattctgacggacacaactgcgtcgcaaatccagatagcggtatttcatgcgaatatcatcgccaccgtcactattgtcttcaatagtgaaaggaggagtaagtgcactgttaagaacgttcagttccgatacgataatttctatttcgccggtaggaatattcgtattcttatttgaacgctcattcacttcaccggtcacctgaatcacaaattcacgccccaaatggttagcgcgttcacaaagttcggcattcacttccgtattgaacaccagctgagtaataccataacggtcacgaaggtcgacgaaggtcattcctcccattttacgtgcacgctgtacccagccggccaacgttacacttttgcctgcatcggagagtcgcaactctccgcaagtatgacttctgaacatatattctttaattttaatcaattatcgtgcaaaggtacgatatgtttttcattgtacaaaaccgcctacaagaaaaaaaatcccgctacttcatagtaacggaacttttttaacctatactgatattcgggcatcaattcttgaacatttcaatcacatccttcaattctccgggaaacacccctcctgtctttttccacagtattctgtcttttcgctgaagtacgaaaccgggagctgtttctatgttataggcatcggccactttcttgtcgccctccatatttactctgataatattgaccggcgtttcaaattcatgaagtaacggctcaatccattcataatgaggcgaccagtctgtatagaatacaatcagcaacaatgcgtccgactgcttggcatcttcaattttttcggctatatccattttcttttcagttttaaattatcctctactgcccagactgttcaggtccggattcaattcttttaccgccgccttcacttccttcttggtgggttcaccggtattggacacttgttcaacaggatagcgccggtcattttccatcagttcatccttttgctccgtctttttcttcttttcttccttatccatatcttttcaattttaaggtttaatactggtaatgcaacaaaataggcaaaaagatggttcgcacaatacagaaaatatagatgaaaaacatcatatagaaacatataatcacaaagagagaaaactttttctgtgcattctgaagtgaatccggagcccctgatgcatccacttcattataatgacgaatgatttcattgtgtacaaaatccaactgaatttcctacatactgaaacagcaagagagctattttcttgatatatataactctttatctgttgtgttaaaaaacgatttactgttgcgttatgaacatttgttcattatctttgcagtcgaaaacaataaatatttaatgtcaccacgtccaaaaaacatccgtaaagtcaataacatgccttctgttgcaggctttaaacctatagcttcaaacagtagtcgcaaggatgctatattcttgcattttgaagagtatgaagcaatacggttatgtgattatgaaatgaagactcaacaagaggcatctgtttcaatgggggtatcacgtccgactcttagccgaatatataccagcgcgcgtcagaagattgcccaagcactggttcgtggtgttgttataatgatagaaggtggagtagcgtacactgatagtgaatggttccgttgcggagtatgcggtttggtattcaataatatcaatcctacacttaaaatccgcaaaatggaatgtcccatctgccactccaacgacataagcattagtaatattaacattaataagaatgagattatgatgaaaattgcaattccgacaaaagagaatgtagttgacaaccatttcggtcactgtgagtattacacaatcttgacagtagggcaagacaatcagattctaagcagcgagactattccttccccacaaggatgcggatgtaaatccaatatcgcaggagaattagaaaacatgggagtcagcgtcatgttggcagggaatatggggcaaggtgctttaaatgtacttacaacccaccacatcaaagttataagggggtgttccggtaatattttggatgtcgctaccgactatttaaacgggaaacttactgattcgggagtaggctgctcatcccatgaacaccatcatgaatgtcacggacaacaatcataaagaatgatgtttataaagaacaaaatgctacttaacattgtcatagactttgttatgttgatagcaatggcattggtaagtataagtggcttcatattggaaatagtcattccttctcgccatgctgtcaaatttcaaggtgttactccatggagttcacaattgttgggcttgggaaggcatgattggggcgaaattcatttgtgggcaggaattgttttggtcattctgcttaccattcattttttgttacacataaatatagtatcggcttttgttaaaaagaaatgcccgaaccatatactacaaatattgctctatattttatttttaatgctattgataatgacaatagtgccttggcttgtctatttataaagactgccattatttctccggctgttttttaggtaggacaaattcggattgaggtatataagattgaccttgctctaaatttgtcctgcctcttaaagcgacttcacgacatcaaccctgctctgacaagtaacctcttgacttgtgtaatctgaaacctacatcctttagacatttcttgacagcctatccaatttagctacaatcagaatagagttcgtttttctgtacatcgccaacgctgcaagaagttgggggctgttagacttctttccactctccgtttcaatgtactcagcaagtataggtttatgctttacatcctcatcggagacatcatctgcgaaggttagattgtcggcaatcttggcagcaacactcattaactcctttttattgaacccgaacgccttcactttcggtttaaaccaaaggtaaaccgccccattcggagaataaaaaaaggagctacattttactgtaactccttgattctcatcagtcggggtagcgggattcgaacccacgaccccctgctcccaaagcaggtgcgctaaccggactgcgctacaccccgaatctgtattttagtgttgctttgtttctcaaaagcgatgcaaaggtacgacttatttttatatctgcaaacttttacgcatattttttattccccatttttacacttttcttttagagtactgattattaaatcattaatgataaaaaaaatgtttgtcatttacacagaaatttcaaggagaaacaactacccttccctatttcgctcgaaactgaaatacttcctccatgcagattcattatttgtttgcataagctaagcccgatgccggaacctgtcggtttagtagtaaagaacggaacaaatatcttatccagtacatcgggaagaataccactgccattatcagtgaccgtaagcataaatattcgcttttccatttcataatgagtagcaatgatcacctccggaatttcttgctctatacaagcttcaccggcattcttcaataagttaataagcacttgctctatttgagaacggtctaacatcaatattttgtctgcatcctctgtcctatatatataatgtatatcccggctgggaaataatttctttaaatcatccagtaattcttccattctgaccggagccagaacaggcattgacaagcgggacagtttccgatagttctctacaaatccgagcagtcctttacttctccgataaatggtctgcatcccttgcagcataataccgtaatctttctcgttcatgccattctgcacagcccgctcactcaatgtttcgcttaatgaaataatgggtgcaatagaattcattatctcgtgagtcaggacacgaatcaatttctgccaggcctctatctcattttcttcgagtacagaatgaatattcttcagatttatcagacgtaaatccactccttgagaagaatattcggtgactgtcactgccaattcctgcatgacatctccacgacagatgcgaaccgcctttacttcacccggttgaagtgatgtaataataacaggaaaagaggaattgagagaagacaattcattcaatgagtgaataggataaccgcataaatcatgaactgccgcacagttcatccaatgtaccattccactgctgtctgctaccaataaactactgtctacggtgtcgagcaatgtttcgtaatattgataacgctcttctttttccgataacttcgtcctaaactcagacactaccttgtttatttcttcggcaagcaactgctcggaacgcgacttatgccggactgaaaagctcaaagaaaaatcggaatatcggataccctctatcatgcgggctaccataagagttgttttctgttgccattgacatacatacaagatgatgcctagaacaatcaacaatgaaaatagtaaacagaaatagagttcatgccggaaaaacagataggcagcaacagatgctgccgccaataacagcatgagcaacacaatacggagtgtttgaaatcgattcataaccctaacttttctaatttacgataaagagcgtatctcgttatacccaaatattcggcagcacggctcaaattaccctcactgcgtttcatggcacgctcaatggcatggcgctccaattgttccaagttcaagatttcatcagtatccacctttttttcgggctgtggctgcaacataaagttagcgggtttcaacaaagaagaatccgacaaaatcacggcacgttcaatggcatgctgcaattcgcgtacattgcccggccaatgatagcgcatcagcttttgcttcgcctcccggctgagcccgtttatctctttcttgtatttatgaatgtaacgttgcaaaaaatagtctgccaaaagaaggacatcctcgcctctgtcacgcaagggaggtatatgaatctcaatggtattgatacgataaagcaaatcctgacggaagtttccctcttccaccatccggtgaatgtttacattggtggcactaatcaaacgaacatcaataggaatcgtgcttgtagtgcccaaacgcgaaatctgcctcttctctatcgctgtcagcagcttggattgcataggcagcgaaagatttcctatttcatccagaaagagggtccctcccgaagccacttccatgcgtcctgcctttgccttgcgagcatctgtaaatgcccccttctcataaccgaagagttcgctctcaaaaagggtttcaggaatgcttcccaagtcaatcgttataaaaggagactccctgcggggagaataatgacggagcgaacgcgccaccaagtcctttcccgttccattctcacctaatattaatatattggcatctgtatccgacaacttccggatggtgtcaaacacattctgcattgcctccgaatggccaatcatattggggaccgtttcatcttgtccgctcaatgccaccacctgctctttcagttgctttatctccttacgtgaatcccgcaacttaatggctgaagataaagtagccaataacttttccttttcccaaggcttagggataaaatcaatcgctcccgccttgatagcccttactgctttgtctgtatccgcataagccgtcatgaacaatacaatcgcctgcggatctaacttcaaaatctgttccaggcaatcaaaaccttcctgcccactgatggcatcacggcggaaattcatatcgagcagaatgacatccggctgaaaggtagtcataaaaaattcgatacgggccggttgggtagtgactttcaccttctccacataaggctccaataaaagattcagtgcaaaaagcacgtcttcattatcatctatgataagtatttttcctctgttttccattatctctcttttatcatgcaggaaatatcttttcctgcgagagcaaagatacggctttttaagatgcgctgtatgtgcgtatccgcactatttttgtgcgaatgcgcacgcgcccataagcatgagctcacatacaagtctttggtaaacagagaaatggcattatggcacgcattttgataattagaaagcataaaacaaataacatgaaacgatattatattttagctttttatatcctattggttgcaggaacagccacagcacaagaagaaacaatcagcctcacactgcagcaggccattgaaatcgcacaggaacattcgccgcaagcccaagcagcacgacacacttatcgtgctgcttactggaactaccgcttcttccgtgcaaactatttgccgtccgttacgttgagttcatcccccaaccttaaccgggaaatcaataagattacccagccggacggcaccaaccagtttgtcaaacagaaccaactgagcacagatctgagtttgaaaataaatcagaatgtgtggttcaccggtggcaacttctttatcaagaccactacccaacgcattgatgaatttgaaaatgacctcacggcttacaatacccaaccaatcgttgtcggttatgagcagtcccttttcggctataattccctgaaatggaaccgccgcatagaacccatccgctatcgtgaagcacgcaagacatactccgaagccttggaattagtctcttcccaaaccagcaccctgttcttcaatctggcaacagcacaaaccaatctcgatatcgccacttccaaccatgcatcggccgacaccctgtatagatatgccgaaggaagatataacataggcaccattaatgaaaatgaaatgctccaactcgagataaacaaactcacggaagaaaccaatgtaatgaatgcccgcatcgaagtggaagatcaaatgcaaaccttacgttcctttctgggtataaaccgcgaagtcaacttgagggtcatccccgatgatgaaattcccaatttcgagattcccatgcaggaggcactgcatctggcattcaagaacagtcccgaacctgaaacatacgagcgtctgaaaatggaaagccgcagcgaactggcttctgccaaagccaatgccggactaaaagcagatctatatgttcagttcggtttgtcacagacaggaaacaaacttgccgatacttaccgcgacccattgaagcaacaatatgccagcatcggcatctctctgcccattctggactggggacggggtaaaggacgagtacgggtggcccggtctaacgtcgacttggtaaacacacaggcagaacaggctctaaaggattttgaattgaacgtctgcaagatggtacgccaattcaacttgcaagcctatcgggtagccgtcgctttcaagaccgacaagacagccgaaaggcgacatgaagtggcaaagcgattgtacattctcggaaaatccaccatactagacctcaatgcttccattaccgaaaaagacagggcaaggcgtgattatatcaccgccctgaaaacatattggagtctgtactatggaataaggagcatgacaggatacgattttcagaaccattgcccgatagaggaaagcctgccatacaagtaaacccgaaagacaacatgccgtgcatacggaaagaaccggaaacgaacaaataaataaaaactatggatattaaaattgaaaagaaaccgtggtacatacgccatcgttattatctgctgggaggtacagcctttgtcatcttcctgatttatgtcatcagcctgtcattcggaccccgcaaattgcgaatcgaaaccgacaatatacaaattgctgaagtgaagaatgacaaattcatggaatacgttgatgtggaaggattagtccaacctatcctgaccatcaagataaatacccgcgaagccggcagcgtggaacgcatcatcggcgaagaaggaaccatgatggagaaaggagattccatccttgtgctcagcaatcccgatttgctgcgctctatcgaggaccaacgcgatgaatgggagaaacagcgaatcacttataaagagaaggaaattgagatggagcaaaaaagcctcacgctgaaacaacagactctgcagacgcaatatgaaatgaaccgcctgaccaaaagtttcgctttggacaaagaagaatacaagatgggtattaaaagcaaagcccaactggaagtttcggaagacgaatataattataaactgcaaaacagtgcccttcagatggaaagtctccgtcacgattcggctgtgacgctcatccgaaaggatttgctgaagaatgacctcgaacgcgaacaaaagaaatttacgcgttcactggaacggatgaataatctggtggtcacagcaccgattgcaggacaactcagtttcgtgaaagtaactccggggcaacaggtcgcatcgggcgaaagcatagccgaaatcaaagtgctcgaccaatataagattcacacctcgcttagcgaatattacatcgaccgcatcactaccggtctgcctgccaccatcaattaccaagggaaacgttatccattaaaaattacaaaagtagtacccgaagttaaagaccgcatgtttgatgtagatcttattttcaccggagaaatgcctgacaatgtgcgtgttggcaagagtttcagggtacagatagagttaggacaacccgaacaggccatcgtcattccacgcggaaatttctatcaagtcaccggcgggcaatgggtttataaagtaaatgcctcgaagaccaaagccatcaaagtgcctttgactataggacgccaaaacccacaacagtacgagataacagaaggattacagcccggagaattggtagttgtcacaggatatgatacctttggcgacgcagaagaactgatattgaaataaaagcacgcaaaatgaaaacactgaaatatgccggacgctttctgatgcgttcaaaatcatatacaatcattaatctcctgggactggcgttcagcctggcctgctgcattgtcctgatgcggtatatccaccgggaactgactgtggactcgcattgcatcgacccgcaacacattatcatcccgttgcgggacatcgacggaaacgttcaccccggaagtccggaagaaggctggtcggacacagattcagcctacatcccggaaaataaaatcgtagaacaatgccgcttgcaggcacagcaaaaagacaatgtaaagtacaagaacagtcattatgcaatgaacataatggccgtcgactctacattctttcactttttccgttaccccgtattgacgggagaggcacgactgacagcccccgacgatgctgtcatcacccggcagtatgcccgccggctgtttgggaaagaaaatccggtagggaaagtcgtggagtattatgggaaagacgtcattatccgcggagtgatagatgaaccgggatgtaagaccttacttcggtttgacatgctcgtgtcatacaacttggtaaagcaatggcagcgaatggatatatcgctgaagcgtgtgctgcccggagtggacctggacgagataaaccaagtcagcaacgtatttaagaaagacaaaaatggcaacagcatacgttggaaattcataccttgggaagacttctattgggaaaacgctatcgggcatgatgacgattacgactccatcatgcaattcgggaatcacacacatctgtatattctttcgggcgtagctatcttattgttgttggtagggatattgaacttcatcaatatatatatggtattcatgatgaaacgttccaaagaatatggagttaaaaaggtattcggcttgcaacgcttgccgctatttctgcaaatctggttggaaaaccaactcctggccgttgtcgcattgctgacggcatggctgttggtggaagccagccagattcctgtcagccaactgatgggtgagcgaatcggctactctgcattcgattggcagatatcattgggcttcttggtcttattgcctttggttacgtccgtctatccgtatatcaaatacaattacctgtctcccattgcgtccatccgttcgattgcatcgaatcgccaatccatcactatccgcatggcattcctgtttttgcaatacatcatcaccatattgctgcttgtcttgtcgctctattttggcaaacagttgaactttttactatccacccctcccggatatcggacggaaggcatcctcagagccgaattgttccacgagaacaacaatcatctcgtgcgagaagaagagaccgaccgaaacaagcgtgctgcccgatatagttatatcaaacaacaactgaacgaatgtccctacattgagatgtggatgaactcacatccttccatattaagaggaagttccttctgcacattgctgaatgataaagatacacgtcagaatatgctcacgctgtttccttctcccaactttttccatttatatgatttgaaggtgctggagggagagattccgcaaaagtttgaaagctggagtgactataaaatcattctgaataaagcggcgatgaaagcgatgggatatgcccgaatggaggatgcttttgtacgaagcgaatcaccgctttggataacattcagaaatggggaaatggaagagggagggaccaaactaatgcccgtggtagctgtgatagatgactattatcccgcccatctcacccaaggagtaaagccgatggcatttgttgtcggaaaggaagacgtcagcggtgacttcataatagccaccaagcccggtaaggagaaagaagtgatggagctccttagaaaaatagaaaaagaagtatacaacacggaagagttcaaccattcctggcttacggatgaagtcagcgacttatactccgaagatagagaaacggctcatatttactctgtctttgctttgatagccattgctatctcttgtctaggcctgttcggattatccctgttcgacatccggcagcgttatcgcgaaatagctatccgcaaagtgaacggagccggcatgaaagatctttatctgttgcttttccgtaaatatatcaaggtgataggcggtgcatttatagtagctgtacctctctcctattatctcatacatatttatacgaggacattcatcatgaaagctcctgtcggcatcggcatctatttcattgctttattggtaatcctccttatttcattgggaaccctgatatggcagatacacaaagccgccaacatagcccctgcaaaaatcataaaatcagaataatcaatcataaattaagactatgcttcaacactatataaaaacggcctttcgccatctgttaaaatacaagacacagaacctgatatccattctcgggttatctgtaggcattttatgctttagcatctgcctctattgcagccggttcatctactctgtcgaccaatgcttcaccaataaagaacgcattgccaatgtaaacctctatacgccggacggcgacatctattcgggtattcccgccaatctgatagagagcctgcgccaaacaccagttgacgaagcagaagactacaccttcgttggctatccccgtccgcgcagttacaatgtagaaacgcccgaaggaaaggagttgccctacgaagacttatacaccatggaggtagattcttcctataacaaagtattcacaccccaaatagtgcaaggttcatgggaaacggcttcgcataccccaaattccgtaatactgacccgctcacttgcgcgaaaaatattcggcaatgatgagagtccgatagggaaacggatgatatcgacacaacgattgtccacctcaccctccaccacgccacgaacaggaggcatctcctacaccatacaagccgtgatagaagatatcccactcaataccagtctgagtttcctgcatcaaattgatatgcttaccctgaacgacagtgaaggtgtattgcagtttgaaagtaataataatatgacaggcggcttgggattcgcccttctccgtccgagtaaaacgcctacccagctggaggcacgctttcgggcaatgaacctgaaacatacgatgttcaagaaagagaatgacgtgacagcctctccctttggaaagaatttcctcgaaaaatccatcgccccttattttgccgggattacctccgtcatcggcctgctgattttactgaccggtttgctcaacttcttccaattcctgacaggcagttacctgaaccgctcacatgagttcggcatacgcaaagcgacaggaagcggtgacagacaattgttcggactgctctttacccagaccgtattcatctcattgattgcttttctgttcaccttcagtatgatagaaatgctcagtccgttcctgtctttttcattgttcaatttcaccttgctggtggaacggaacttattactgacacagactacagaatatatggcaggtatcctcctgctgtgtttattattgtgtctgataaccgtatggcgaataaaacatatttccatacaaacaggcattcgcggcagcaaccccaaacgaagccgccacagcatacgtaatatccttttgggcattcagtttttcatctgttggctgttcgtcgtgttcacaacagctctttatctgcaagccgacaagaccggaagcaccctgtttcatacactgacagaaaaagaaaaatccgaaatcatcagtcttccattggattaccgctttatgaagaatagcgaaaaactggccttgatagaacgtatcagccgccatccttccattacagacaagctgccggcagacataaattatctgggtggcatttcgggtacaggtatgtatactgaaaaaggaaaccgggacagctatatagaagtcaacattatgaacatatcaagcaacttcttcgagtttatgaatatccccatcctgagcggacatactttggaaacaaacgaacagatggtggcagaccataaactagcggaacgcatgaagaaagatttattgggaatgactttatacaactatgaagacggatataccgtatgcggcacttgttccgatttcatagcagatacctataaccaaagtcagggattcatctttctgccctgcaacttcaatgagtatgtgggccattgctatctgaagtgtaaaccgggcagtgtggaagaagtaaaaagcttcatagaagagacattgaaagaaagttttcctccaagcatacaaccccggatttccaccttgctggatgacatacatcagacacaagccatagaaaacaagatgaaaggcattattttcttcttctcttttgtcagcctgattatcactttattgggcgtttattcagctattactctggatacggaacgcagacaaaaggaagtggctatccgcaaggtgaacggtgccggactgaaacagattatcctgttgtttgcccgtatgtacatttatctgctggcgttttccgccatcatagccttccccatctgttacgtcgtgttccagctatggaaaaatatgtatattgtgttcttcaatgacggaccactgttttggacttctatctttatgggagtagccgccattacgatactgaccattattttccgtattctgaagattgcaaagactaatcctgccgaagttattaaaaacgaataaaaacgactgcaacaatgataacacattatttaaaagtagctttaagaaatctgctaaaatacaaagctcacagctttatatccgctatctgtctggcaataggcatcacctgtttctgtctgacgaattattttattgatattgtaaccgaacaaacagatttgccggattacgagcgtcgcatcagcctggcctgctgttcggaggataccgcagccgacatctattggaaattggatgacatccgttatctggatgaacaatccataacaggcatggacagccttgtaacagcttcttttcctcgcaatacagaaatcacggtcatcgacaagaaccagcaagaactgcctttcatcatcaaataccaatgtgtttcctcttccttcttcccctataaggtcatccgtccggtcagtggaaaagggaaactcgatgcccccgatgaagtcattatttcccaagagttcgcccacaaagcgtttgggaaagaagacccgacaggcatgatcatccatctcgtgccaacgtataaagagtatcccgaacagataaaggattacaagattgtcggtgtagttaccggccaagacatcgattgctattttcccttatccatggatccgtatgcatcattcagtgtcggtactttcctcatgggagaaaccactctggaaaacctgaacaagcaactgaaacaaacaacttggcagcgtggggaactgaatgtacatgcatacgccagcctgaatgcggcacgcaatgatgatttgcaaagaaacatcaccatgctgcttttccgctttgtcggttctcttatcctgttgtcgggacttatcaatttcctgaaattcatcatccaaatgttttataaccggcaacgtgagctggcactgcgcaaatgtcttgggtcgaatatcaagggactgttctcgctgctctttgccgaaatattctggatgctgtccgttgctttccttctttcattaatcataacagaggttgtagtatctttggcatatgtctatatacctcaagaagacatgatttccctgcctatgccaaagatatacggcatgcaactgggactgtacatggtgttgctgttggtatgtatgtccgtcatactgtaccccattcaccggttgcgacaattgagcatcattcattatatcgtgcaaaaacgggaacggcacgtgtttcgcaacatcatgataagtgtacaattggctatctccattttctttgtagggggcgtattcggaatcacactcatctttaacgatatgttcgacaaaatgtacagcccgttatcttctgaggaagagaaacagattgtatctctgtcggtaaacagcattcgtatgcggcagaacatggatgccattctttcggatatcgaccgtctgcccgatatcacggaccggatatccctttcccgctccttcgacatccaagcattcacctatatgaattacatcaaaaacggccgaccccaaggacaagtgctcatggctaccggagatccgcactattttgagttcttcaagattccgatggaaggaaaactagtggacaagaatgaccggggaacggtgtacgtcagcgagcagtttaaagaacaattacaaaaagacagcatagaaggcagcgtcacgctgagcggagatgaatatcgcatagccggtactttccgtgcattatataaggaaggcggacaacgcaatctgtccggttccgtatttttagcagacccctatccttccgcttattacttcaagacctccggctccgacgctacctcaaacgtaatcaaagagataacggaaatatgccgccgctatgtacctgctacacttccactggatattcacgatttcagtgactccaagcaaaccgtcatgggcgctgtaaacctgatgcggagtgcattcatgttgctggccattgtcagcctgctgctggtgatactcagcatttattccgccatctccatggatacggtcagccggcagaaggaagtagccattcgaaaaataaacggagccacacctaaggtcatcgccctgttgttcggcaaaacctacttaattatttatgttctcactttttgctgcgtctatcccatattaagactgactttggcagagttggccgcagacactactcttgggaatatttatagctgggacaaaggcatgctactgttccttgccatcgccctgctgatattcttggtaacggcttacaaaatatatgagatgatgcacctgaacccggcaaatatcgtaaaaaaggaataaaagaaacgttcatcgtgcgctatcgcacacgaatagtgcaaaagcgcacgatgaacatacactaaggcattccgtatagctcttattatcaaccaaatacatttcaggcacagttattgtatattacaataaagaacaaacacttaaaaaaccgcttttatgattaaacatctcttgaccattaccctccgcaacatgaccaaacagaaagtaaggagcatcatatccatactttgcatcacggcagggctgctatgtttcagcgtttgccattattatagcaccatcatgagccgaggtaataaattcttggacacctatgaacgcatggcagtcattcggggcaaaaacaatcccaacatgtacataggattcagtcctgacaagataaaaggattgggtaacgaagagatactgggaatggcattcttcactaatggaactactaattttgaaacacaatcggatgccgtctatcgtgtttctaccactttctgtaaccatgactattttctggttttccctccaaaactcattgaaggaagcctgaaagacttcgacaaacgaccggacatcattgtcgtgaccagaaacttcatccgaaaatatgccgatgcaggcactaccatcggttcttccgtcaccatcaataaaaaagtttataccataggagccatcatagaatcttatccggccggcatgaataactacatcacctcgtatgatttatttgtcccgtcccctgaatcatacggtgataaaatactgttactcagaaatccttcggatatagagactgtgaacaagcggttggcattgcttgactgggagggctaccgagcagaacctcaatgctatctgatgagccaactcccccacagagcgggtatggaattgtatatcagcatcatcggattgattatcctgattgttgcactgactaattatttttcattcagcatcagttcttttgtcaaccgcacacgcgaaataaccctcagacaatgcctgggaggaaagagcaacaacatcttcggattgttattcattgagcaattcatcattctgactttcagttgcattcttacacttgccttgtccgaaagcctgttaccggctttcatcaacagcctgagctatgacatccggcgggaattggaaatcgacattccttttctgttagcaagcgaactaaaatatacggttctcatcctgggagcctcattccttctgtgctatgtgtctgtcaccagaatcatccgccatatacaccgcaaggggctaagcggacgagccggcagagggaagcatctgctgcgcaatatctcgctggggtcacaattcttcttctcctttcttttccttttcggaattgcaggaatatatatgcaaatgcaaagctattccagcagcaccactcccctattaacagatgacgaaaaggaaaacctcattatcattcccacctactcgtatgacaacaaattaaataaggagctaacagaagtttgtgactactttcgtgctaaaagttggtgcgaatcattatctttattctgttttaatacgatgaatataggaaagaaatacgtcatcgtccatcaagtgactgaagaatatctgaaccagatgaaaatagagaagcaccacaaaccgggagaaaaatttgcttatatcacacctaccatcgatactgagataagaagtgacagcagtttccaaaccatccggttcagagaagaattggaataccccatcaagggacagtgccaagtattccctcaaccccaatacgggacttcttatttgacagtacttccttttgaaaaaggatatgaaccggacaacatcatcttacagttgaaagagggtgcgaaccgcaagcaagccctgcaggaaataaaagagaaaataaatccttattatccggcaaatgccacatatgaagcaacaacgctttatgacaatcaggtagaaggtttgaatgtcttgcgaaatctgttcatcgtctgtgccatcatatcactgctaattaccattttgggaatctaccattccatacagatagatacggaacgccgacaaaaagaagtagccatccgaaaagtcaatggagcccacatcagcgatatttattggctctttggcaaaagctatgtaatgctttatctggtggcaatgatattggccgtaccgatatgcctctttctgatgattatggcagacagcatgataaagttcgactacaggcatccgatgctatggagtattccaatgcttgttgccgccatggtcatcctgctgaccatcagttggcgcatttacaggatagcccgcatcaatccggcagaaattatcaaaaacgaatgatataataacatttaaaaatagaacaatgatgattaagacagtaaacttacagaaaatcttcaaaacagaagaagttgagacatgggcattgaataatgtcagtctggaaattaaagaaggcgagttcgtcgccattatgggtccttcgggttgtggcaagtctaccttattgaatattctcggattattggacaatccgtcgggaggcgaatactacctgaacggcacagatgtgtctaaatttaccgaagcgcagcgtaccaaccttcgtaaaggtgtcatcggtttcgtttttcagagtttcaacctgatagacgaattaaacgtttacgaaaatatcgagctgcccctgctttacatgggcattccggcttccgaacgtaagaaacgggtggaagaagccatgaaccgaatggcaatcgcccatcgtgtaaagcactttccgcaacaactttccggtggtcagcaacaacgtgtagccattgcccgtgccgtagtagccaatcccaaactaatccttgccgatgagcctaccggaaacttggattcaaagaatggcaaggaagtgatggaactgttgactgaactgaacaaggaaggaacaaccatcgtaatggttacacactcccaacatgattcgggctatgcgggaagaaccatcaacctgtttgacgggcaggtagtaaacgaggtaaaaatctagaccgcatttttcaggaacgaatggcacggagttcacggaacaaaaaaaggaatccgtgtatccgtgcaattctgtatccaaaagaaagtgtatgaaaagaagcactgtcagaagggaaagcctccaatgatttaatcttaaatgttctgaacctaaaagatacaaagaaatgaacaccattgccatctttaaaatcatcttccgcggttggtggagaaataaactgtttattctcatctccctcatcagtctgacagtgggactcggatgtaccaacctgcttgtcactttctttattcacgagtataacatcgaacagcagacgcccgaccgccatctcatcttcgcactgcgacaagactctccgatggaagaaggtgtaaaagtatcctacgtcaatgcgaacaccgccgaacaaataaagggaaaatatgctgaaatcacagacatgctacgcctgaatgggatgtacgcggacatctgtaaatacaacggaataaaatatgagcacccgttatttatctgtgcagattccacattaaataagttctttcactacaccaccctggaaggtaatctaagcacagtcttgacaacaccggacaaaatcgccatcagcgaaacctttgcccgtaaactatttcacggtcatagcggaataggagaaatgattgagattattgacgcagatggtaagacacaaaaatatgaagtaggtgctattctgaaagaacgcccacaatcattcctgcatttcgacttgttaaccggcataacaggagaattttggggaggcccaactcttctaaagttacaccccggtgcttccgcatcgctcttacaagagaaaataagaaaggataaaataccgactctcactcccggaagtacacaatattatgtagatgctctcaaaaacctgtattttaataccaacaagaacagcaagcaacaagagcttccctatttccagcaaagcgacgtacctttactctacatcggcctgatttcggccctgctggtacttgccattgcctgtttcaactataccaacctgagcctgtcacgtaccctgcaacagataaaaatgatacatatcgaaaaactgatgggagctcaactgaaggaaatccgcagacaattattctacgatgcgacgctcaccgtactattgtcatttctcttttccttgctgcttatcaatgacttactaccgtggttcaatgaattactgtcggcgcatctatccctttctttctttttcagctggcaagtcttgccattgcttttagcatttgtttctgccatggcagtgatacccggcttatatatcagccggaaactttcccgccaaaccttgagcgaatacagccacaattacaccggaagaagaaagcagcaacagatatggatactagtcaccctgcaattcattttttctataggattagtttatgccacagcaatggcacaagctcaaatgggtttgttgaaatcccgtgcctgccgctatgaaaataccatcgagctaaatgggaaaagtcccttctataaagaactgaaaaacatcaacggaatagaatcaatatccttatccatgagctctgtactgaatgcgtggatgcacgagcttcccatgcagcaaccggacggcagcgtgaaacattattatacaatacaaattccaacagacactgcattcctctcaaccatgcacatacgccagctggcgggtgtatcaccggctaaagcatatcaggaatactctcatccggtatttatcaacgagagctatgcccgcatattgaacattgatgcttccaaaataggacataacctccgtgaatttgatacattttccgatagcctgagcatattggcaggtatcatagaaaacttccctttcaattcactggaagaagaaatcgcaggacaaaaaatctcttttgcacccgaaagcagcctgaccagagcaggtatgtttatacaagccagactacaccccgaaacacgtcatgaaacgttggcacaaatcaaggagttatgggagaaaatgtatgacggaagagagtttcagtacacagacatgcaccaacagtttatgcaacggaacaagataattacgactctgtccaaaatcttgataagctactcactcatagcaatggtacttacctgtttcggactgttcggcatttcatggtatgctgtccgccaccgcacccgtgaaatagccatccgcaaagtgcatggtgccttaaaccggcaaatagcatgggcattgaaccgctcttttctatggcaaatcctgatagcatacaccattgccataccccttgtgtggtggctcatggaacattggctggcacagtttgcttaccgggcttccgccacttggtggaatttcgtcttaccgcttgctctggtccttgtcgtcacaggcattacagtgactatacatagctatcgcgctgcccgcagcaatccgaccgaaagtctcaaaaccgaataaccacacccatgggcgttgcatcagactctctttcgcttctcctgaaaaacaacaagagagacggaaactacaatcaatgcaatgcccattgcactatatacggtaaatagctctttgaatacaaatacacctatcagtactgccgtcaacggttccagtgcaccgaagagagaagtcagcgtaggtcctgccaacttaatggcctttaccagagtaatgtttgatatggccgtcgcaggaagtgccaatccaagaatatacaaccaagtgatgccattggtttccagacggatgcctccctcccagcacatacctcccaagaagaaaaacaaagcacccaatcccatcacatagcaagtcaaagccgtggaatcaatatgtacagcacagcttttcctcactcctataatatagcctgcatacgaaaacacagagatacaagcagctaccaaccctaccccggtatctcctccactaaattcaatattacccgacgacagtaatgaagctcctatcaatgaaagcagtatggcagtaaatgtaacgacagatttcttttctctgcaaaaaacaatcataacaacagccactgccaaaggatacatgaaatgaataatggatgccactccgcttgctatattctgataagcaattaccagactgaatgaggtaaccgccctgaacaaacttagtccgaaaacggtcataaactccttagcccccaaccggaaattacatcctgcaaggaatccgaacagtagcaataccaccgtggctactccccaacgataagtcagcacttcaaaagaagaaaagccgacagccaataaactgatagaaaaaaaaggcgccagcccgaaagttgccgacgacactgctgcatatataattccttttaactgattcattctgtcactgtctatctggaaacagacacaaagatacgaaaagcaactcatgcacaaaagcccgcgagcgtaaatattctcagatgaggctgacacaatgacatatatacgtataggcttatgcgtacgtacgtgcagacttatacatatatacgtgaagaccgatgcgtacgtacgtatcggctcacgcatacgtatgcatatcccgactgaccagataccgaatcagacatctgctgaaaaacagatgcggctcaacaaaatattgtcaagccgcaccattaaaacaaattcttttatttcaatatgcctaatttcttaaagcattgagtcagcttatctactgcatagtcaacctgctctttggtatgagtagccatcaaagcaacacgaaccaatgtatcttggggtgcacatgcaggaggaataaccggattgataaagatcccttcatcaaaagccaatttggtcacctcgaatgtcttgtcagtatcacgcacataaagcggaatgataggactctcggtatcaccgatttcaaaaccggcctgacggaaactgtctaatgcataattggtaatcgtccacaagtttgccttacgttcgggctctgtcttcaagatgtgaagtgcttcgcgtgcggcagccgttgcagccggagtgttacttgcagagaaaatataagaacgtgaattatgacgcaaccaatttatcgtgtctttgtctgctgccacaaaaccaccgatagaggcaagtgacttagagaaagtacccataataacatctacctgatcagtcaggccgaagtggtcacatacaccgcgtccctgatgaccgaatactcccaagccgtgagcttcgtctaccatgatactggcattatacttttctttcagacggacaatttcgggcaagtttgccaagtctccttccatagagaatacaccgtcaaccacaatcagtttcaccgattcgggcttgcacttctgaagttctttttcaagagcttccatatcattgtgcttgtactttaactgagtagaaaaagaaagacgacgtccgtctacaatagaagcgtggtcacggtcatcgcaaatgatataatcattacggtctgtcagacatgaaaccacaccttcgtttaccgtaaaaccggtagaataaaccagcgcatcatccttacctacgaattctgccaattctttttctaactgaacatgaaggtcgagtgtaccattcaagaagcgtgaacctgcacaacctgtaccatatttacgggttgcagcaattgctgcttcaataattcttttgtcgtaagtcagccccatataagagttagagccaaacatcaggactttttttccgtccatgataacttccgtatcctgatggctgtctatttcacggaaataaggataaacaccctgttccatgtataactgaggcaatctgaatttacttaacttgtcttgtaataatcccatattttattatatgtggcgtaaacctcatcggtttacattaaaataaatgtatataaactcactaatacattctgtttttaaaggagttcccgtcaaaacaggctgcaaagatagtaatttctacaaagcattgttctctttttcaaaaaaaatatttagtaacctcaaaacttttatgattttcgatggttataactaacaatgtattacttttgtatctcatttgaaagctaaacgacctaaagaagtatgaccgcaaaaaaaagaattgtatttgttgtaaatcccatctcaggaacacaagggaaaaaggccatattgaaatggattgacgagcgcatagatcgtgcgctttttgattattctattgtaaaaacacaatacgccggtcatgccgttgaaattgcagctgcggctgccaaagacaatgtagacatcgtagtagccataggcggcgacggtacgattaacgaaatcggccgttcgttggtacatacaaacacggcattaggcattattccttgtggttcaggcaatggattggcacggcatttacatattccgatggatgctaaagcagctattgatttgctgaataccggtgaatgcacttgtgtggactacggtaagataaacgacatgccgtttttctgcacatgcggtgtgggcttcgatgcctttgtgagcttgaaatttgccgattccggcaaaagaggcttattgacttatctggaaaataccttgcacgaaagcctgacttacgaacccgaaacttacgaaatagagaatgaagagggaacaattaaatacaaagcattcctgattgcttgcgccaatgcatcgcagtatggcaataatgcctatattgctcctcaggcttctttgaccgacggactgatggatgtcaccattctggaaccgtttaccgtccttgatgtcccgtccttgtctttccagttattcaataaaacgattgaccaaaacagccgcattaaaaccatgcgtgccaaaaagataaagatacaccgcaccaaagaaggggtaatgcactatgacggcgatccggtgatgggaggtaaagacatcgaagtggaactcattcctcatggactgaatgtgataatctccaataaaaaaaaagaggaggaaccttttagcctcctgcaacaaatcgtagagtattttagcggtttgaagcctaaacatgaagagttgattaaacagaagtacaatcatcttttcgtattgaatcgtcatctgctcaggcgattatccaaaaaatagattacattttcaaataaaaatctttggttagcgctatatattcttcactatatatatggcgggagagttccacaaccaaacagctctccacactcaccgccggttgctttttaaattccatcaatacccgcttgggagcggcatccggctttgtctttatccatgtacgacgagacaaacacagccctccctccgaggcgattctcataaactcatccataccatctgtcggaataatgacagagaaacgccctgatggagagagtaatcttccacaactatctatcagagattcaaagtccaaaccaactgtatgacgagctatgtttctttgtccgtcaggacatttcagagaattgaaaaaataaggaggatttgacacgataacatcatatcggatatccgaattaaagcaacaaatatcatgacgttccacctctatcctaccaggccacggtgatttttccacattctctttggcctgcttcacggcatcttcatctatgtcgacagccataatatgcgcttcactgcgctgggcaagcatcagggctatcaaccctgtcccggtgccgatatccaaaatatcgcgcgcaccggacacatctgtccatgcccccaacaataccccatccgtgcctactttcatggcacaacggtcatgataaacagtaaattgtttgaatgaaaaataaaggtttggcatagctgttatattatttttttgccaaaagtagtcaattcagtctgaatacgccaaatattaggaattatttgatttaaaaaactcatttagtactcatgaattttccttattcgccaaggaatgattaactttgtccccgttttgggcaacagcccaacatttaaaaacacaactaggaagatagaattatggttaaaagaaaaaagacagaggatattttgatgaatacagatgctgatgacatctctatgctggctgaaattcaaaccgatacggatgatttatctgcaatcgaatttgagaaagaaattcctataatgcctttgcgcaatatggtcatgtttccatcggtagtcatgcctgtaactatcggacgccccagtactttgaaactggtcaacgctgcatataagaaaaaacaagcaatagccgttgtatgccaagtacaaggagacttagacgatccgggatttgccgacctgtaccatgtgggagttattgcaaaaattctccgtatttttgaaatgccgggcggtaatacgaccgttatcatgcagtcaaacggccccaaaatccatttggacaatataaccaaaaccattccttatttaaaaggaacggttacagctatcaatgagaataatgaagagcaagacagcgatgaattcaaggccctgacagacacctgcaaagacttgaccgccaaatttattgacgtttcggaaaagctcagccccgatacggtatttgctataaagaatctggacaatccggaaatcctggtcaactttatcagttcaaactttccttttaccgttgaagaaaaaatagaattactgaaatatgatgtactgaaagagcgtatgtatcgtcttattcagatactgaaccgcgaagtgcaactggccaatatcaaacaaaacatccagatacgtacccgcgaagatatcgaccgccagcaacgtgaatacttcctgcaacagcaaattaagaatattcaggatgaattgggtggcggacaagaggatgagattgatgaactgcgtcagaaaggccaatcaaaaaaatgggggaaagaggtggcagcactttttgaaaaagagctgtcaaagctagagcgtatcaattcgcagtctcccgattttaatgtgcaactcacttatttgcagacattactggctttgccttgggagtcatacaccacagacaatctgaatatcggcaacgcagaaaagaccctgaataaagaccattacggattggagaaagtaaaagaacgtatcttggaacacttggctgtactgaagttgagaggtaatatgaaatcgcctatcatttgtctttacggtcctccgggagtaggtaaaacatctttaggacgttctatagcttctgccttgaaacgtaaatatgtacgtatgtcattaggtggcgtacatgatgaagccgaaattcgaggacaccgcaaaacttatatcggtgccatgcccggccgcatcatcaaaagtctgataaaagccgaatcgtccaatccggtgattatcctggacgagatagacaaattgggtagcgaccaccgcggagatcccagctcggctatgctggaagtgcttgaccctgaacaaaacaacacgttccatgataattatctggacgttgattatgatttatccaaggtaatgtttatcgccactgccaacaacctcggaacaatccctcctcccttgctcgaccgcatggagttgattgaggtgagcggatatatcacagaggaaaaggtggaaatcgcccgtcgtcacctcgtgccgaaagaactggaaaccaacggcataaagaaaggatatgtgaagttcagcaaacaggctttggaatatatcatcgaaaattacacacgtgaaagcggtgtacgggagctggagaaaaagataaataaaatcatgcgtaagattgccttgcagtttgcacgtgatggtttcgaaaaggtgcatgaaattaagcctgacgacgtaagagaatatctgggtactcccgaatatactcgtgacaaatatcaaggcaatgactatgcaggtgtagtaaccggactggcatggacagccgtaggcggagagattttattcgtagaaaccagcttgagcaaagggaaaggcggcaaacttaccttgaccggaaacttgggtgacgtaatgaaggaatctgctatgctggccttggaatatatcaaggctcacacccagttacttaacctgaaagaagatatcttcgacaattggaacatacacgtccacgtgcccgaaggagcaatccctaaagacggcccctccgccggtattaccatggtaacttcattagcttccgctctcacccaacgcaaagtgaaagcaaatcttgccatgacgggagaaatcactttgcgcggaaaagtattgccggtaggtggtatcaaagaaaaaatactggcagccaaacgcgccggtatcaaagatatcatcttatgcgaagaaaaccgcaagaatattgaagaaatacaggcaatatacctggaaggactaactttccactatgtaaatgacattaaagaggtgttgaagcttgctttgactgatgaaaaagtaaacggtgccatagactttaatattactaatcaaacaaacgaagaaaagaaataatatgacttttgacttacaatatacagaccccaaatctaatgcccgtgccggaatcatcaccacagaccacggacagatagaaactcctattttcatgccggtaggcacattgggaacagtaaagggcgtacatttacatgagttgaaagacgatattaaggcacaaatcatattaggaaatacgtaccatttatatctgcgaccgggactggatatcattgaacgcgccggcggcttgcataagtttaacggcttcgaccgtcccatgctgaccgatagtggcggtttccaggtcttctccttgtcgggcatccgcaaaatgcgtgaggaaggtgtggagtttcgttcacacatcgatggctccaagcacatgttcacccccgaaaaggtaatggatatagaacgaaccattggagcagatattatgatggcttttgacgaatgtacaccgggcaccgccgattacgagtatgcaaagaaatccatgcaactcacccatcgctggctggaccgctgcttgaaacgtttcaacgaaacagaacccaaatacggatataagcaatcattgttccctatcgtacagggttgtgtgtatcccgacctccgcaagcaagcggcagaatttattgcatcaaagggggccgacggcaatgccatcggaggcttggctgtaggtgaaccaaccgaaaagatgtatgaaatgattgaggtagtcaatgaaatactgcctaaagacaagcctcgttatctgatgggagtcggcactccgataaatatattggaaggaattgaacgcggtgtagatatgtttgattgtgtgatgcctacccgtaacggacgaaacggaatgctttttaccaaagacggaatcatgaatatgcgtaacaagaaatgggaagatgactattcacccattgaagccgatggtgcatcgtatgtagataccatgtacagccgcgcttatctgcgccatttattccatgcacaagagttgctggccatgcaaattgcttccatccacaatttggctttctatctgtggctggtgggtgaagcacgcaaacatatcattgccggtgatttctcgacatggaagcctatgatggtaaagcgcttatccacaagattataatttatacaaaatgaagaattggttcaagaagaacataggtaagttcacgaaagacaaagagcagtcacagaccggcaacaaacgtttgcaaagcagatggctcaagagactggatatatatatcatcaagaagtttctcgggacctacttctttgccattgcattgattatttccattgcagtagtgtttgacgtgaacgagaatatcgacaggttcattaataataaggccccgctgaaagcgattgtctttgattattacatgaactttattccttatttctccaatctgctcagtccgctgtttgtctttattgccgttatcttctttacttccaaactggcggaaaactcagaaatcattgccatgttctctacgggaatgagtttcaaacgaatgatgcgtccgtatatgatttcagcagctattatttccatagtagcctatggattaggcgcatacgtcatccccaaaggtaatgtgacacgactcaattttgaagaccgctacaaaaagaaaaaaaaggtggagtatgtacgcaatgtacagatggaagtcgacagtggtgtaattgcctatattgaacgctatgagaattataacaagacgggctaccgtttctctttggacaaatttaaggataaaaaattgatatcccacctcaccgcacgcagtatcacctatgatacagccagtgtgcacaaatggattatcaagaactatatgatccgggagatggacggtatgcgtgaaaagattaccaaaggtgaccggatggacagtatcataaaaatggagccgcaagacttccttattatgaaaaaccagcagcaaacaatgaccagccctgccctgaagagctatattgacaagcagaagaaacgcggttttgccaatatcaaagagtttgaaatagaatactaccaacgcatcgccatgtcttttgccgcctttattctgaccaccatcggtgtttcactgtcttcccgtaaggttaagggaggaatgggactgaatttgggtgtaggcttggctttgagcttctcttacattctattccaaacggtttccgcaacttttgccatcaatggaaatactcctccgattgtggcggtatggatacctaatatactctacacattaatagcaatctacctatacagaaaagctcctaaataattataggagcttttccagtttttcacgccaatcttctccattagcaggctgcaatgtgacaaaaccaaattccttgcctatggagatatttgaagcaccatcatccacaaaaacagtttcggaaggattcaacgcagcatcttttatcatatattcaaagatgccccgatcaggctttacacatttcacttcataagaagcatatatcttgtccacatagtcatccaatggacggcctgctgatgtaaattccctgctacgtgcccatcccataatatatggattggtattactcagaatataaacattgtatttacgttggcgaagaatattcaaataatccaacttgtactgttccacagctgtgacaaatcctctccatcccagttctacctctttgtatgtcaattccttaccacagatctcactcagtttcagccgaaaagattctgcatcgatacgtccgtcctctatttccaggaagatacccttctggtgatacttatcaagcagattatccgcatccttcactcctatttcaacaaacttttttactgcgcggtcacggtcgatatcaataatcaccccgccaaaatcaaacacaacattctttatctgtctcatacctttttaattaattattgcaaagataagcatttgaaaaagaatagaggatgatgtaaatcaataaaaaacactatttttacctaccaaagaaaatatcaaccctcaaaaacaaaaacaaatgaaaataagaaacctgcttattcggagtatgttctgtcttttaacctttatacccaccccctctccatccgcctgccggttctctcaagaagaacaaaacgacaaggaacaaacaatattaagaatatggaaagccggggaaacagtcagtcggaagagtatagtacagtttggaacagccaattgttttaaaatacaaaagattgacgacaccctcttcaaaagaatctatggaaagtcctataaaacgaactgtaccgtaccgaaagaagaattacgctatctgaaggtgctccattataacctgaaaggagaaatatgccttggcgaactggtctgcaacaaagcaataagcaatgatttaatcgaaatattccaggctttgtataaagcacgatatcccattgaacgaatggtattaattgatgaatataacgcagaagacaatcggtccatggaagccaacaactcctcctgcttcaatttccgtcttgtgccgggcacccggaaactatccaatcacagtaaggggttggcaatagatatcaacccgctttataatccttatgtcaagaccaataagaacggaaaaatcattatatctcccgaaaaagggaaaaaatatgccgacagaaaacaatcctttccttacaaaatagacaagaatgatttatgctacaaggagttcattaaacacggcttcatttggggaggtgcctggaagagtttgaaagactaccagcactttgaaaaagtacgtcagtaactctcaaaaggaaatggatgaaagaattttcaaaaaagaactaagtcttttccaaaaaggccatggagtttttaaaaaagctcttgttctttttaaagaacgtccttgtctttttgaaggtgcctgatttcacgttagtatgtataaccccatgagacgtatgtgtaaaagcatgtttctgacacggaacaagacaataacagaaaaataaaaaaggggttgtgcctaaacgttgatgatactgtcattttgcctgtaggggcgaggtttgatagaccatttagtttgggcacacaccctatcatttttgttgtattttttgtttttccttacggaaactctcttcttagtttaaataagaagaaagttgggatggagtgatgtccttcgctacaatgacaccgtttttatccaaaagaaaattcttaaaccctttattcaaacgataagttttaaataaatcggaagaattacctgccagttcaacaaaacaattagatgtcgaaatccggtcttttttaatggtttcgttaaatattgatttaaattcatcaaacgaaacagaaaccatttccacattatcagcctgctctattgcatgattcaaggtggcgttctgcactctcgaaggagcatcatagctggcccaaaaactaagcaacacgtatttacctctcaaatcctttaagtcaatcagttgcttttcgccacagatggtaaaagtcggagccttatctcctatcgtcaatccttctgtcggcgtgtctttccctacaaatgagaacgaaatcaaggaactaatgattaatacaacaaaaatccactttacatttttaatcatgtaattcggttttggttaatactatccgagactgcccttaaacagtaatttctccccggaacattgtcttttggcctgataatcaaagccattatatttagaaatccgtggcaaaggtaaggagtttttatgccaactccaaggaatcacatcaaaaaatatgttatatagcataaattcatccattccatcgagaaaaaagaatccccaaaagatagcttgataggattaaattgcgtacttttgcaatctgtaaatagcaacattttatgtatggatacaagtactgaacttattttaattcgtatcaccggtttggacaggccgggactgacagcttccattacggaaatactttcaaaatatgatgttaccattttggatataggccaagcagatattcacagcactctttcattgggtattttatttaaaagccgggaaaaagattcgggtaatatcatgaaagatttgctatttaatgcatcctctttgggaatcaccatccgtttttaccccattacggtagaagaatacgaagaatgggtaggaatgcaaggaaagaaccgctatatcctgaccttgctgggacgtaaactttctgcaaaacaaattgcagccgtcacgcgaatcattgcagaacaaggtctgaatatagatgctatcaaacgcttaacaggtcgcgttcctttggatgaacgaaaagcaagtgtacgtgcctgtattgagttttctgttcgtggcactccccgggaccgagaggagatgcagcgggaactgatgaaactcagcagcgagttggaaatggatttttctttccaattagacaatatgtaccgccgtatgcgtcgcctgatctgttttgatatggattctacacttatccagacagaatgtatcgacgaactggcagaacgtgccggcgtgggtgacaaagtaagagaaataaccgaacgcgccatgcgtggtgaaatagactttaccgagagtttcaccgaacgcgtagctctgctgaaaggcttggatgaaagtgtaatgcgtgaaattgccgaaaacctgcccattacggaaggggtggaaagactcatgttcgtattaaaacgatatggctataaaatagctatactttcgggtggattcacctatttcggcaactacctgaaacaaaaatacggcattgattatgtttatgccaatgaactggaaatagtagacggtaaattgaccggccgctatttgggagacgtagtagatggaaagcgtaaagcagaattattaaaactgattgcacaagtagagaaagtagatattgcacaaacaatagccgtaggcgacggtgccaatgatttgcccatgttgtctactgccggactaggcattgcattccatgcaaaacctaaagtggtggcaaatgccaaacagtccattaataccatcgggctggatggggtgctttatttccttggctttaaagattcttatttggaagaacgcggcaaactgtaagaaagatagtataaaatatatatatgaaattttcagaattaaatttagaagagagtgtgctccaggcattggaagccatgagatttgaggagtgtactcccgtacaagaacatacaattcctatcatccttgaaggaaaggatttgataggagtagcacaaaccggtaccggtaaaacagcggcatatctactccccatcttaaatcaattaagtaagggaggttatcccgaagatgccatcaattgtattatcatggcacccacacgcgaactggcgcagcagatagaccaacaaatggaaggtttttcttattttatgccggcatccagcgtagctgtatacggaggaaacgatggaatacgctttgaacaagagaaaaaaggactgactttgggagcagaagtggttattgccacccccggtcgcttaatcagccacctcagcttaggatatgtagacctttccaaagtatctttcttcattttggatgaggcagaccgcatgctggatatgggatttgcagacgacattatgcaaatagtgaaatatctcccaaaggaacgccagacaattatgttttctgccacgatgcctgtcaagatacaacagttggccaaaaccatcctgagaaacccggaagagattaaattggcggtatccaaaccggctgagaaaattatccagacagcgtatatctgttatgaaaatcagaagctgggcattatacagtcattatttcaagaccagacacctgaacgagtgattatcttcgcatcatccaaaatgaaagtgaaagaagtaactcaggctttccgccgcatgaaactcaacgtcggcgaaatgcactctgatctggaacaggcacagcgcgaccagattatgcatgatttcaagagtggaaagataaatattttgattgcaaccgatattgtttcacggggcattgacattgatgacatacgcttggtcattaattatgacgtgccgcatgacagtgaagattatgtgcaccgcatcggtcgtacagcacgtgcaaacaacgatggatgtgccataacctttgtcagtgaaaaagagcagacacaatttaagtccatcgaaaactttataggtaaggacatttataaaattccagttccggaagaattaggcgaagcacccgaatataacccccgtagtaataatggtggaaaaagaaaagggaacttcaaaggtaaaagaaacaattccacacggaaacccggaaacaacactaacggtaaaaaacagcaaaaataacagaagctgtaagttttgtattatctgtcatgggaaggatatcaaagctaaaacggcctatccaatcatcggctgcgggggcagggttcacctgcccgaaccaacggtcacgaccttgagagtaatacacaaagcaaatattgttttttttgggcgagtaaacctcgcccctattaataaaataacagcattatcaacgttttgacacgtctccgctcttatttattattcaacgagccagctcataagataatttaccatccatatctatcgtgatattgaccacataacaagaagccccatccggtatacaaacagtagcctgataatgatagccttttgcatcgacccccataaagtccatatccgaaaggattgcccatttcaagaaatcatcgggtatgacatgcttgaacatctgcctcgtgatatctttcgcaaacaaactccgttttccttcatatacacaaatatgaatgatgttgtcataatatacattatccacactcagcccctcttccgacacccccggacgcatcacttttattctggacggattgatatagacatatccgcgataacgggtattatcatacattaccaccgaatctttcttaataacttccgtataaacagggacttcctgttcatgaataaaagataaagaatcggcattattctctgccctatgcaggcgaatgacatctcctaccagtgaatgaaaccagaaaatatattctccctgtttctctatcttataattatttatccgagccccataagtagtcaacgtatcgcctataattttaaaagcgacaggagcgacggcagcgtcagcataataaatcgtatcgcccgcaacttgcagcacggcagcttccgtattgtcgtccagccaaatgccttgcaacttttctttcgcctctctatcttcttcttgcaaagcctctttgtcctgattagctccgcaagcagaaaacatcgccgccaaaacgacaatcaaatatgatttgtacatctttaacgtaattatttgcctatgcagcgataaacaaaacctaaatcctgaagttcttttgcatcatagatattacgtccatccaagattacaggctgtttcatcgttttcttaacaactccccatgccggcaaacggaattctttccattctgtcaccaacatcaatgcgtcagcatccaaaagagcatcatacatatcgcaagcatagaatatcgtatcacctattcttctctttgattcccccatcgccgccggatcgtaagcccgaaccacacaacctgccttcctcaatttctcaatcaataccagtgcaggagcctcacgcatatcatccgtgccgggcttgaatgccagtccccataaagctatggtcttgccttccaaatcaccattgaatatcttttccaatttctcaaaaagaaggcttttctgggtctcattcacctcttccacagctttcaaaacccgcatcggatatccattttgttctgccgtcttgattaacgcctttacgtctttaggaaaacaagaaccgccatagccacatcccggataaaggaacttacgaccaatgcgactgtcagaacctatcccgtcacgtaccatatttacatccgctcccaccaattcacaaagattggctatgtcattcataaaactgatacgggtagcaagcattgaattggcagcgtatttagtcatctcggcagaaggaatatccataaaaataacgcgtgaattcagcatcataaaaggcttatacagtttggtcatcagcttctttgcccgttcggattcaacacctaccaccacacgatcgggactcataaagtcatcaatggcattgccttctttcaaaaactcagggttggaagccacatcaaactctatagatacccctctcttatccagttcagcctgaatggtatctttcactttatgcgcagttcccaccggtacggtactcttcgtcaccaccaacgtatattttttcatgttagcaccaattgttttggcaactgccagcacgtaactcaaatcagcacttccgtcttcatcaggcggtgtacctacagcactaaacacaatatctacattatcgagacagttctccaatgcagtcgtaaaatgaagacggccggcattgacattgcgttgcaccatgtcctccagtcccggttcataaatgggaataatacctttctgcagattctctatcttctcggcatttacatccacacaagttacatttacgccggtttcggcaaaacatgtaccggttacgagtccaacatatccggttcctacaattgctatattcattttattattagttagtctaactttttatacgctgcaaaattacaataaaaatatgtggcaaggacattttccttcataaaagttgcgctgaaatggaataaaaatgctatttttgcactatgattgaattggctagacatatagaaattctattactggaaaatgattgcgtcattgttcccgagttaggtggatttatagctcattatcaaccagcttattacgctgaatctgataatatctatttccctcctatgcgtaccattggcttcaatccccagttgacaatgaatgacggactgttggtgcagtcatacatgcaggtccatcatacagactttccggatgcaacccggatgattgaacaagaagtagaagaactaaaagatactttatataaagacggacatgtccaattatatggtataggcgatttgcactacacaattcataattcttacgaattccgtcccaatgaagaaggtatcctttctccttatttatacggattcagttctttatccatcagtcctttatcagaaaataattcaactattgcttcaaccaaggatatggtgctaaagccccaaaaagaaaaagcagccatccgtttcaaccgtcgctggttgggtaatgctgttgccattgccgtagcggttatcctgttctttttcctttctgtacctgtagaaaacacatacgtggataaaggcaattatgcttccttgggaacagacggattatttgaggctatccgctcacaatcgttggccaccactttggttgtaccgcaacagcaaaagactgttcaagccaaaaagacatcgggtaatacacggcagcaagcaggacacaaaagtttaaaacctgtagccgtaaaagtagaaaaagtcagttcaccgaaaacagagacttccaaacaagaaacaggtaaagaaacccctaaagcggaaaaaactgttgcccgcaagacaactcctgtaacggcaaccgcatcttctgcttctgttccggcacaaaataaagccgaagctaccacagcaaagccaaaatacttcattatagtatctagtttggcaacagctgccgatgcacaacaaacattaaacgaatataagcaaaaaggctttaaagaagcaagcatcatcgaaggaagcggacgttaccgccttgccctttatgggtttgccgacaaaaatgctgcttataagaaaatgaatgagttgaaaaaagacgaagcattcaagaatgcatggttattaagctctaaataaacagattatctcccatgaaaagagttttatgtcctaaatgtgacaattatattacctttgacgaaacaaaatataccgaaggccagtctttggtttttatatgcgagcactgcaaaaagcaattcagtatccgcatcggaaaatccaaattaaaagctacccgcaaagaggaggttcttgacgaacaagccaacaacgaagacttcggaagtatcgtggtggtggaaaatgtctttggctataaacaagtattgcctttaaaagaaggggataacctgatcggacgccgcagtaaagggaccgatgtggatatttctatcgaaacatccgaccctagcatggatcgtcgccattgcgtaatcaatgtaaaacgaaacaagcaaggagaactcatttacaccttgcgggacaatcagagcatcaccggaacatttctattaaatgacatattgggagacaaggaccgagtcagaatagaagaaggagccatcatcaccataggtgctactactcttattctgcgaacagcagaaaaatagaaattatgaaacgtattatactcatcacaggcggccaacggtcgggcaaaagttcttatgcagaaaaattagctctcagtttgtcgtccaatcctatttatatggctacctcccgcatttgggatgaagagttccgccaacgggtcatcaagcatcagaaacgccggggaccggaatggaccaacatagaggaagaaaaggaactgagccgtcatcaggtagacgggcgggtggtgctgatagattgcgtgactttatgggccacaaattactttttcgatctggattctgacgtggatctgtcactgcaagctctgaaacaagagttcgatgccttcacagcacaaaacgccacttttatttttgtgacgaacgaaataggttcaggggctgtttccgacaatcccatccagcgccgttttacggatttgcaaggttggatgaatcaatatattgcctcccaagcccatcaagtatacttaatggtatcaggcattcctgtattaataaaacaataagaccatgaaaactttccatatcgaacttcccgacttacagatacgggaagcattgatagacaaaatcaataacctgaccaaaccaaaaggttctttaggcgtactggaagagctggcattacaaatcggcctcatccaacaaaccctctctcccactctccgccatccccacaacatcctgtttgctgccgaccacggcatcgtggaagaaggtgtcagcaaatcgcctaaagaaatcacctggcaacaattgagcaacttcctccacggtggtgccggagttaactttctctgccgccaacacggattcaagctcgtactggtagatgccggagttgactatgaccttccttacgagaagggaattatcaactgtagcgtaggtcgcggtacccgaagctttctccatgccccggccatgagtcatgaagagatggagttatgtctggaacgcggtgcacaaatggtggataaggcatacgccgacggttgcaacgtaatcagttttggagaaatgggaataggcaatacttccccctcctctgtctggatgcatttatttacaggcatttctctggaacaatgcgtaggagccggcagcggactggattcggaaggcatccgtcataaatacaatatattgaaacaagcagtcgacaactatcaaggcgacggctcggcaagagacaagattgcctggtttggaggctacgaaatggtaatggctatcggcggtatgttgcgggcagccgaactgaagatgctgatattggtcgatggctttatcatgaccaactgcatccttgccgcttcccggctccacccggaggtattgccatacgccatcttcggacatcagggagacgaggcaggacacaaactgatacttgaagccctgcatgcacgccccttattaaatctgggactccggctgggtgaaggaaccggtgctgtctgtgcctatcccatcatagtctctgccgtgaccatgatgaatgagatggacaactttgcccatgcagccatcacaaaatacttttaaccatgaaactccttgccgcactcatattcttcacccggttgccattctggagaataaccgaagttcccgccgcttattttaagcgtgtggtcgattattggccttttgtcggttggctcaccggaggaataatggcaggcacgctatggatctccgcccaattccttcctatgtctacagccgtcatccttgctttactggcacgcctgtttgtcacgggtgcactgcacgaagacggtttggcagacttttgcgacggatttggaggcggcacttcgcgcgagaaaatcctttccatcatgaaagattcccatataggaacatacggtgtattgggacttctgttctacttcggactcctatggaacctgctttccaccctatcgctttccttggcatgcatggccgtagcgagcggagacgcatggagtaagttctgttccgcacagataatcaacatcttgccgtatgcacgcaaagaagaagaatcaaaagcaaaagtcatttatgaccggatgagcatttcgacatggctaccggcattcatagccggcggactcccgatgtggcttttcctgaacaggtcttattggtgggcagcccttgcacccgttgccgtctttttccttttatggcaattgctgcgcaagcgtttgcaaggatacacaggcgactgttgcggagccgctttcctgctgtgtgaactatctttctatttaataataaacctaatttataccaacttatggtagtatacctcattcgccacacttccgtagatgtccctcagggagtgtgctacggacagacagatgtccctttgaatccgacctttgaagaagaagccgcacagacttccgcccggctcaaaggccttcagtttgataaagtatatatgagtcccttaacccgctgtgtacgtctggccaccttctgcggttacccggatggcgaacgagatgaccgtatcaaggaaatcaactttggtgactgggaaatgcaacgctttgatgaaataaccgatgccaacctccagaaatggtatgccgactatcggaatgtgagggctacaaacggagagtcgtttcaggaccaataccaacgtgtagccgacttcctgaatgagcttcgccaaaagccatacaaacaggtagccatattcgcccatggaggcgtattgatcaatgcccaaatttatgccggaacagtgaaacccgaagaggctttcggcgcactgactccatacggaggaatagttaagattgagatataaatttccctgcgtttcattgcttataacggaagaaaagggtatgcttccatcagacaaagaataacccatatcaccattattccctcggcaaaccggtttacccggacagcaatacgcatatctgacgagtaaaccggccgattattattgcctataaacggtttgtaaaccatctcaccgaaataatgatgaggccccccgaaacggcaattcaatatccccgccaaagccgcttcgggataaccggaattaggacttgcatgctgattaccatatcttcccacaaacttcaataaagaaagacgaccggtagaaagtatcatcagaacagctgtcaaacgagccggaatataattggcaatatcatcgatacgggctgcccaccgaccgaactgcaaatatctttcgttcttatatcccaccatagaatccaacgtgtttatcattttatatgccaacataccgggaactcccaataacaaataccaaaacaaaggagcaattaccccatcgctcagattctctgccaaagtctctaaagccgccagcctcacctcctgatctgtcagctcggaagtatcccgtcccacaatgcgggatacctgtcttctaccctcctccaaagaatggtcggcagccataaaaaccatacgcacctcattgataagcgtagtccctgccaaacaataaaagataagaacggccgaaaccgccacgcctatccaaagattcatagcatataatccgtgtatcaataacgcagaagctccataaatgaatacaataagcacaacagccgtacatgctcctttcttcacccggtgtttccctttgttccatcgtttttcgcaaaaagaaataagtttgccaaaacctactatgggatgaggaagccaggaagggtcacctatcaacttatccaataaccaccctgccaacaatggtaggattaatacaaatatgtccatttctttatagattctatcaattcattattctcttccggagtttgtgtagcaatgcgaaaaaaatgctcgttcagcccttcaaaattggatgcatcacggataaggataccacactctcctgccaagtactccttcaaagctgcggcccgccccattcgtaactgaaccaacatatagtgtgtatccgaagcccatacctccattcctcctattgcaagcagtgcttcagccaatctgtctttttcctttagtaacaatgatatatctacatgatattctccggcatgccgaagcaaataatgtcctgcttcaatggcaagctgattgacagaccaaggcatacgctgcaaacggatttcacgcaataagatttgatttgcagtcataaaacccaaacggagtccggggacagcaaagcgcttggtcatggaatggagcagaatcacattaggatatccggcagcttccctggccgacagcagcggttttaatgtaaagaattcataagattggtctattacaaaacagcactccgtatgtttttctataaatgctttcaaaacgtctttatccaatacacttcctgtaggattattaggattgcatatccatatcaggtttgttcccgacggtatcatatccaatgcgtaaataacctgtatcttgtggtggtgaagacggcaagcatcggcatattcactgaaagtaggcatcaggatggcagaatttttccccctgaaggtttgggctatcaaataaatggcttccgtagcgccattagtcacacaaacctccttcccgtccgacagatgaagcgaatgtgccaatgcctgttctaaagaataaggctccggttcgggataactttgaatactttccatccgatgataaagatgctcacgcaaaccattatgatttacatgattatatacatttgagctaaagtttatccttatcttttgcccatatttataggcatcatctccgtgtccatcaatcatttttacacattatttggtataacaacggcagatttaagtgtttgcgcacgtgtgccgccaacttatcatattgttcttctttataggcttcataatccggactctgccgatgcagcttgtcagcataaggctccagcagaaaatcgatgaaaacctgattatcaaggataccatgaatatagcttcccatacatttcctatcgacaaaatagccatccgcttttccgtcttccaatttattcaatggagacacaggagaaccaggtacaagctcagtctctcccatgtgaatttcgtatccccggcaaactgtttcattatcccggaaatggaaagccacccggcgagttaccttctcaccttgcatggtagttatcatgggaagcaatcccaaacccggcagttgacggatatctccctctactccatcgggatcgcggacttccattcccatcatctggtatccgccacaaatccccatgaccgaagcccctttgcgatgtgcacacaagatagcttgcgccacaccattacggcgaagttcatataaatcatctaatgtacttttactgcccggaagtaatatgatatccgcttttgccagttcttccgtattgttcgtataataaagatgcacacgctcatcgcgttcaagcatattgaaatccgtgaaattagacagatgacgaagcaataccaccgccacattcacctttccttctatcgcctgcatacgtttataatccagcacaaccgaatcttcctcctcgatatgaatatccttataataaggaaccactcccaagacaggaatgccacacaactcttccatcatttttatacccggttcgaagaggcgtatgtctcccctgaacttattgacaatgatgccttttatacgtttacgatcttcaggcgtttgcagcatgaccgaaccatagacgctggcaaacacccctccacgatcaatatccgccaccaataacacatcggcaccggcataacaagccatcggcatattgaccaaatccgtatctcgcagatttatttccgaaatgctgccggctccttccataacaatggggttataacgggcagccaaacgatcgaaagcagcattgacttcttttctcagctcctcgcgtccctccttgcggaagtattcgtacgcatcacggttaccaatcggcctgccgtttaataccacctgagcggtgtggtccgaactgggtttcagcaagagcggattcatgtctgtgtgacagggcactccggctgcctcggcttgcaccgcctgtgcccgtcctatctccagcccctcgggagtggcgtaggaattcaatgccatattctgtgccttaaagggagccggacggtaaccatcttgcttgaatatgcggcacaaagcggctgtaatgatgctttttcccacatcactgcctgtccctgccagcatgatagggtgtaagttcttattcattcttcccaaagctttaatatgtcggcttctccccaatacaaatgggtatatccggctatcacattcttatatctgtacaaaggagtatttacctccattcctctgacggtaaactgttttgccaccgaaggaagtgcgtcgggctctatgatgttggagtaatggaactcatgccccttcagttccagtccgttatactctaaccgacgataccccaaatgcaacctagctcccaccattgtacagtccaatggcaagacgcccgccatagcataggccgttcccccctgacgcgccgtaagtgagcgggtcaggaacatcattccgccacattccgccaataccttccctccttcctcggcaaaagtctttatcgcttccatcagtttcttccgacggtgtaactggcgggcaaaaagttcgggatatcccccgggaagatacaataaatctgcttccggcaaatcactgccatacacaggactgaaataagtaatatgtcccagctccgccagccgagcgatattctcacgataaataaaattgaatgccgggtcgcgtgccactgctattttcagtttttttgtacggggagtgaaactctccaccccgacttcggaactgtatggcaatatataccgacatgggaaaccacgatgacaaatatttaaaagtttatcaatatccacatacttttctaccaatgctgccgcctgctctatcagtacgtccattgcgcgtttggcagtcagtgtaagtcccaaatgacgcgatggaatcttaagcccatctgtaaaagggagataacccagacactctacaccggcatcggcacacgcatctttcagataattatagtgaggtaatgaagatacctgattgaacactactccggcaatcttcacattcggatgaaaatgcttgaacccataaatcagaggagctacggaataggcagcagagcgtgcactgacaaccaatatcaccggaatgcccagcagttgcgatatctctgcactgcttccttccattcggctgtaaccgtcaaacagtcccattaccccttcggcaacacatacatcggctccctctccatacttattataaatatgctgtacatgcgtcctcgatgccatccaagtgtccaaattcaccgactcacggtcggctgccaatgtgtgaaactgagtatcaatataatcagggccacacttaaaaggctgcacccgcatgcctcgtttcttcaacgcacgcagcagtcccatcgtgaaagtcgtttttccgcttcccgaagtagcggcccctataagcaattgtggcttcatcttttcaatctatatttcaaatcgggtgcaaatataaaataaatatctaactttgtgtccgattttagcaacacaatccctttcctgactttgtttaccttcctgatacacatgaaaaactcccattaacagatatagaataatcatttaattaattatataataatggaactttttagaaatctatttgaaggataccccaacctgtggggtggcggagtagcacactccgtattgattctttcgcttgtcattgccttcggtatcatgctggggaagataaaagtggcaggcatatcattaggtgtgacatggatactttttgtaggaatcgtattcggacatttcaatctgaacctggatgagcatctgctccatttcctaaaagaattcggattgatactgttcgtctactctgtcggtctgcaagtaggaccgggcttcttctcggctttcaagaagggaggatttacgctgaacatgcttgccatgatggtcgtatttctgggagttgtcatcacggtggcactgcacttcatcaccggagtgcctatcaccacaatggtgggtatcctgtcgggagctgtcaccaatacccccggactgggagccgcacagcaggccaacagcgacttgaatggcattgatgcacccgaaatcgcactcggttatgccgtttcatacccgctgggagtggtaggctgcatcctttcactgcttgcgctgaaatatttattgcagattaagccgaagcaggaagaggcagaagcagaacgcggtttgggacatttgcaagaactgaccgtacgccccatctcattggaaatcagaaatgaagcagtaaacggaaaaacgattaaagacattaaaccgctggtaaaccgtgacttcgttatttcgcgtatccgctactgtaacggagacaagcagacagaacttgtcaactcaaatacaatctttcatctgaatgatgaaattcttatcattgccaacccgatagacgtggaggcaattaccgttttctttggcaaacaggtaaatgtggaatgggattttaaaaataagaacctgatttccagaaagattctgattaccaagcctgagctgaacggaaagactctggcacaacttaaaatccgtaatgattttggagtcagtatcacgcgtgtaaaccgttcgggagtagaccttgtcgccactccccacctgcaattgcagatgggtgaccgtgtaaagattgtcggcagtgaactgggagtggcgcaagccgaaaaaatactaggcaactcgatgaaacgattgaatcaccctaatctgattcctatctttctgggtatcgcactgggatgcatattgggcagtactccgttcatgttccccggcattccccaaccggttaagttgggactggcaggaggaccgcttatcatctctattctgataagccgcttcggacctcagtacaaactaatcacctacactaccatcagtgcgaacctgatggttcgcgagataggtatctctttatttcttgcctgcgtgggacttggtgcgggtaaaggattcattgaaacgattatcaatgaaggaggatatatatggataggttatggtgccattatcaccgtgctgcctctgctgatagtgggatttatcgggcgctatgttttcaagttgaactattatacccttatcggagtattatcgggagcaacgaccaatccgcccgctttggcttattccaatgacctcacctcatgtgacgcacctgcagtaggttatgccactgtgtatccgctcacaatgtttcttcgggtactcacggctcaattactgattctctcgctcggataagccggcacagtaacggtctattctttctgcaacacggattccgcagattggcttcggcttcatttctgcgaaatccgtgttgcttttttcctttcgagaatcccggcagtgggtattttctttcatttaattaaaatccccccaaccatttctacgaatgttttatcagtctgttaatgcgcatagcattgaaaatagccagcagagccacacccgaatctgcaaaaacagcttcccacagtgtcgccactcctaccgttcccaatgcaaggatggcaaatttcactaaaaaagccaatatgatattctgccaaatgatgcgacgcgtgtattttcctatcctgacagccgttaccagcttcgacaagctgtcgtcctgaataatcacatctgctgtctcaatcgctatatcacttcccaaacctcccatcgcaatgccaacatcgctcaatgccaacaccggtgcatcattgattccgtctcccacaaaagcgacacaatgtttctcgtccttcaacttctgaaggcgggccaccttatcggccggtaataaatcgccataagcatgccggatatccagacgatgtgcaatgttttgtaccaatgcggtcttatcccccgacaggatttcaaaatgcctgataccttgttgcttcaatcctcgaatagcttctaccgcatcatccttcagctcatcttccataacaaccacacctgcataaataccgttgcaggcacacagtatcaggctttcaggcatttcatgcaatccttccggataagctattccatacttgtccatcaacctatagttgcctgccagtatctgtttgccaccgatgtatgcttccagtccgtacccggcaatctccgtcaccgcccctaccggataaagggttgcctgctgctgttttgcatactccaccacggcttttgccatcgggtggctgctcttgctttctgccgatgcaatatatttcaggacttctgcctccgaatatattcccgcagtctctatccggcaaacgcgaaagttgcctgtagtcagtgtaccggtcttgtcaaaaacaaacgtgtctgctttcgtgatggcgtccaaataattgccccccttgaaaagaatgcctttgtgtgatgccgcaccgatgcctccaaagtaacccaatggaatactcactaccaaagcacacggacaggatatcacgaggaacaccagagaacgatacagccagctggcaaacagatagataaaggatggctgcaccaatgaataaagaaacggaagcaccggaataagaaatgcaatcccgataaccgccggagtatagtagcgggcaaccttacgcatgaacagttctgtcggtgccttgcattcggcagcttcctccaccatctccagcatacgtgccaaggtgctttggctgtaaggtttcgttacactcagccgaatggtctcatttaccggaatcatacctgccagcacttcaccggattgcctcaccgagcgcgggagactttcaccggtcaatgccgccgtgttgaatactcccacctcattttgcaacacaccgtccaaagggactttctcgcccacttttacttcaatggtttctcctgtctctaccgcttcgggcgaaacaatcgaatattggcctttacgaaagacagaagctgtgcgcggacgcatatcaagcagggcacgaatattgtcgcgtgctttgtctacggcgctatcctgcaactgctcgcctacagcataaaacaacattactgccaccccctccggatattcaccaatgcaaaaggcacctatagtagcaatcgtcatcagcataaactcactaaaatactctttcttcatcaaatgctcccatgcttcagccatgacaggaaggccaaccggcgcgactgccgccagaaaccagacaagactgacataaggcagtgcaaaccatgacgtctgtgcatattccagcagaactcccgccatcaacatcagaaacgagaagatttcattacgatactgtttcatatctattgtcttatttgttaccgacgcaaaggtaaacgaaaaaacatgcaagtaagttgcaaaaaagaaattcataaatatgattcaagaatacctaaaataaggattttaatccgcccggcaaccatatatagataaggaaagcaaaaatatgtcctgccctttgccacattgtgatgggaaatacataactttgaacactgaatatcaaacataacgatacgataatggaaaatataataaaaaagataaagcaggactatccggtctccgaccaaagcatagatttgctggtcccgtgcctgaagcctcatcgcttccccaagaaataccaattgataaaagaaggcatctattgtaaggtggcctactttatagaaaaaggaatgactcgttcctattggctggtagacggagaagaaatcacaacatctttttcatgcgaaggtaatatagtattcagcatggacgaactatattacaataagctgagcgaagagttcgtagagtcactggaagatatggaggtttatgaaatctcactcagtcatctcacccatctgttccggaccaatatcgaatgggcaaactggggaagagttatccatcaggatgaatacagacgcctgcaccgcactcataaggaacggctcaccttgcctgccaaagaacgatatgaacagatgaaaatacaatttcctgccgtatgcgaacgtgccaacttgggatatatcgcttcctatctgggaattactcttcccacactcagccgcatcagaagtaacgaaaaagagtcctgaaaagaaaacagcctgtattcaggaagattgaatttgcctctataagaataagcgttttcatcctttcgattatgcctgtctataagtcggattactacagtcttcggcaatggactgtatagtctgttgcagtgaaccgtacagtccaccgtaacggactgtacagtctgccgtaacagactgtaataatcttccgtttaaaagggcttggctgactctaagaaatggcttactctttccttggttgatgatataatatattaatccccaagaaaataaggtgacccgttattacaatagtacctactcattaccaattcttcactgaacattacccatttttgggtattgccccaccctttaactccctctaactttgcagcatcttaaaattataaaatttaaagcaaatgaagagaaaggtattattgttttctatagcctttgcaagctgtatgaccggtctatatgccgaaaacggcattgacaaagacaaagaaagcaaccgcacagaaaaaacaacgggaaagaatgctccccaaaagtcaaggcttacattgggaggctatggtgaagctgtaatgacgcgcaacttctacagtgacaatatcaaccgctactctaaagcggaggattataaagatgccaaaagtcatggacagttcgatcttcctcatgtagtcatcatgataggatatgatttcggcaaaggctggacaatgggaagcgaaatcgagtttgaacacggtggaacagagtctgccgtagaaatggaacaggaagaagtgggcgaatgggaaaaagagatagaacgtggcggtgaagttgccttggaacaattctggatacagaaatcattctgtcctgagttcaatatccgtgccggacatattatagttcctgtggggtataccaatgcccatcaccttcctaacgaattcttcactgtataccgccccgagggagagaacacaatcatgccatgcacatggcacgaaaccggtataagtatttggggacgcaccggtgactggagatatgaagccatgttgattcctgccctcaattcaatgcatttttcaaaagaccaatggataaaaaatggttcgggctccgcatttgagttcactccggccaacaattatgcagtagccatgcgtatagacaactattccgttcccggcttgcgcatgggactgagcgcctattacggccatagcttcaataatactcttcaggcagaccaaggcaaatacaaagataccaaaggagctgtaagcattgctgcattcgactttgattataagggacacaactggatagcacgcggaaacatagattacgggcacttgggagatgcagcgaccatatcaaaatataaccgcgaacagtccagcacatcgccctataagcgtactcatgtgggaaagaatgcagtggcaggcggcattgaagccggatataatgtattctcccaaatcagaaagttacgcgaatcgggagacaaactctatgtgttcggacgctatgaatattatgattcttatgtaccggtcaaaggagctacaaaatattcgtggacagaccgccaacgtatggcaataggcgttaactattatccgataaaagaaatagttgtgaaagcagagtattcacaacgcttcctgaaaagtcaatataataacgaaccgtccatttctttaggtattgcttatgcaggctattttataaaataacaataatttaatatttaattaaaagaggtatgaaaaagtttttaagatttcccctgtatgctgccatggcagcgatgatgacattcaatttcagtgcatgcagcgatgatgacgacccggacggcggtgataccgaattatctgaaaaagataaaagatatcaggctattgctgatcagtttaccaagaatacagtgattgttacatacaccggtctggctgaccagacagaagctttggttgaaaagctgaaagcactgaaagccgataaaacggatgataatgtgaaatccgtgtgtgagacattcctcaacgcacgtgcatggtgggaaaagagtgaagcattcctgtttggagcagcttccgactttggtatagatccgcacatcgattcatggccgcttgacttggatggtctgttggacgaaatgaaaaacacatctcacattacagccatggaagctgaagatgccgatgtatgggcaggtgtaaaactcggtccggagttgcttggatttcacggtatcgaatatattatctttgaagccggcagccctaaagcagtctcgaaaattaaagataaagaattgacttatgccattgccgtggcaggcgacctgcgcaacaaatgttatcaattgcagatatcatgggccggtgcagacaatgtggacgcaaaccgtgtaaccaaagtagtagacgaactggaatggaatacgactgtggcaggcggtgaaaactcgtatacacagaacatgatgctggccggacaagtgggcagtacttacaccagttggacaggagctatgcaggccatcatcgacggttgcaaaaccattgccgacgaagtaggcacctctaaaatcggaaagcctcacaccggtgaagataaaaactacatcgaatctccttacagctacaactccatcaccgacttttatgacaacatcatcagcatacagaatgcctatatgggtggtatagaaggacagcgtgatgaaagtaaatcattgcacaactatatggcatctgtaaacgccgacctggataccaaaacgatccatgccatcaccagtgcattgaccaaaataaaagcaatgaaagcaccgtttgtattaaactatacggatgactcttgccaagaggcaatggatgcctgcaaagccttggacgatgtcttaacggaagtaaaggctgaacttgccaaataaaatagcaacaccaatatatctgagaacaaacaaagaagaacatgaaaggatttttttattcaaaatatttcctgatgggactggcggtactctcgttcgccgcttgcagcgatgaagatgctccgcggcaaattaatccgccgatagaaccggttacggatgaggaatggtatgccggaggattgctgggtactaccttcaacagttcggcttctgcttacgaagaccccacccctgctgtcgagaatgccggtatgaccgacaagttcaagtatggagaatatttctttgagcgtacctatacacaaaacacgaagccgttcaacggtcttggtccactttatgtacgcaactcctgtatgtcctgccatccgggatatgggcatggaaaacgtatggaacggtatcgtgccgatgattggggaaacggttatctgctggtagtgacagaccataccgatacttatctttcttcactgaccggtatgccccaaaccaaagcaatagctccattcaaggctcccattgatgaagataaaatcaatatagaatggctcgattacacagatgaatggggtaataaattccctgacggagagacctacagcctgatttatccggaagtcaccatccctgaagatgcctattatgttccattggaagtgaatggtaagacggtagattatgccaatgtcaaggttcgtctggagtccaccatcggcatttatggtaccggattgatagatgcaattcccgatgattcactgaaagccgagtatatccgccaggaaaaagccggtgtttcactgaatcccagcttctttgccaatggcgaatgggtgaaaacctatggcaacaccactcacccgttccgttatacttatgcactgagccgtggtccgctgcaagatgcggcaggagccaatgccatttggaatattaccaatgtaacacgcagcaaccgtcgttatcattatatgacacagacttatgccaatacagcggcaaatgatcctgaagtgcaaaacaaattctatgaatattttccggattggaacaaaaccggaaatgtaaaggaagatatcataaactatctgatgaatcaagaattgccagtcgaaatgacagatgatgattatgtggactttatgatctggcacagagggcttgcagtgcctgcggcacgtaatctggatgatcccgacgtgcaaaaggggcgttcgctcttccgcgaaatcggttgtgccagctgtcaccgcccatcatggaaaaccggcaaggacaattttacagatccaagcggattcttcagtgacggagatgcacgcttgcccagatatcccgatcagaccatttggccgtatagcgattttgtacaacatcgtctgtatatggagaatgatatccgcaccggctggtgccgcaccaccccgttatggggacgtggcttatctgccatttgcaccggagccagtgaccgtctgcacgactgtcgcgcacgcaatgtaatcgaagctatcatgtggcatggaaatgcacaaagtgatgcccggtggacaattgagaagttccgtacgttaagcaaagaagaccgtgaagctgtcgtgaaattcattgaagcaatctaatttttatcacaacaagaggctgtgccacaatccggcatgcagacagaccgaatcgtaaagacagcctcttgtgatacgtcatcaaaactgaagctacatgaaactattgaaaagaattgctttctgcttattgggcatcctgctttttgtcctcaccatagctacaatactggaaaaagtaaacggtacggagtttgtgaacaatcatatttacagttccgtaccctttatcatactgtggggaagcacagcccttgcttccttactctatatgataaaaagaaaactctaccgccaatggaccacattcctactccacctttcttttatcctgatattggtgggagcatttgtcacatggatagatggcgaacaaggaaccttacaactgaaacttggagagaaaacaatgtccttcataaacaaaggaggagaaaaacgcactcttcctttcagcatctcactggaagattttgaaataatttactataaaggaacacgggcgcctatggattatgtcagccggataacagtttctaccgaaaataacagtgaaagtttagaaggagaaatatctatgaacaaaatattttcattcatgaattatcgcttttaccaatccgggtatgatgcaaacggacaagggaccgttctcagcgtctcccatgacccctatgggatagggattacttacaccggatatagcatactgctggtttccatcattctattctttcttaatcctcaaagcacattccgccaattaatgaaaagctatcgcaacaacagtcagggcataaaaaagggatgcagcatcttattcctgttgtttatctccacctttccgatgggaagccaggcaatggctgccgaccatcccttgccgaaaactctcccacgcgaaacagccggacgcttcggtgacctttatatcttgtacaacgaccgtatctgccccctgcaaactttcgcaagagattttacaatcaagttatatggcaaaccgacatatcacggccttacctctgaacaagttctgaccggctggctattctattatgacagttggaagaatgaacctgttatccgcatcaaaagcaatgaagcccggcgcttattagacataaaggggcaatatgcctcagtgaaagattttgccggtaacaccaatgagtataagttggaagatgcaatgcggcaaatccatttaggacgacagataacagacaggaaaggcatagaagaagccaatgaaaaattcaatatcatcagcatggtatgtaccggagcgcttatgaaaatatttccctatcgggatgcaaaaggaaacaccttgcaatggtatgcgcaaagtgaccggcttccccatgaaatgggaaatgaacaatggacttttacccgcaaggcaatgaattatgtccatgagcaaatcgtcatgaaaagatttgatgaagtaaaccgtttactaaataaaatcaaacaataccagcagaaagaatgtggagaagcacttccttcagcaagtaggttcaaagcagaaaaactatataaccaattcgattacagtaaacctattgccatattctgcctttgtatcggtttatttgcttttatttactattgccgttgcacggtaacagagaaaaacatctgttgcagtttagcatttatctttaatctgctgctctgctccatctttatctatttatccatgaccattgtcctgcgcggttatgtaagcaaccatcttcctctgtccaacggttttgaaacaatgcagttcatggcttggtgcacagtcttgcttactttttttctacagcgtaaattcaccctgtcagtaccatttggtttcctgttgtgcggacttacattattagtctccatgtttggcgaacagaatcctcgaatcacccaattaatgccggtcctccaatctcccctactcagcattcatgtagtagcaattatgacagcctattcattactggctttcatcatgctgaacggaataacggcagtcgttctacattactcaacagaaaattgtgagacagcaatagattttttacaaagaatcagccggctgattctttacccggccgtattcctgctcaccataggcatctttatcggagctgtctgggccaatgtatcatgggggcgctactggggttgggacccgaaagaagtgtgggcacttatcaccatgctggtttacgcgctggcactgcacccggcctctctaaaatggttccgctatccgatgttctttcatgtatttggcattgtggcgttcctcactgtattaatcacctattttggagtgaattttctgctcggaggcatgcacagttatgccaatggataaaaagaatgaaaagaagcattgccacaatgccataaaattataaatttgcaatatttaaagcatcaactatgataaactataaaaccataaataagaacgagaacgtaatggtctgctattctgaatttactcctccaaaaggcgttaccgaatatcaggtcatgatccaactgacaaaacccggacaatcttatgaagaacaactgaaattgctgttggatacctattccgatttgaaagagaatgaatttaaaaagggtactactattttcaagcgatactttctgagcgatgccgccaatcagaccgacctgcttttggcagcggaaacggaacactcggattgtgccttatccatcatagaacaggcgccctgcaatggtaccaagattgcactatgggcttttctgcaaacagaagtaagtaccaaggcgcttcctgaaggactcttcgaggtggcacacaacggctatcgtcacctttggaaaggaagagatttcaaccgtgcctctacttcggaataccagacacggctgttgctgaataactatgtgatgcagctcagtgagcagaattgcaaactggcagacaactgtatccgcacatggtttttcgtacaaaatatagatgtcaattatgcaggaatggtaaaggcacgaaatgaagtgttcctcacacaagaccttacggaaaagacacactacatagccagcaccggcatcggcggacgtcatcctgacccgcaagtgacagtgcagatggatgcgtatgccatcaacggaatacaacctgcccagatacaattcctgtatgccactacccatctgaatcccacatatgaatacggagtgagttttgaacgcgggacgtgtgtgaaatatggcgaccgcagacaggtattcatttcgggaactgccagcataaacaataaaggtgaagtggtgtacccgggtgatgtgcgtaagcaaaccaaccgaatgtgggaaaatgtggaagcactgcttaaagaagccgaatgtagctttgatgatgtatcacaagccatcatctatttgcgcgacccagcagactatactatcgttaaagaattgtttgacaataaattcccccatctgccccacgtcatggtacatgcgccggtatgccgtcccaaatggctgatagaaatggaatgtattgctgtaaagtccgataaaaatgatgagtttaaggacttttaatatgtaaaaagcaaattttcataaggggatgtcaatactaaaaaaggaagtgtgtcaaaacgtggataatgctgtcgtttggttcgtaggggcgaggttcgctcgcccgaaaacagtttgctttgtgtattaccccctcaaccaaaaaacgttatactatttccctataaggaagcatacagtttcggcatccgggcatgatgccatatataagaagcaggataaatatcttcctgttctttatcaagtatcttcttcagaatgctgcatttattctcacccgccactaagaagcaagtatgttttgcctctatcatcggttttcccgtcatgcagatacgaaccgttttattataaggattgactgatacagcataaggctcaacagccgtcaacaagtctttccggtcaggaaaaacagaagaagtatgcccgtcctctcccactcctaacaatacaaagtcaaagacaggtacttcatctacagtcggcacggtagcctttaccagagaagaatacaatatagcttcctcaccgggagcaccctcgcccactatgcggtaataatgtgaagccggcagatttatcttgccgaacaaaaggcggtcggcaagaccgaagttgctttgtgcatcggtaggcggcacacaacgctcgtccacccagtaaaaataaaggcgcgcccacggcgtgtatgccgcaaactcacgctcccacacctcaaacaataccgccggggtcgttcctccggaaagggcaatggtaaaaggacgttcgggctctttctccattgcctccaatatatgagtaatgagggtttgtgatgcctgtcggggcgatatatacaaatatttatcaggtatcataacaaacaatacagtttagaatgtgtcagattcttacaaggattagtccattcggcatggctgcgctctatgagcacgtccgcctctttcggtccccatgttccggcgggataaccataaagaggggtctccggatatttcttccagtaatccagaatcttgtcaaaatacgtccagctctcttccacggcatccgaacgggtaaacaaggtggggtcgcccgccaagctgtcttccagcaagcgaacgtaagcatcacccgtctcctgtgcattccggtcataactgtaatccatctccattgtccccatataaaaccccgaacccggcgctttcatggcgatacgctgcaagataccctcatcgggctggatacggagaatcagttcttcaccccgatagaacccttccttcatcttaaacatctgcatgggagcaggtttaaagtggacaacaatctcagtcaccttggtcggcatctgcttaccggttcggatatagaaaggcacaccttgccaacgccagttgtctatcttgaggcacatggcaacgtaggtatccgtgcgcgaatcgggatttacattcttttcttcacgataacctgcctgagtctcgccggcgacatattgaccgcggatgacattctctcgaatgtactcatcggtcagcggatgaagcgattggtacaccttaatgacttcgtttcggaaaccgtccttatcgaacttggcagggggttccatggcggtaatggcaagcaactgcatcaggtggttctgcaccatgtcgcgcaacgcacccgaaccgtcataatatccgccacgggttccgatgcccatattctcgacagcggttatctctacatagtcaatatagttacggttccagataggttcgtagatggtgcttccgaaacgtgtcaccatgatattctgcaccgtctctttcccaaggaaatgatcgatgcgatagatatcctcctccttgaagtaggtagcgtaaatcttattcaacttacgcgccgatgcaaggtcgtagccgaaaggcttctcaacaataatgcgcttcagccccggcttcttgaggatgccggcgtcatgaagatatttcggaatcagttcgtaaagcaacggcggagtagccagatagaacaggtaattcccatcattctcatattggggcgacagagctttcaaccgctcgttcagccgggaataagtaaaagcatcggcagggtccatcgactgatagtagacagtggaaagaaaatcatccaatgacgctttctccttttcatccagagaaggagacttcgccagctcctccttcagatagctgcgataggtttcatccgaataggcagtgcgggcacatcccacaatggcgaagtgcggaggaaaacgtccttcgttgtgaatcttcaccaaggcaggcatcagcttgcgccgggtgaggtcacccgatgcgccgaatataactaaaaacaaactatgtggtaaactcataaatcaaattctttttatcggttcttgttatttcttctcctgccattgttcatggaaaaactcgcctcgcggactatccacccgctcgaacgtgtgtgccccgaagtaatcgcgcatcgcctgaatcatgttggcttgcgaatgatgggtggtcagccccaggaaataattcaatgcagcagagaatacgggcacggccagtccttctttcagcatgatactcaccgatttcttccatacgggaagagcctccgccacttccaaaccgaaatgccggtcgagcaacatgtgcgacagtcccggtgcacggtgataagcctcggcaatatcgttcaggaaagcagagcggatgatgcagccggcacgccacagcaaagcgatggacgaaaggttcaagttccatttataggtgtcactcgccgtgcgcatcaatgcaaatccttgtgcataccccaccagacgagccgcataaagagtggcctccagcgcagcaacagtatcctgataattataaaccggatgattctcaacgtgcatataatgtttggccatcaacacacgcaagctcttttccgcagacagattacgtgcaaacacagcctcggcaattacatcgagaggagtattaagctgcaacgaattgataacgctccaacgccctgtacccttctgtccggcagcatccagtatgctatctatcagataacctccgccacactccttatgacggagaatagctgccgttatctcaatcaggtagctcttcagacgaccttggttccaacgctcgaacacgtcagccatctgctcattcttcagagccaacagattcttcagcgcataataggtctctgctatcaattccatgtcaccatattctataccgttgtgcaccatcttcacataatgaccggcaccgcccggacctacccactcgcaacacggactaccgtcttcggcacgggctgcaatactcttcagcatcggctgtatgaagggccatgcctcctgagcaccgcccggcatgacggatgcgccatgcaatgcaccttcttcgcctccggaaatgccgcaacctacaaaatacattcctttctcatacagttcctttacccggcgctccgtatcctcaaaattagagtttccaccatcgattataatatcacctttatgcaacaagggaagcaatctgcctgtcatttcgtctactgcagaccctgcctgcaccatgagaaatacgactttcggagtcttcagtgcatctacaaattcctccaaagtctgcgtaccgacaatgcttttgccttgcgcacgcttagctatgaaattatcaactatatgttcttctttgccgggaactgtgcgattccacacagctactttccatcctttacctgccaggttcagggccagattctgccccatcactcccagtccgatcaatccgatatctgccttttccataatttaatctttttatatttaacaaacggcagatttatttgttcaataattctatctttgtgaatatatcaatcttacattatgatgaaaaagattaaaatagggttattaccccgtattatccttgccattgcattaggtatcgcattcggcaacatcctccccggaggattggtaagaatctttgtgaccttcaacggaatcttcagtgagttcctcggttttatcatcccgctgattatcctcgggttagtaacacctgccattgccgacatcgggaaagaagcgggaaaaatgctggtagtcaccacactcatagcgtatggagcaaccttgttttcgggattcctttcctactttacaggcatcacattttttccgtcgatgattactcccggcgcttctatcgaacagataagcgaagcccatgatatcgtgccttttttcacggtagccattccacctgtcatgaatgtgatgacctcactcattcttgcttttacactgggactgggcatcgcccacttgaacaccacagcactcaaagatgtatgtaatgactttaaggatattatcattaaaaccattcaagtcatcatcctgccattactaccaatctatatcttcggcattttcttgaatatgacgcattcaggacaggttatgaatgtattatcggtcttcatcaagattatcggagttatcttcctgctgcatattttcctgctcattttccaatactccattgcggctctgtttgtccgccgcaatccgtttcgtttgttggggagaatgcttccggcttatttcactgcgttgggcacacagtcgtcggcagccaccattcctgtcaccctgcgacaaagcatcaagaacggagtgagtgaagacattgccggctttgtaatcccgctgtgcgccactattcatttatcgggtagtacactgaaaatagtggcatgcgcactggcactgatgatgatgcagggaatgcccttcgacttcccgatgtttgccgggttcatcttcatgctgggcatcacaatggtagctgcaccgggtgttccgggtggcgcaatcatggctgcactgggcatcctttcctctatgctgggcttcggcgaaagcgaacaagccctgatgatagcactctacattgcaatggatagcttcggaactgcatgtaatgtaacaggcgatggagcgatagccctgatcatcgataagtttttcggaaagaaataactatgatttaaaacaccggcatctgccaaataaagcccacagacactcgattagtcgaataattatcttctcccagtgctttagcccggtcggtaaatcgataagaacgaccggtataagccaggaagaaatgcaaattggtctccatcggataatactcaataccgcctacatacccccatgccgtacggtatttccctttttccacctcatcactgcttttataaacggaagctgtttcatacatacctttggcaaacagattccatttcggagcaaatcgatagttgacatgaagcacgtatgacatatattcggcgttaaatacattatgattcaggtcaccacctatcattcttgttatgattcccttgcggtctactccttcacgagaatacatccagtcaaaataagcatgccactgaggattgaaattgaactcattacccaaagcataataatacattttctcgccttttgtttcgttcataacagaggcagaccaccgggtcttgaatacatccatgaaattaccattccagttcaaggtgtaaaccaacggaagctttgtccgttccaagtcaccatacatctctttggaaggtccattcaggctgttcaatacttgaaactgaatttgctggtaaggattataattataggccacattcaatccggtcatgaagttgttcatgttctctatcatgtcgctgtattcgtaaatgtcaatcgggttgacatcaaactcaattcctccgtaagcagtgcattgcttgccggcaaagaacgaaaacttatcaagtttgacacctatacctgcatagtcaatactggtaggaacattgtcaatattacccgatccatcattaccacgattaagacgctgccgataacgatagctcagccaatcgttgatattacccttcatttcgatgcggagctgtttcatctcgaatgccccttgatcgaaaccggactcattccatttcatattgaagtcaccatgcatgttgagatagagattgaacttatcggttttcttttttataccggtcacctcttcaaagaggcttttatcgtccgacatgaaatcactttttgaagattgtgcatatagcgagtgtgagcctgacatggcaatggccgtcaggcataataacattatccttttcataattaagtatggtttgggttttgaaaataaatgaaaacgggagtgtttcaaaactaaaatggcctatccaaccgtcagctgtaagggcagggattgcctgcccgaagacacaaagcaaactgttttcgggcaagcgaatcttgcccctacgaactaaacgacagcattatccacgttctgacacaaccccaaacaccgggcacctgccctatgtaagtcaattaatactcgttgaagtattgctgaatcttcttccagtcatttgtctttgtcaacgcaagcatcaacaatacacgtgctttctgcggattcagttcttgagaagcaacaaactgatatttattgtcatccacttctgcatcaagagtggtaggacctgtcggaacacggctggagcgaacgaccagaatcccctgtttacgcgctttttccaacatagggaacaggttctgatgaatgttgccgtttcccacaccggcatgcacaataccctgataccccccgttgaggaacggagtcatcacatcggcatctacattggaatagctatagacaatacccactttaggcaatttatctagatttgtcacatcaaactctgacttggtagtatgacgtttcaaagactccatattatacgacacttttccattaagaacatatcccagcgcacccgaattaggagactggaaagtctgcacatctaccgtattcatcttggttgctccctgagcgcccaagatcaatccgttcattgcaatcaccactccttttcctttcgattctttggcggcagcagtaactactgcattataaaggttcaaaggaccatcggcactcattgccgtagaaggacgcatcgccccgaccaataccaccggtttatcactcttcacggtgagattcaggaaaaatgccgtttcttccatcgtatctgtcccatgagttaccacgataccatctacatcatcacgcttgagcagttcattgatacgttttgccaatgtcagccaaacggcatcattcatatcctgagaaccaatctttacaatctgttcaccggtcacattggcaatcttattcacttcgggcactgcatccagcaatgtgccgatagccacttgtccggctgtataattcgtattggtagccgaagcaccggttccggcaattgttcctcctgttgccaaaatatgaatattaggcttttgggcaactgctgcaaaggcgccgaataacaacgtcacagccagcaaactgagttttcttaatccattcataattttttctagtttaggtagttaatatattgagactataatatttgtatgagcaacagtccgataacaatcgatacaattgtggctacaagaccgggcatcataaaagaatggttcaacacccatttcccgataccggtagttcctgtacggtcaaagtttatggcagcaatcacagtcggatagttgggaataaagaaataaccgtttacggccgggaacaaggctatcagcatcattggcgaaatgcccaaagcaatgcccagaggcacaatagcgcgcacagtcgccgcctgactgtaaagcagaatagacattacaaacaatgccacaccgaaaagccacggcatctgacggacaattccttcaatagaacctgtcaattctgttatattaccattaatgaaggtatcccccatccatgcgataccgaaaatagcaatcactgcctgcatccctgccggaaatacacttccctgagttgccttgataccgtccgtgcgcgagataatcaaaatgagtgcggcagccgataacatcagaatttcaatcagtgaaggcatgtccattacttttccgtcaaacgaaggacgaagaccgggaatagaaccgaacagcacaatcagcagagtggccacaatgaagataatcacagaaagacgtgcctgaaacatattcttgacgtcattcagctccacgtgcttatcctccaacagaccttcttccatacgacgcagatactcagggtcttccatcagttccttacctactctcatcgaagcgaaagcgcctaccagcacacctatcaaggtagcaggaatagttattttcaatatatcaaacagggtaatgtcaaaaccggtaagcaacccgagaagtgccacggtagcagcagaaatagggctggccgtaatagcctgttgagatgcgattaccgcaatacccaaaggacgttcgggacggatttttgtttcagcggcaacttcggcaatcacgggaagtacagaataagctacgtgtcctgttccggcaacaaaagtaaacaaataagtcaccaacggactcagaatagtaacatgtgccgggttacggcgcagcaaacgttctgccagcttgaccataaagtccaatccgcctgccgcttgcatacaggatgcggcagatataacggcagcaatcatcaacatcacatcaatgggaggcgcagtaggctgaagtccgaagacaaaagtcaaaatagcgaggcccacacctcccatcactccaagtccgatacctcctaaacgggcacctacaataatagcggcaagtacaaatagtagttgtaataacatgattcgtttttatcgttataaaaatacatttttaattctcataacaaagatagaccaattctgttctataaaccgtaaaaaagcggagatttttcttttttttcactaccataagaagaaaaggcgtagttttgcaagtagtcagccaaacatttttccggcttaattgtttaacataaaatagttatataataataaagtaatgaacagaatctgcaatctttttggtattacatatcctattatccaagggggtatggtatggtgtagcggatggcggctggcctccgccgtgagcaatgcaggaggactcggtctgattggcgccggctccatgcaccccgaaacactccgcgaacatattcggaaatgtaaagcagccacagaaaaacctttcggagtgaatatcccgctgatgtaccccgagatagatacaatcatccaaatcgtaatcgacgaaggagtaaagattgtctttacttctgccggaaatccgaaaacatggacagaacatctccatcagcatgatataacagtagcccatgtcgtggcaagcagtaagtttgctgccaaatgtgaagaagcaggtgtagatgccattgttgccgaaggctttgaagcaggcggtcacaacggtcgtgaagaaaccactaccctatgtctgctacctgccataaaaaaaattacaaccgttccggttatggcagcaggaggcatcggctccggtgaaagtatcttggccgccatgacactgggggccgatggagtccaaataggtacacgttttgcattgaccgaagaaagttcggcacatttcacattcaaggaccgttgtctgcggctgaatgaaggcgatacccaactcacattaaaacagctttcgcctgtcagactcgtaaaaaatgaattcttcaagcaagtggaagaagcagaaacacgcggtgcatctgtagaagaattaagagaattattgggcaagggacgtgccaagaaaggtatttttgaaggagacatttacgaaggtgaagtggaaataggacaaatagcgtcttctgtacatagtctcaaaacagcagaggaagtaatcaaggaattgataaacgattttaatgcagcattaaaacgtacaaaagaaataccttcttttatcctataattaataacttgcatcgatttatatttatatccgggcagacttatctatatgcccggatatatccatgaaaacgcgatgtgttttttcaatagctattcatttcttttcaggtgcaatgagccggtaatacacatcggcaattcatctttataatgtgtcaccattatcattgttttatccctgcgccggcagaaagtctcaataatatctttcaccaaacggcggtttatcaaatcgagtccatgcaacggttcatccaatatcagtaattccgggtctttaacaaaggcacgtgccaacaaaaccaaacgttgttctccgctggaaagctgtaagaaactacgctccttcaagtctgcaataccaaaaatatccatccaccactcacaagtttccatctgttcgggacgcggacgtttataaagccccaccgaatcatgcaatccgcttgccacaatatcaatggccggtaaattctttaaataggcacgatgcatctccgggctgacatacccgatatgcttctttatttcccaaatgctctctcctgatccgcgcttacgcccgaacaaggttatatcacaggcatagctctgcggattatcagcacaaaccaaactcagcaatgtagattttccggaaccattatctccgctaagagcccacttctcaccacatttcacactccaatccaactctttcaggatagtcctttcaccgtaacggatactcactttattcaaatctaccacatggtcggtatgataaaagccatcaccataaggaagagccaagatacgttcttctttctcctttgagagcacacgttcggggacaggcttgcaaccggcaagataagctttcaacgtaattttatcaccgcacatacgattttctacaggaattacgtgcgtaatcaacgaaggtatatcatctgtctttgaaagtaccagaattacttgcagacaagtcatccgtataagttcgcaaagcaatgcatgaagttggtcacgtgtcttggcgtcaagtccgataaaaggattatccattatcagcacacgagggttactcaacaaagtcttggtcaactgaaatttacgtaactctccactcgatagcagaataatatgtttatccagcatcgtttctatgtcgaacaagtcatacaacgtttttttcagttcgggattcgtagctttcggcaaaaggtcacgaacgacaggcgtttcatccaaatcatgggtattccagcgctgttgataataataattaccgtctgcatccccataagagtccctgaaagcaatatattttatattatcatacaccatctttgagggagaaggcgagaaatcatacttcacttcgttcattaatagcggccaacgcccgataatagtatccaccaatatgctttttcctgctccgttcggacctacaatagcaatatgttcaccttcggcaagcgtcatgtttatcggctttttcatccgataaagcggatgacggacaaccccgttctcaatagcaataatattctgcatttcaatatctcattttagtcttaaacagaatacaaaggtagataaaatttaatagagcgcttaccccatccctatatttttcttgcccggaaaacattcgtcagagcatagaaaaatatgggttttagcataaaaagttaggttttttcatccttttgtcataacttcgtgcagttttttggagaaaacttatgtatatattccgttctatttacgaaatcataaataccatatccacggcaaaaacattgctgacggaaatgttcgaaaagagaaaaaccatcagtttcagatacatcgatgccttagaattattaaaagacgatgaaaatcgccttaaaatattaattgaaaaagaagtgattcaccaaaatggcaacttcttggagctggacgtgcgttttctcgatttctttgaaacgctacttgaagccaacgaagaaatcgacacagccacaattgacgaaaacatcgaatacctgcacgagctgatggattattatctgaaagaaaagatacaatcacgcaaagagagctatgtgaggaacatcaaactgacgttccagaaaatagctcgcgtaacaatacgcaatatcatgaatttgcaaaacagtatcgacaacactttcaaacatgaaccaacataccaaatcaaaatagccaagctgaagaatctggacaagaagcgcatcaatatacagaatctcattgactccaccgagcacctgattctacatgaagagcgactttttttccaacaagccaccgatgaggaattaggacgcatcttgctggaactgcgtcaggagttgcaattgtctgctcacagcctcatacgggcgcaacaggatataatcaactatctgaaccaaataaagaatcaagtaatattggtagagaaaatccgaaaagtaaagtatctgcaagaccagtttgaactgcgtgcccgaagcaacctggcagaagtaatggagaatgaacattccgtcttgttggaaggctgtacacagacttcattcaaactatcgcccgaatatctggcaagtgacgaagcacgccccattatccttagaatcctgagcaaccggaaaacccgggagcatatccgcaagaatgaagcgggtgcttttagtgaggaagacatgaaagcgcaagccatgtatgaggaagtggtaaacttggaagaagtggttaaaagttttctacaatcgggtgcagaagcacaatggaaaaacgagcaacccaaagacttgtttacctttctgctccattattcttttcaacgtgaagtaaacgaggaagaatgcaccacactgttttgccaaatagtgtcgctctacgaagacaaattagaaataagcgatgatttcggacgatacaaacaatatgaatatgccaaaatataccctttataaactatgaatttgaatatacaaataccggacaatacagcattaatcttcgaatatatgcaaaaagggcaatttatctgttccaacagcacagatatcgacttgcgcgacatgtataatatgattgatgagaactacgaatctttataccaatacttttcacaaataaactatacattagaaaggggaaacgagtatttctacttctcgcgcacggaatcaaaaaccacattggaacaaaagatactccgtgcctattattggatagatgtacttgatttcttcaaaacttacgatgaaacattcggtgcaggcttccgcttccagccggaacaaattttggtagaggccaatatcaatgttttgctgcaaaataaattagacggtatccgcaaacatttctcggacaaggatatccgcaaagacgtgctcgacaatatgatacgtttgctggccaaagaatcgtttatcgaattggaaaatgagaagactaatacttataaggtactgacttcatggcattatctggaaaaattagtcgatagtatcaacatttttgaagacattgaagatgagaaacctgagtagaataatttttatcaatagtgcgaatattccttattcggacaatatatatctggatggaaatatccactttatcggcacacaaggagtaggaaaaagtaccattctgcgtgctatcttatttttctataatgcggacacgcagaaactgggcattcccgttgaaaaacaaaattacacggactactattttccttttgccaactcatatatcatttacgaagtaacaacggagcatggagcattctgtatcctgagctttaaagccatgaaccgggtatgttatcgtttcatagattcaccttatcgcaaagaattctttattgacgagaatcgcaccgcctacagcggcacagaccgtatccgtgccatgctcgaccaacatgaagtggagtattcgcgcatcatttatacctacgacgagtatcgtaatatcctatatggcaatgcaacgagtactgaattccgacgttattccttgatggaaagcaaacaatatcaaaacattccgcgtaccatccagaatgtattgctgaactcaaaacttgatgccgaatttatcaaaaggactattatctcttctttaaatgaagaagaaatatccatcgatctgaatagttacaaagagcatttgaaagattttgaaacgcgtctgagagacattagtgaatttcaaaagaaagagacacagaagcaggcaacggagattacccaactatcacagcaaacaacccgtctgcaaagtgatatcatgcaaaattgccgcgaactggtgattgccggtcgaaaagcatccgaactgctgcccgagtggaaagaaaaacgcgacaaggctggcaatgacatacaaatacaggaaaagctgaaggcagaattacaaaatgaatcacggcagcgttgcgaaaaaatacaggaagaactgaccatcgtcagcaatgatttgaagaaagccgttctgaaggaaaaggaatatgaagaacatcatatacaggaagtgatggaacgttctgccaaagaaatggaatggaaaaacaaacgtctcggtttgcaggaagaacaacgcatattgacttcgcaatacacggaaatctcttctaaatacaaattgcttatccagaacctggataaccagtggaataaaatacacgaagagaaaattcatcaattggatacattaaatactgtttacaatgcccgtttggaagaagctcgtaaagaaaaccaaaaccaaacagaagctttgtatcaggagtatgagaacctgtcacaaaaactgcatccgctaaaaaccgaaaaacagacaaagctgagcgaaatggattatcgtattcgttcatgccgcaaagaaatcttcttcgaaaaggaacaagaggaattaaaggtgcgcattcagtcgtacacctctactcacttggaacgaaaaacacgtatcaatgaggctcaaatcattatcaaagacttgatgatgaaatgggagcatgaagttcaaaaattggaaaaagggatagatgatgaactgtcgaagtcacagatggaactgcaacagttacatgtccgcatacaggaattgcaacagtttcttacccatagtaagagtaccttacaaggctggctgaaagaaaaccataaaggatgggaagaaacaatcggtaaactatgcgatgaagctatattgtggcaaaccaacctctcaccgcaaaaagcagaaggcaattctttttatggaatccaaattgatttgaatgtcatagagcgtcacatcaaatctattgatgattataataaagaaaaagaggagaaggaacaacgttcggcagaaatctctatgcgcatgcaacgtttgcaagccgaaaaagcagagggacaagagcaaataaagcgaaaataccagccgttgataaaagaacagaaaagccgtatcaaccagttagaatatgaattggaaaaactggaacgccaataccagcaggacatgctcgaccttgaagactggaagaaaaaagcagaagctgcccgtaatgaaaagttaacccggctggatgaggaaaaaagcaaaattgctttagaactggcttccgtcaatgaaaagctggataacttgggacaagagaaagcaaacaagctcaatgccttgaaagaagtatgggcacacttgcaaaaccaactctttgaagaaaagaacatccaacaagaaaatatacgcaaagaagaaaaagaggaacaaaagcgtatcaatgccggcaaagcacagcatgaggcagagatgcaaaaagagttgcattcccaaggtgccgataccgaacgtttacaaaatatcgccaaccaactgggacaaattgagcaggagttgtctttcatcaaaaaacacgcaacactgattatcgaatatcaaaaagacaaacgagacctgattgaacatatccctacatggaaatatcaggaagaagacctgagaaagcaattaaagaaagaacgggataccctgagagcagaagttgataccttgcagaaagagatagacagaataaagataattttacaagaagccgaaggtaatattcgtcatttacaacagaatctggatgcttacgccaatatagaaagctttgattggtataaatctcatcaggatattttcaagaatggcccttctatgacaactattacacaaaaaagttgcatggagttaattgacctgttgaatcaatattacatgcaattcatgcagatgcaaaccaaactgcgtaaagctgtaaacctcttcacaggacactttgacgaaaacaatactttcaagtttaaaaccaaatttaatgaagactgggaatacatacgctttgctgatgagttgcacgattttatagaggaagatagaattgacgaatatgtacgccgtatcaataatgaacattgggatacatttaaacgtatcagcatggatgtcacttcactttcttcttccgaaaaagatatacaaacaattattggcaagataaataaaggattcgctacctgcaattttgtaggtgtcattcagcgcatcgagatgaaaatggaagaaagcagtaaccgagtggtaaatgtactgcatgatattcaaaaatattacaaagaatatggttatgaccttacccccgaaacaaacttgttctcttccgaaaaagagcctttgataaaagaagaagccatcaagctgctgcgcgactttatcaaagaaattcatgcctaccgttatgacaatatccggctgtatgactccttcgaactacgtttccgcattgtagaaaatggtaatgacacaggatttgtagagaaaatttcaagtgtaggttcggaaggtacggatattctggtaaaagctatgattaatatcatgctaatcaatgtatttaaagaagccgcttcacgaaagttcaaagatttcaagttgcactgcatgatggatgaaattggaaaactccatccgaacaatgtggcaggtatcttgaaatttgccaacgaccggaatattatccttatcaacggctctcctaccgagctcaaccgagaagcatacaagcatgtgtatttattaacaaaagattcacagagtaaaacacgtattgcacggttaatttcagacaccaacatataatgataaatattacattaaaccaagtgcgattgttgaaatctctctctttaggggagagatttcctttaagcaatttaaaaggaaaaatctttcaacagttattggatgagcatgtcttatcaaagtttccacaaggaaatggttttataatctatgctcactctcccattgccttactaaaccatttaagtaataaatatataaaatgttccctagatgattacatcgaaaagatggaaataaatgagctaaggaaagtagacaatatattgatgagagggaactcaaagagcaatgaaacgcatcccatgaatggttttctggtgaaaagcattgaaccgattgaagtttctctctccaaaagaaaactggtgctttctcccgaagtgtggcctgtctgtttcgtttcaaatcatgaagagttcacaattccctcggatgtcaccattgttatggtagaaaatcctgaaaactttatctttatagaagaacaaaaggagttctttgaaggaatgcgacctttatttacaacttattatcccagagatacacatcgaagtttagtgaattggttagaaacattgcctaatgcatacattcattatggtgactttgatattgccggagtttatatttatcaggatatttataaaaaacatatcaaaggtcctaaaaaattctttgttcctaaatttattgataagttaatgcatcgattcggtgatgcagaactttacgataaacaattgagttacagaaattccatcatttcagatgaaccaggcattcaagaactaatgaaaattatcgataaagaacataagggattagaacaagaaatctttaattcaaaagaatataaaaaatatacagactaactttctcttctttctattatactgaaacaagtttaagatgctaacttactttttaaatcatttttaatcatgtgaatactgtcactgaagtatttcttatagaacaataacaaaataatgactccgcaactgatagctgcatctgcaaaattaaagatcggactaaagaatataaaattatctcctcctataaatggcatccaaccgggccagttaaattcaaaaagaggaaaatagaacatatcgacaacttttccgtataaccaatcagtgtatccatgtcctatcggtacaaaagttgccacttcagataaggtactttgactgaatatgactccataaaaaatactatcaataatatttccaattgcacctgccaatatcagggaaatacaaataagatacggcctattgtctgtactgctttgggaataacttgcataccaaaagccatccccgggttctcaacaaaatgaatatagaaccaatcggtaatgcgaatactttcattataatacatattcgtttttaccgctatttttatgatttggtcaagaattaagattcccatcacaatcaacaaggaaagccatcctttagaaatagtatttttcataagtattattttgtgtttttaaatagttgcaaatatactgaagaatttctatcagcaaccattttcatacccgaaatgtcatcttccgatactctgacggtgatattcctatttttttctgcacatatcggctgaaataggatactgaggaaaaattcagcttttcggcaatctctgtcaaggagagttccttctgccatagcagacgagtgatttccaaaagagtaaaacgatctatccagtaagtagcaggtctgccactcacctctttacatatctccgacaggtaatgaggagtaatgcaaagtcgggaagcataaaagtcaagactacggtgacggatatattcgccattatacaacaattcgatgaacttccgcagcagaaaagtgatatgttccgacagtcggaccgcctcctgtctgcgtgcatggatgtcgtagagatcgagaatatgggcggtaagcagactgcctagtaattcttcccggaaaagatgacctttatcctccatacgctcccggatacacagcatggcctgtttgcacacccggaagtcatgaaatgaaagtttcatgaccggattctgcaaaagtgacaaatgtccgatgatgccgtaattgctgcgaatggctattgaggtaataaacaaatccgaaaggctcataaaaatgccttggaagtccccggagtccgaaaagtccgacccaagtgttgcattgggcagaatcacataatctcctgccgcaatgtgataacgggtgtcttgaaacgtaaagcccatattgcctccgctgcaaagaatatgaatgactcttcccgtatgccgcagggcattgaagtcctgcaatgtatcagcgaaaataatcccatcaaagtctgtatgctccatttcccttattcatttccttgcaaaagtaaccaaaaaccacgaatagtgaaaatactacctcgaattatgtaacaaagaagcgagaagtgcgttgtaattttgcatcagaagctaaaaccataaagaatatgaaaaatgtaagattgaacaacggagtaatgatgcctgccatcgggttcggcatcttccaaattcctgagaacgaaacggaacggattgtgaatgatgcgattgagaccggctacaggaagtttgatacagccgcctcttatttcaatgaggagcagttaggcaacgccatccgacatagcggcatgaaacgtgaggagttcttcattaccaccaaattgtgggtgcaagactacgaatacgatgatgccctgcgcgctttcgatttatcgatgaaaaagctcgggctggattatctggacctctacctgatgcacaaaccatacggaaactatcgtggttattcctaaatccgtacacaaggagcgaatggtagaaaacttcaacatccttgatttcatactttctgaagaagaaatggccgctatctccctactggaaacggggaaaagccctatctacgacgacatggacttagcaactgtgaaaggaatcggattgcacaaaatccatgaatgattttagaaagaaaagagaaaatagaatatgaacccttaaaaacagaatcttatgcagactatcaaattgaacaacggcatcgaaatgccggtattgggatacggagtattccaagtatctcccgaagagtgtgagcgttgcgtgctcgatgccatcagcactggttatcggctgatagacacggcgcaggcctactataatgaagagggcgtgggcaatgccgtcactcgctgcggtgtgccccgtaacgagcttttccttaccaccaaaatatggataagcaatgccggagagacaaacgccgcccgcagcattgatgaatctctccgtaaactgcacaccgactacatcgacttgctactcatccatcagcctttcagcgactacccgggaacatggcgggccatggagaaggccgtaaaagatggaaaagtccgtgccatcggcctttccaacttctaccccgaccgctttgtggatatggcggaatatgccgaaatcaaacctgccgtgaaccagttaaagacgaatgtgttcagccagcagtgggaggccgaagccgaaatgaatctctatgatacacacatcatggcttgggcaccgctggcgcaaggtaatcccgaacttctgaccaatcccgtactgactgctctagctgagcgatacaataaaacagtgcagcaggtggctctgcgttacttgatacaacgcggcatcatcgccattccgaagagtactcacaccgaacgtatgaaacaaaatctggatgtattcgactttgccctcacaccggaagatatggaaagcatccgtccgctcgacaaacccgacgacttccgttggtcgcaccgtaatcccgaactcgtaaaattcctcctgaattacgacagacagtttaacccggacaataagaagtaagaatatgaaaatttcataaagcaagaatccttttttctatttccaaatcattttcattcagttggggagacggtatcatgcaagtacggatacagtctccctcccgacaagtataatcgtaatatttcttttgcagctccgtcaagttttcaagtgccacaagctcccccttcaattccagaaactcctccatgtccgtactgtcactttgctttacaaagagaatacggcgtgatatcggattcctgttataatccaggctgagatataaccctttcagaaaaggagggaaatcatacatgggcaattgcaggtaaatgctgaacaaagccatttggggagcttcccgttcgttgaaaaaaatatatccgttctgatggttattaaacaaccctaccccccggtgagtcgtgttataagcactcatgtgagtcaccttcacatacgtgttatcttcggaagactctatcaggtaaggttccactttcaggcagttgcatgacgaagaaagactgtaactcaaatagctgccactataattataaacttcctgaacaaaacgctgcatctcggcagtcatcatttccataaacggattcgcctttgtctcgccattggcaggttccagactgaaaagcaattctttgatgcttgacaaattacccatcaagcgtttctttgaaatgttattgacctgtcccaaagccaaatccaatgaattttcttcagaatgtccttgtttcaatgaggttacataagtgggcagaacactggaataaagcgcagacaatacactgggagccatatcgataaaatctgctatttctttcattttcaatccgttattacggaggtattctattcttctataaatttctattaaatcatccatggatattatcttctatattgaacttgcaaaatacaagttttcgtgtgaacttacaatgacatacacattacattaatattacatcatcaactcctcgctatatgaaaaatattaatcataaatattcattttttctccgaccggatgagcatacttttgctgccggaaatcatcggaacgggatgcaagactccgcttttacgatgtaaaaacataatttgcaaaaacaagtaaaacaataatggaagcaaaaagcgaaacgaacaaaccaatatccaatttcctgtttatcttatgggcaggaggaacagccttactttcctattcattggtatatgcactgcgtaaaccttttacggctgccacttttgacggaatggactttttcggaatggattacaaagtagccactactatcatgcaaatcttcggctacctcatctctaagttttttgccattaaaattgtctccgaattgaaacgggagaaccggttgaaattcatgatattctccgtggctcttgccgaacttgcattggtctttttcggactgctccccactcctttcaatgtatttgcattgttctttaacggactggcgctggggtgtatgtggggagttatcttcagtttcattgaggggcgcaaagtgaccgacatattagccagtttgctgggagtaagcatggctgtgagttccggaatggcaaaatcactcgggctatttgtcgtcaacacattcggtgtcacagaattctggatgcctgccctgataggcggtctggcttttccgctacttgtcctgatgggatggtcgctcaacaaactgccatcccccactgacgaagaccgcgccctgcgttcggaacgcgtagcactgaacggagaacagcgccggcaactgttcaaaagctatatgcccctgctgataatgttgttttttgccaatctgttcatcaccatcctgcgtgatatcaaggaagattttctggtcaacattattgacgtaagcactatctcttcatggttgtttgcacaagtagacggcatggtaacactgattattctgggaatatttgccatgatgtcactgataaacagcaattacagggtgctgatagtgctcctttccatggtgataggcggagccgtaaccatcagttatctggcattcaattatgacacactgcaattgcccaccctttactggctctttatacagagtttgagcctgtatattgtctacctgagttttcaaaccttattcttcgaacggtttatcgcctgcttcaagattaaagggaatgtgggatttttcatcgcatccatcgactttatcggatacacaggaacggtttgtgtgcttcttttcaaagaatattgcagcccgaatatcgactggatgcaattctacaaccaattttcgggatgggtaggcatcgttgccggtattgcattcatcggttcggcaatctatctgatgcaacgatacaaaatggaaaaacagaacttgcccacggaatgttatcacccgacggacaatgccacgaatgctttcccgcaaatccaatccactcctacaggaaatgaataaataaataaacaaataactaaataacaacaagatgaaaaaaatagaatgtgtaattatggactgggcaggaacagcagtcgattacggatgttttgcacctgttgccgccttcttgaaggcctttggtgaagtaggtatcactgtaaccatggaagaagcacgccgccctatgggaatggcaaaaatagaccatatccgtgaactgttcaagttgcccggagtgacagagcaattccaaaaactatacaacagactttggacggaagaagatgtggttgccatgaaccgtgaatttgagaaatatctcttcgcttctcttcaggaatataccactcctatccccggagtcattgaaaccattggcgaactgaaaaaggcaggcattaaaatcggctccaccacaggttatacacgcgccatgatggatgtggtcctgccgggagctgccgccaaaggttataccacagacaattgtgtcacccccgacggtcttcctgccggacgtcctcagccttttatgatttacaaaaacatgacagatttgaatgtaccttccgtaacaagtgttgtgaaatatggggataccattgccgacatcaaagaaggagtgaatgcaggcgtatggactgtcggtgtcattctgggcagcaacgaaatggggcttacccaagaggaaaccgagaaacttccatcagatgaactgaacaaacgcatggctgccgtcagaaaacgcatgtatatggcaggtgcccattatgtggtaaacagcattgccgaactccccgaaattattgaaattatcaaccataaaataaactaacacaatgagaccatatttacttttgactcccggccctttaacaacatcagaaacagtaaaaacagccatgatgaccgactggtgcacatgggatgaggattacaatgtgcacatcgttgaagaaatccgcaaaggactggtgaaactcgctacccataaaaccgatgaatacacagccgttctgttacagggaagcggtacttactgcgtagaagcaacattgggaagcgtcatcaccccgaaacacaaattactcattctgagcaacggcgcatacggtgaccgtatgggaaacattgccgaataccacggcatgaactatgacatgcttgcttttgatgaaaccgaacaagtatccgtggaatatgtggacgactacctggcacataacgcagaaatcacacacgtggcagtggtgcattgcgaaacaacgaccggcattctgaacccgttgaaggagattgcccacatggtaaagatgcacggcaagaagttgattgtggatgcaatgagtagtttcggaggcgtacccttggatgtagaggaactgggtatcgactttatgatcagcagcgccaacaagtgcattcagggtgtaccgggattcggcttcatcatagcccgcaaatccgaactggcacactgcaagggcgtatcacgcagcctctctcttgacatttacgaccaatgggaaacaatggagaagggacacggcaaatggcgcttcacctctcccactcacgtggtacgcgcttttaagcaggccatggacgaattagaggccgaaggcggcgtgcaggcacgtcacgaacgctactgccgcaatcacgaggtattggtggcaggaatgcgctctctgggcttcaaaaccttattggatgacaccatacaatctcccattatcacttctttcctgtaccccgatgcggcatttgatttcaaagaattctataagcaactgaaaacaaagggattcgtgatttatccgggcaaaatttcacaggcagatacattccgtatcggaaatatcggcgatgtatttcctgaagatttcagccgactgattgatgccataaaaagcacaataaaggcataaagtcttctcgcataaaaatggtaattgtttctcgctataccaaaagagtgaaacagttgattatcaaatgattaacaatttgtttgggaccacttggaccagggcccgcctttatgagaatccggccccaataaaaggccattaataaattgataatcaaaccgataaagcggacaagcctattaaatgaaattcggcactgtaatcaatgagattataaatcattcaagcacctattcagcgaaacaataaactcattgccaacagatattattcatgtaataataattcatatttcataaaaagagcttgtccgttttacaaatcaagaacatactgataaacaacaatatatatattcatatcagcagaaatccggggtcagaatctcataaagacgggccctggtcccagtggtcccaaataaatcattaattctttgataatcaattatttaattataatccacatcacaaatccgcagtccgttttataaagagataaaagcgaaaaataaaacatgaaaaaggactctcgaaaaactccactgtctttttgcaaaacctctaagtcttttgcgaaaagacagtggagttttgcaaaaagctgaaagagttttttcaagaaccttggaattaaaaaatgcggttttcttttcgtctccgtcacatctcccaatatctatcgcaaagattcagatattccatttcgggttgattgccaaaagagagtgcaaaaaaagaagtcttccgacgtttcatcactcttatttgttcttttaaatctttggataacggaggcatctcgaagtctgaaatcaggacaatatccgactctctgaaatcgtttccgttaatgatatgcgccgcttcgcgaagggcgggttctacatccgttcctccgttgaaggatttattgagaaattcggccagtttgggcatgtcgcgcgacaaatcttccaccaacagagctacagcctcatcggagaagttgatgacataacatttgcggtgagtcttttccgtcaactgagcaatggcaagaatcgcagacttggacaggatttcccggtcgccctgcatggagccggacgtatccacacagatgatataaggcccttgtcccgaaactttctgcttgtcattcttcaccgggtctgcttctttcgatttataatcaaacagttgcaaccgcttctcggcataccgttccatgaacacggcacgcagcgaatcgtccgccagataacaatattctatcggcaacagactgttcaggtcattgcccaaagtgacgcccgttatatcgctgtggggagaatggcgaatcagcatcttcttatccactcccgaaagagaatcatatttcaatggttcccggtgctttctccccaaaagctgcgccagttgccggatggcaggattgcgtttcatcacttgctcaaaggggagcatcttgcgatacaagtccgggtagttgtgaagcagccactccatgcgcgacccgagcaggtgattgcccgactgttgcccatgtttctttaccaacaggtcgaaactctcgcaaaggctgtcgatgtgcatatactgatagtcgtactccttgcgggtgagcaactgatgccatttatccagaaaaaactcctttgtctgcgttgcttccccttttagcagagagcaaccttccatttgtgaaatatagtaatcaatattgagttcggaaagctcataacgcttcttgaatgcactgcgcatctgtttcaggaattgcaggaatgccatgtccggcaagtgttccgaggaataaaaagcatcccactcgggagtgtagcgcgaataatattcctgcagggaaggcgttgtgcggcgatagtaggcaagcactttttcctccaattcgtgtcggcgcaccactccgctgccgatatcatccccgtatgctttaaacgttctgtctttaagctcctgtgaataaatcatcttcaggtctctcaaccttatattcctggttctcttttcggtacgcatcagccatttcgttcaattcgttcttatatcgttctatattgttcttttgataggtgagcatcctccgcatcaggaggcgttgccttgcactcaggaaaagatgattttcgtaatactccgtttcggcagcaagcaactcgttccagtctttctccattctcttcaaagcttcggtcactgaatgatatttcatgcccaggtcttccggttccggttcggaaggcggaggcggacagttctcatagcacatcaggtgatattcataattgtttatataaacggagcgagttccccgcttcaacgtatatatcttgctacggggaactttggcatgaagcaccgaatcatattttttcagaatacaacaatttgctttgtacttgtctttgtgcaaatagaacagtttccctgttttgtcaagatgccggtaatcggaagcaaaaatcagcaaacgctctctcatgcggactccctccacctgatagtaataggtatccaccacctgaatgccgggatcattaagctcgcgcaaactgtgttccgaagattgacagtctttcagttcctcgatatcttgttccaacccctttatgttgagcagatagccctcggcactcttccgtatggcggcggcaaccatttcttcaatggcttccatgtgctccgtttcgctccacaagcaataagataaaagcgtacagtccgacaggcggatggtatccgaaccgttcaggaaagcggacgtcttgagcagctttaccatcttcttccagcgacggtcggacacatagagaggagctgaaataccaccctcgttctgcacttgccggttatattgctcaatgccgtctttcagtgcatgaatcacttcaaaaatggagtaatgaatctttatggcagctatttccttttcccaacggacatattcttcaccggttatttgaagttgttcatccaccaccggttccgtttcgtcggtagacgaaatcatgcggtcaaactcacccatatcttctattcctcccaccagacaacgaagcaggaatcggtcccatagagcttcaagtccctgcccttgtgccggaagttcattggatgctgcaatcagacctttcagaggaacccgaatagaaaactgtccgttacgataaatcttttcattgataatggtcagcaaagcattctgaatggcaggtccggctttccatatttcatccagaaaggcaatggtagccgaaggcagataaccatcgacaatgcgttcgtaggtatccgcatccttcagtttggagatggataccggcccgaatatttcatcgggcgtactaaaacgggacatgagatactcgaaagcgtaggcatcccgaaaagccagtttcaggcggcgcgccaccatactcttggcaactcccggagggccgagcaggaagatactctctcctgccactgccgacagcagggagagtgccaccacatgctctttctcgaaaacacgttcgttaagttgttgtaacagggattctatacgaagctttaattcattcattttactttttcctttgaagtttcattgtgctgttgccgattcttttcaaaacgcagtcacaaaagtagtgcatttattcagataaaagataaaatccggctcttatcttgtttctcacgccgaattatctatctttgcgcccaacattgacaaaccatgaaaacattaaaagatattgcaacggcaaggttgctgaaccaacatctgcttcgcccgctattcactgccccacaagaggtggtgtcgtggatgggagcaatgcaggcacaggatttctccatgtgccggtgggccgtcggagtaaggatgcggaagccctcggaggccggcgttatcgaggcactcaacaagggcgacatcatccgctcacacttgaaccgttccacctggcaactggtcactaaagaagactatcattggatgatgccactccatcgggagcgttccatccgttcgtggtgtgcatttgccaaacagtcgggcaacccgatttccgacaaaatgatggacaacagccgtgagcttctgactaatatattaggtggaaagaagcatctgacacgagaagatatcatacctttctatcaggaaatagacatcgacaatgctcacaccgtccgccacctgttggcagtggcagaggcggaaggcatcatccataacggttgcaccgacggcaggaagataacctaccggctttacggaaaagatgaaaacaagttcggttgcctgccgaaagaagaagcattggcacgcttggcaacaaagtatttccaaagccacgcccccgccacactcgccgattttgtatggtggagcggattaccggtgaaagaatgccgcataggaatggaacagatatcctctgcgctgaccgtaaaaatgataaacggtacggaatatttcctacacgagagtaatcgatatggcaaaatgcaaaaggacagcattacacttttgcctccctacgatgaattgctcatcggctacaaagaccgttccgccgtactctccaaggagcacgaaaggaaagcctacaatacgttcggcattttctatccggtggttctgcatgagcatcggatagccggcaactggtcaaggaaagaattaagcgttactttttttgaaaatgataagccggatgcagcgtgtttggaaaaggcaaaaaaacaatacgagaaatttgtaaataccaaccgataaaaatgacacagcaaatgaaagcaaaccttctctctcccgataaagacccgatgggggcagctattaccgactattttcaccatcagaaggcaggaaaactacgtgtattctcatctcagtttgaagaagatgaaattcccattaaccagcttttccgttcgttcgacgaaatgtccgaaccggaaaagacagctttgcaaatggcaagtggaaagattctggatgccggtgccggaagcggttgccataccctggcattgcaagaaatgggaaaggaagtttgcgccattgacatctccccgctttcagtcaaggttatggcagaacgcggtgtacgtgatgtccgtcaaatcaacctttttgatgtaggatttcttgaaacatttgataccatcctgatgctgatgaatggttcgggcatcatcgggaagttagaaaatatgcccgatttctttctgagaatgaaacaattgcttcgtccgggaggatgtatcttaatggattcgagcgacctgcgctatcttttcgaggatgaagacggcagcttcctgatagaccttgcaggagattactatggcgaaattgatttccggatgcagtataagaatatcaaaggagaccgtttcgactggctctatgtggattttcaaacactcagtctctatgctgccgagtatggctttgaagcagagctgataaaagaaggaaagcactatgattacctggcttgtctgcggatgaaataaaaccgcgaatgtccgaaatcgaattccgaatattcgcggttccctcattaagccatcgagccgcccacaatatcaagcaattcattggtaattgactgctggcgacttttgttatacatcaccgtcagctcctgcaacaactcattggcattgtctgttgcaatctgcatggccatggtccgtgccgcatgttcggcagcattcgaatccagcaatacggtgaacatcttcatacgcaacaccttgggtagcatttcctgcatcagttcctcggcagaaggctcaagaatataatctatcgtcctctcttcctccttcttttcattatttaaatcaatgggaagatacgtctcgcgagtcaatatctgcgaagcggtggacttgaaatgattatagagcaattccactttatccacatcgccatgcaggaagcgtttcatcaaatcggcagccaggtcggcagcctcctgataagaaggtttgtctgccatgtgctggaagtcgccttcaatgcggaatcccagcttcctgacagcatccgccaccttctttcctaccgggaaaaccagaatattctccaatcccaacggcttgtattctgccagcaaatcgaccaggtgcctgatgacattggcattaaacccgccgcacagactggtattggaagcaaacaccacgacagccaccttttttacttcacgcttcacaatgaaaggagacgtcacctcggtacagttgctcataaaatcggtcagtatatggtgcagcctgcgttcgtaaggaagcatactttctatggcagcctgagccttatgcaatttggctgaagccaccattttcatagccgaagtaatctttcgggtattgtttaccgaggctattcttccttttacttctttcagtgatgccatgataattattgttctttataagattgagctgtttccgcagccactttttctatgattccggttacttcctcattgatgacaccgcttgccagcacatcaattacatcctgctgatgattggcgcgcatcgtttccaaaaaagtattctggaattcaatcactttatccaaaggtacatcatgcagcaagctatgtaccccgcaataaaggacggcaatctgctcgcccaccggcatcgggctgtactggggctgaatcaataaccggttgttcttacgtccacggtcgatggccatggcagtcacggcatccatatcactgctgaacttggagaatgcttccagttcacgatactgtgcctggtctatcttcaatgtacccgctaccttcttcatactctttatctgtgcgctaccacctacacgggatacagaaatacctacattgatggcaggacggaatccctggttgaagaggtccgtttcgaggaatatctgaccatcggtaatggaaatcacatttgtcgggatataggccgaaacgtctcccgcctgcgtctcgatgatgggtagggctgtcaacgagccgccacctttcacctttcccttcaggcttgccggaagatcgttcatctgttccgccacttcctgctggttgattatcttcgcggcacgctccaacaaacgggaatgcaaataaaagatatctcccggataagcctcacgccccgaaggacggcggagaatcaacgatacctcacggtaggcaacagcctgcttggacaagtcatcgtaaacgaccaacgcatcccgaccggtatcgcggaaatactctccgatggcagctcctgcaaacggagcaaaatattgcaaggcggcagggtcggcagcagtagcggcaactacgatagtgtagtccaatgctccacgctctttcagcacgttcacgatattggcaacagtagaacctttctgtcccacggctacataaatacagtaaacaggtttgcctgcttcgtaattcgctttctgattcaagatggtatcgatggcaatggcggtctttcccgtctgacggtcgccgataatcaattcacgctgtccgcgaccgataggaatcatggcatcgacagacttcaagccggtttgtaacggcagattgacgggctggcggaaaatcacccccggagccttgcgctccaacggcatctcacaaagctcaccgcctatctgtccgcgtccgtcaaggggttcgcccaatgggtcaataacgcgtcccaacatactttcgcccaccttgatggaagcgattcgtttggtgcgttttacaatcataccttccttaatctgatcggtaggtcctaataacaccgcacccacattgtcctcttccaaattcatcacaatggctttgatgccattctcaaactccagcaactcattcgcctcggcattgagcaagccgtagatacgaaccacaccatcgctcacctgaagcaccgtacccacctcatcaaactgaagtgaggtatcgatatccttgagttgtcgaagcaatacttcggatacttcgctgggtcttatattttcagacatagtctttacttttcttttttatactattcttctgttcttctctataaactgctgtttcactctgcgtatctggctggcaacgcttgcatccaagcggtaggtaccgatttcaaatatgaaaccaccttccaacgaggcgtctacttttgtagcaaattcagcagttcctttcgtgcggctgactactatcttacggatacgctccactacttcgggagctaccggataagccgtggtcaacttgcctatgctgatatttttctgtttcctgtacaggtcgatatatgaatttatcataaactgaagaaacttttcacgcttttccttcaacaccagttgtacaaagcgttccagctcctttgtcactttccctccggcagcttccactaccagcctcagctttacatcgggcgccagtacaggattgtccatagcctgccgcaactcgggaacttgcgcataactgtctttcagcaacaacgcttcccggtaaatagcatcttccaccttcgcatcatcggcatacgccagcaatgccttggcatatcgcatagaaactactcctatatacatggcaaatcagtttttagaaacagtcaattcatccagcagccggtcaatcattgccgtctgcttattctcgtcgtcgaggttcttacgcaacactttctcggcaatatcaacggacagaaccgctacctgacggcgtatgtcacggatagcatcttctttttctgcctggatttggcgcttcacctcttccatcattttatctccttctatccgtgcctgttctttggcttccttgataatacggtctcgtgtcgccgctgcttcgttcagtatgcgtgcctgttcctcatgagctttagccatgatggtttcaccttcggctttcaggttagccaactgttcgtttgcttcttttgccaccaccaacgaacggtcgatgtactccttacgctcattcaccatcttgacaatgacgggaaaaccgtatttggcgagcacaaagaacacgatgccgaaggaaagcaacatccaaaacaacaaaccactatcgggcactaataatgacataacttctttttatttttataatgcaaggaaacaaaccacaatggcgaacaaggctacaccttctaccaaggcggcgatgataatcatattcatacggatatcacctgaaacttccggctggcgtgcaatagcttccatagccgagccaccaatcttaccaatacccaaacctgcaccgattactgctaaacctgcacccagtgctgcacctactttactcaagccgactccggctgctgcttgtaataatactgttgatagtaacataacttttctattttttaatgatttattttatgctttttctttctctgtttcttctacacgggacagtccgataaacactgccgacagcatggtgaacacatacgcctgaataaaggctaccagcagttccacaaagttcataaagatgcagaacagaacggataccactgtcatcgtgccgtttatggcaggtcccatgccgactgttacgaatatcaggctggtgagcgccaagataaccgagtgacctgccatgatattggcaaacaaacgtatcatcaaggcgaaaggctttgtgaagataccgaacaactctactaccggcatcaacggcacagggcactttaaccatgtaggcacatcgggccaaaggatttctttccaatatgccttgttgccccacacgttgacagcaatgaacgtacacaatgccaataccagtgtaatggcaatattccccgtcacatttgctccaccgggaaagataggaatcaaccccatgaggttgttgatgaacacgaagaaaaatgccgtcaacagaaagggagaataacgcttgtaatcttttcccacacagcccttgattacatcatcttctatcatcatcacaaacatttccatgaaaccgacaaaacctttcggtgcgggagaatcaggcgtgcgcttcttataccaacgggcagtacccagaataatggcaaccagcaacacactgttgattagcagagcaagtactgtttttgtaatagaaatatcgaacgggcgaacctcctgtccggcagcattcacttctacaatctttcctttatggtctccatcggtagcgatacgcaacccttcgtactcactgccttcatgtgcgatacgggaagaaagaaaggtatgccatcccgtctccttactgtatacaatcaccggaagaggaatcacaatatccttatcaccccacttagtgatatgccattcgtaagaatcctgaatatggccgaacacgatatccttcgcatccacattttcctgctgctgactcacattgatatcttcggctttcaccgtaccgacacccatcatcagcaaacaaaaaacaatacctatcaaataccttaccttatccatttttttcttttttgtcttttagtttaatcttcaaattgctttcaaacacgaagaagaatatactttcatacagcatgctgaaaaggtaaaacaaaaagaaagtcaatacgaaatcctccttatgcactttgacgtgcaacacatagaacaacaggattatcatcgagaataccatttttacaaacttcattcccatatagacggaaagcaacttatgcggcgtatacttccgacagtagtcgaacataaaaatataataccatccgaagatataaaaatacagaggaataaaaggaaaccaggcaaaataatgctccggccaaaataacttgattgctcctcctactaccagtccggcgaccaccatcataacggtcttccagattaaaaatcgcttttttgtcagtgtaaatcccatagttttgactctttaaatgttattgttctacgcaaaccgatactatatcctgttttacctcaacaaaaccacccttgatagcgactttttccggtttcccatctttcacataaacgatttgtcccccggtaagggaagaaatcagagctgcgtgtaacggcagaagagtaaatgcacccaacgtaccgggaaactctgcactctcaacctctccttcgaaaataactccttcgggagtggcgattgtcatattcagaaaccgtttcataaagcactaattctttttattggctgtttccagcaatttcttacctttttctattgcttcttctattgttcctacgttcaggaacgcttgttcgggcaggtaatccacttccccgtccataatcatattgaatcctttaatggtatcttcgatggaaaccatcacccccggcacaccggtgaactgttcggcaacggcaaagggctgtgacaggaaacgctgtacacgacgtgcacggtttaccgtccggcggtcttcgtccgaaagctcatccatacccagaatagagatgatatcctgcaactctttgttgcgctgaaggatttgtttcacgcgttgcgcggtgtcgtaatgttcctgtcccacaacattcgggtcaagaatacgcgaagtggattccaacgggtctaccgcaggataaatacccaactcggtaatcttacggctcaataccgttgtagcatccaagtggctgaatgtagtggcaggtgccgggtctgtcaagtcgtcggcaggcacatataccgcctgtacggaggtgatagaaccattcttggtggaagtgattcgctcctgcatctgtcccatttcggtagccagtgtcggctgataccccacagcagacggcatacgtcccaacaaggcggatacttctgaaccggcttgtgtgaaacggaaaatattatcaatgaaaaacagaatatcacgcggtccgttggcatccccacccttacggtcgcggaacgattcggcaacggtcaacccggaaagggcgatggaagaacgtgcgccgggaggttcgttcatctgtccgtacaccaaggtagcctgtgatttctctacttcgttgtagtctactttagagagatcccaatttccctcttccatgctttttttaaactcttctccatagcggataacgcctgattcaatcatttcacgcaacaggtcgttaccttcacgggtacgttcgcccactcctgcaaacacggaaaaaccgttgtgcttcttggcaatgttgttgatcaactccatgataagtacggtttttcctacaccggcaccaccgaacaacccgattttgcccccttttgaatagggctccaacaggtcgattaccttgattccggtaaacaacacttcctgtgtagtagacaaatcctcaaacttgggaggttcacgatgaatagggtatgcaccttctttacttaacggcttcattccgtccacggcatcgcccactacgttcatcaaacgtcctttaatctgattgcccaccggcatggtgatgggatgtcctgtcggtattacttccatgccgcgttgcagtccgtccgtactgtccatggctacggtacgcaccgtgtcctcaccgatgtgttgctgcacttcgacaaccagcgttctgccgtccggtcgtttaatggtcaaagcgtcgtgaatactaggaagaagaaggtcggtatcgatatctttgccttcgaaatacacatcgactaccggtccgattacttgtgatatatgtccaacgatttgtgacataagcttctgtttagttttattttataatttatctttgctatagaaacaatcttttcaccgaattgtttaggtcggttatgcaccaacgtgcgtggcaaaggtagaaattatcttcaatcattattccccgactaacattttttacactttaaaacgacatatatccattaaaaggggaaaaacagaacaattttgatagaaagaagtgaaagattataattattctccccgaagcaatatgtataagtaaccgtttgacacatagctccggagagaaaaacattaaaaagtatgcatactactccttatacataccttctctggataattgcttgtccagattagcaactccgagtgccactattgcagtcacaactgccgtatgctcctgatattcgggaatattctttgtgtaaagatcacgttcggtatgccagatttctccgtaagaaaaattatatcctttgatatcatctgtcgtgaaaccataagtaggaacaccctctacggcaaacacactggcatcggttcctcccgttgaagtggggcgtttacgaggtttggcaactttcacctcgaacggaaaatcaggattgatattcttcaccggtttacagatttctacaaaatcatcatacatagcttgtggaacggaaataccaatcggaggagtaggtccgccatcccggttgaacagattcgcaatctttcccaactcattctgatgtgtgcgggcatatgcttttgcacccagcaaaccgaattcctctccggcaaaagcaatgaatagaatggtacgtttgggcttcgctcccgaaagggcgataagtcgggcagcttccatcataggaccgattcccgtaccgcagtcaattcctcccgttgccacatcaaacgcatcgagatgaccactgattatcacatattcatccggatattttgtaccctttatggaagctactacattatggtatttcaccgggccaagcttgaaatggttacgaatatcaaactccaaccaaaactcccggcgttcttttgccatctgttctataacggcatactgatgctcatccaatttaatatcacatacttcgggtaaattatcaaaagtggtattcttgtcgttcaccaacggccggtcatagagtgcacgcaagggtacggaagcagactgtatgaaacccagcacaccggcttcgcacatctctttatagaataaccccggcatacgacgcaaaggaatcgtcttgtgatgtgcaccctttgtccaattctccttcatcaacgaatcattcatttgttcaatcttcacgttttccgcttttatcgcattgcgaattgaatcagctttggcagaatgatcgacaggccagcccacattttttcccgagaccaacacccacgcccctttcaactgatgtctcatacgtttcagctcagcttccgttgcgggttctatcagcacatggccacgttgcagccctttggttcccgaagtataagaaggagtgacaaaatgcagattcatcggttggtcgcccccgataaggcgtccgaaccatggaccacggttaaaacctacaggcaactcaccggcttcttccaaatgagcttcgataccccaactcctaaattcgcggagcatccattcggcagcattatcataggcatcagagccaatgggacgacctccaaaacgattagtcaggacatccagctgatgcattacacgattatcggtcgttcctatttctattattttcttcacggcggcaggttgagcatatacatttccggcatacaaagaagccaccaaaaaagacacggcacaaaggtttttcatcataacagtttcgctttatcaatgattaatgactgcaaatataaaacctttcatgaaaccttatccattcaagctctataaatttccatttcccctgaatgataatgtaattcgcacctacataaaaagctatgtctgcatcacgcagccataactttaaaagagagttttatgaatttatataaagtaattgcaatcaaatgaattcttcgaccaaatacatctcattgaaaagtgtttgcgagtaaccggcagcgtttttttgcaataaatcaagcaacaaatattctcctctgcgaacccaatacacaaactcacgccgggattcgtaagtctcggcaaactccagtaaccgctccagttcaaaatcattagaaacaatacccgcaccactcaaagacgcatcgtaagcattacagtcctgttcgatgtgtgcaggaaccatcataatgggttttcccaaatacatagcttcacagatggattcaaacccggcagtgctggcataggctttacaacctgccatctgacgcaaaaattccacgtcatccaactgataaaaagtcaaagtatcatctactttcttcaccggttcttcctcccatttatcccaaaagaaatgaagcggaatatcgggatgctttttatgccattccattatgttctcaccaaaacctgaattgaccatatatccgtgcacataatcccccttacaagactcatataataaaacttcccgacggagtaatggaggaacaacacgaatgtgacatttatcatcatctttcatgacacgaaaagaaagagccaatcgttcgcgtgctccgatagcagtcaacctggtaaagaatttcagtaatgccacattcaactttccgacacgagggaattcaaaatctttatgaagaaacaaatattgatgtccgatacacacctgaggcaccgaagggcgaaacaataagtaagtgaaacctgtgagcaattcataaaaattaataaccatgtcggcttcactggcttcgatacgctggaaaatataacgaatactgttcatgtagacaggcagttttaccaaattacaagcaacactgcgtatcaaactcacccgtttgttggctggcgtaggcgtaaagttcggactgacaaaacgttttacgggtgcatgaatgctacggttaaaaaatcccggcaaacgccgcgaactgctctttcccaccaacacttccacaacctcgtggccgttacgaagcaaaatctcttccaaagtgattgcctgggtaagatgtccccttccctctccttgaacaataaataaaaatttcatgaagcagcatatattaaaagtttcacattcattccggttatcttttaaaaactatgcaaatatccatgttgttcattacaagataatgtcaagggagttactatatggttaatttaaacattgggagtgtgtcaaaactaaaccggcctatcccatcgtcagctgtagaggcagggtttgcctgtccgaagacacaaagcaaactgttttcgggcgagcggacctcgcccctgcgaaccaaacgacagcattatccacgttttaacacaactccaagtagtattaattatcgatatcaatcacattaaattttaagtcaaacttgatttcccatccattggagagctttatttcatagtcttttttatccttttcaatcctcaggactttagcgtctggataattggttgacacatacttctgaatttgagcaggaatcacattacccggaacagagctatatttacaattcacttctgtccatgctccccgcttatcaaattccaacttatcgccattcgtaaaaattacatcataacttttatcaaagagatcggtttccattttagccatagctactttagcagccgaaaagtactgtttgatgaaagtttgagccggttgcggtaattggtttacttgtataggcttgtcatcatcggccatagctacagtttgcaacgcgaataaacacactaaaaataaaaatacctttttcataatctgattgttttataagttatacatcattgtcttttctctgatgcaaagattaaaagagattctgaaaagaatttgaaaagaagcacaggaaacgccttttttacgaactttttttcatgaatttaaaaagttgaccaaactttccctcttaaattattggcacaaacaacgcttatcatcgatttacgacaccaagtcataatcttacctcaaaacaatgctccccttcccgataataataatgtagatatataccttgcattttacaaatagaatcggcaagtgcaagtcccaaaccggtagacccttctttcttctttccctgataaaaacgttcaaatatatgacgactgtccagttctgcttctgtcccccgattgcaaaaagtgatagtacattccgtaatgataatccgaatatagccaccctctacattatgaacaaaagcatttttcaacaggttggtaaataacaccactgccaacatttcattcatagtaatgaaaaacgtcccttcttcctccacctgtacttcgatatgacgataagcatatacttctttataatcagtgagatattgcttaaccaagcgattaacttctatctgagaggtctccgagaactgtccattttcaatcttggaaagcaacaataaagttttattcaattttgtgatgtgttccaaggtctggtgagtcttcatcaagtctgtcagttgagcttcggaaagagcctcatcctccattaacatttccacacgattgaggcagatagaaagtggagtttgcatctcgtgagaagcattaccaataaattgcttttgctgttcaaacatcttttcgctacgctccgcataacgaatggccgcctcattcaactttttaaattccgaaacctgagtaggattatgtaaaggttcattctttgttccgattctatatttatccaaccaattcaacaacacataaagcggacgcatattttgataaaccacccacacatttatcaaaatggtaataagcaacataataacatacagaaatataatccatcccgtaatggcttctttcaagtcctccttttcaatagaaggtgttgcaaccgtcagctcaaaaaaacggtctccgtcatctttaaagagcgtagtcaggatacgtgccggttctgtttctcctttttcgggaatatacaccattgaatctttatagagtatattttcacgactgacagcatattcttctgttacctcttttaagaaatattgattattggaagctgtattcctggatggcaattcttcgcctgccaatgcacggataataataatttccgagtagtcttcaagtgcatcatccacctcgtcgttaacttcatccatgacagcgatataaaaaaagatagcccatccggtcagaataactgtcagggcaagcgatatacgaaccagtatgtaataaatcagcttcatcagtccatagtcattttataacccaacccataaacggctttcacctcaggagtcgcaccggcctccttcaaatgctttcttaaattctttatttgagcatagataaaatcaaaattatctacttgatctatgtgatcaccccaaacagattcggccatcgtattcttattgaccaaacgtcccggacgattcatgaaatagaccagaatatcatactctttacgattcaaatccagttccttaccatctacctgtacacggtatttatcaggaaaaacttctatgtttccatattttatggtaatttcaccattctgctgattccgtcggataacactcttgatacgtgcattgagttctgccaaatgaaaaggttttggtaaataatcatctgcccccaactccaatcccaagaccttatcttccaaagaatcttttgccgaaataataatcacgttctcacgtttacgcatctctttgagctgttcaagcaactccaatccattaccatcaggcaacattatatccagcaaaatgcaatcgtaagtataatcctctattttttggatacctgtccgaaaatcaggagctacttctactatatagcgttctttttctaatgaacgttgaactacttcacgtaaattaacatcatcttctactaataatatcttcataacctttgatatttatgacaagcaaagaaataagataattctgaaataatactgaaatagagaaaaaataattggggatgtggacatttcttaaaaaaaagtgtgccaagagctcgaaatatccctcgtattccaacgtcatttcgctcttgacacacggtcacaaactctctctttaaaccctaattattcgatttccatttttgaaaaatccatctgtttcacttcattcggagtcggctcgtccatcagttcaaaaggaactgtcacttcaccgttaacagccgaattcaattttatcttaacacctttcattccgggaagagcctcaatagaattaaggttaaatgaaacagctccatttccataaagaccggtcatatcatcataggtattataacgcaactccaatgtaagataaccttcagaatccaaagctaagggagttgtatgtaccaaactgatgcgatgcttttcctgtgcaggcagattctgcgtaaaaacaatattcatatatccgccacctatccacatattcctcttttcaatataaataggatcattccccaattctgcatcgttttcttccgtaagttcctcaacatctttagtcagaatggagcgaataccctctatcttgatagcgcaatcatatccttgaaaatcatcatacaacggattgaatacgataacaacacgctctccatcctccggcgaccaaggaaaagccgatgcagcaggccacagagtcccccacgtatcacctgtcagtgaataagtgtggctgtctttagcttccacagtagcccaatcaacagcaatatcacctattgaatatccatcactatcgtcacatgactgaaacataaaagaagtagcagccagcatgattccacaaaaatgagctaactttttcataatctctctgttttttatattctattcattaaagaatgaaaatgatggattactgcatatacccttttactatttaacgtattttcagcaaaagttatagatataaatttcttcgtaaactcaaatataatcacacaatattcccttttccacgaaaatatacgcaagattcccctacggtaaatgagaatatagttcaaatagaaagcaactatcccttcacactccgattaatactttctatataatccaatatttctttgcgccctagctttttctcagaagaagacaagaaataaggaggcaattcttcccactgttcactcagcttcttcagatatttgttcacattatcttttgccttccctcccgacaatttatctgctttagtaaatatgatagcgaaagggacttcattttctcccaaccactccataaattccaaatcgattttctgtggctccaagcgacaatctatcagcacaaacaaatttgtcatttgctcgcgccccaaaatataatcttctataattttctgaattttatctacctgcttcttacctctcaaagcaaagccataccccggtaaatccaccaaataccattcgttattcactaaaaaatgattaataagcaacgtttttcccggagtggatgaagtcattgccagcttaggacgtttggtcagcatatttatcaaactggacttgcccacattggaacggcctataaaagcatattccggcaaattaccttgcggacacttatctacctttgtattacttattacaaattcagcactgagtatttccatatatttttttatttttaatacttaaacaagttaaccccataaaagttaagaatccattgaacatcagaatctcgtagccaaactgataaccggtgtaattaaacaccaccctgtctatggcatagcacactagcggagatgctatcgccacataaggcacaaagcggtcacgcgggtgcaacttggtgaacagtccgaacacaaacagccccagcaacggtccgtaagtataagaggctataacatatatcgcatctatcacactcttattattcaccactttaaatagcagaatgaacccaataaaaattgccgaaatgcagaaatgaactatcttcctgcgtttttccgcttcttgttcgggcaaatgactgatacccataatatcgatgcaaaagctagtggtcagagcagtcaatgcagaatcggcactcgaaaaggctgccgcgataatcccgattgtaaagaaaatcaacactgcatatcctaaatgcccctctgccgcaaacagaggaagaatatcatcgcctcccgccggcaatgccatccctgtccgacttgccagcaacagcaacaaaactcccaaagacagaaacaggaaattgaccgggacaaaagaaatgccgtagcaatacatattcttttgtgcttcacgcaagttcttgcatgacaagtttttctgcatcatatcctgatcaagtcctgtcattacaatcgtgataaagatgccgctgaaaaactgcttataaaagttctgtttggaatgccagtcatcgaaaacgaaaatgcgactatgttcattgtccttcacggtctgcaccactcccgaaaaatcgagttcgagttgtcccgccacattatatattataagtcccaatgccagcaaaaggcacaaggtctgcaagctgtcggtccacacaatcgtgcgaatgccgcttctgcgcgtgtacagccaaatcagcaatacaatccctatcaccgtcacgacaaacggaacctcgaatacatcgaacacataatgctgaagtatcaggcagaccagataaagacgcgctgccgcccctataatctttgaaagaagaaaaaaagaagctcccgttttataggaacatctccctatcctatcatccaaataggaataaatggaggtgagattcagttcatagtaaagcggcagcaacacatgggctataataagatagcctacaaaaaagcccatacaagtctgcatataagtcatatcgatgctacgcaccatgcccggaacagagacaaaagtaactcccgacaacgaagctccgatcatgccgaaagaaacaacataccagggagaacggcggttaccacgaaagaaagcatcgttatcggaattcttgccggtgaaacgagccacaagcaacaacattccgaaataaagaaatatggtcagcagaatataaattccgttcatgttatttttttgactgcaaatgtacgcaaaatcacttaaattccgtaagtttgcagccattatataggaatttaatcgatgaaccaacaatacccttccatattattagaaaaagcagtaggagaatttgccaaactgccgggggtgggacgaaagactgccatgcgcctcgttcttcatcttctgagacaggatacggctactgtagaagcatttggcaatgccattattacattaaaacacgaagtgaaatattgcaagatctgccacaatatatcagataccgaaacatgctgtatttgttcaaacccggtacgtgacgcctccaccatttgcgtggttgaaaccatccgtgacgtaatggccgtggaagctacacagcaatacaaaggactgtatcatgtactgggcggagtgatttcgccaatggacggtatagggccttccgacctgcaaatagaaagtttggtggaacgtgtcaaaaacaatgaagtgaaagaagttattctggcacttagttctactatggaaggagatacaaccaacttctacattttccgcaagttagctgacaccaatgtcaaactcagtgtcatcgcgcgaggaatttccattggcgatgagttggaatatacagacgaagttactttaggacgctccattgcaaaccgcacattatttacaggaacagtataattattgaatttaaaaagatacaatggaagaaagaataaataaaacagtgaaatatctccaggcagaatatatcatgatatggatcttgcctatagtgttagtcatcctctacgaaacgggaataatgacggaaggagactatgccggtgatgcccgcatggactatatactacagacaatcggtatactgctgacagtaggattaatacctttatccctccgactattcagcctgtcactggtaaaatgtgtcaaactactttcactccccgatgccctgagcagctatcgccgttggagcgaaatcagattgggactattggtagtgcctgtattgacaaacttgtcgttttactacctcacactcaatactaccggtctcttttgtgctgccatgtctctcattgcttccctgttttgtgtccctacccgcaaacgtatatggaacgaactcgacttattaaaggaagaaaaggaggaagaataatggcacgacaattagaagaaaacggaattaagcttcgcgctcccgagccggaagatttagactgcatgttccgattcgaaaacattgttgatttatgggatatcagtaataccacaggaccttactcccgtttccatctgaaacaatacattgagcaaacgcaaaatgatttatttacagaccgccaactccgattaatgattgaaaatagcgacagacaggtggtagggattgtagatatttgcaattttgaccctctgcacagtcgggcagaggtaggcatcgtcatagacgaagcacaacggaggaaaggaataggcagacaggcgctatctctccttgaaagccactgtttccattacttgggtatccatcagctgtttgcatatgtagacaccgcaaacaaaccctgccgcaagctatttactacttgcggttatcaagagtgtgcactattaaaagattggatgcataccggcaaaagttatcgggatgtgataatgctccaaaaaataaatttctagttaagcatcggatattgaggataacgtgcccaaatagcatatctacctcctaatttagcaagcatggtatgccataaatcacagaaattcaaatcctgcaacatctctttattactatccactatcaaccatgatttctcttctatctccttaatcaattgccctttctcccatccgacatatcccgaaaagaaccgaaataccccttctaccggtttaccatcaagaatatatttttgcacctcaccaaaattgccattcacatataatccattagccaaaggtattgctcccttcaaatcttctaacgtgtgcaaaaagaaaatagtttctctacttaccggacctcctttatatataggcacacgctgtgcaaattccaatggaggcaacagttcattcaacaagatatggttacgaaattctttattcaaaattattcccatactaccttcttcattatgttctagcaacaacactaccgaccgggttaaatcatgaccacgaaaaaaaggagatgaaataagtatatcccctttcataggtaataccctaccagactctatctgaaaaacacgcatatccatagttaacttcttctcttttttaattgtaataccaatatacggaataaaatcaaattaaaaaaacatctcctctcctttttttgaaaaattattttccttgaaatgtaaatgattcactatcaagaccaatagaaaaaagttcagaaaaaaaacgttcaaacatttgcagaattcaaattattgcgtacctttgcacccgcaatcgagagagaaagcattgaaagaaatacaagttgaaatattggtgcgttagttcagttggttagaatacatgcctgtcacgcatggggtcacgggttcgagtcccgtacgcaccgcaacttttttttcgataacaaatatattggtgcgttagttcagttggttagaatacatgcctgtcacgcatggggtcacgggttcgagtcccgtacgcaccgctaaaaaggaatccgctaaaaacgggttccttttttcgttaagccgaatatatctacataaataggcgccctccctacgttgtttcattagccggactaagcgttttcatcctttctattatgcctgtctgtccgtcagattactacagtcttcggcagcggactgtatagtccgctactgtagaccgtacagtccattgcagtagactgtacagtctgccgtcgcagactgtaataatcttccgtttaaaagaccttggccgaccatgggaaacggcttattcttccctttgcttgtggtatgacatttaccccccaaagaataataagtgacccgaattttctcaaaatattatgctcacacactttttgacttaatcccaattaagtatatatttaccaaaatcttactagtatttaccgatattttcacctattatgataccgcctttgataccattggcgataccgtcttgatatttttcttgccagactacgctgtctttcggattaatcatttgcagataaagagtcttacttttatccgataagccgaaggtttgtacatccagctgataggctttgaaccaaaggtcttcaccggtctcgtagatgtctttacttgtttgaaaatagattaattcagaaggacgggaaaaaatatcttctctcatcttacagattacggaatctatggattgttgagaataggtcataggagcccttaggtatattcctatacaggaaaataattgttctgtatatgcttatttctttcatatacaattcttattttcttaatactctaaattcacattttgtagttcccaccaatctatcaccatcaacgccttctacgaccccgataaatccggtattgatgtcagaacaatagaaatgaacttccgcttctcctttttcatctgtaataactgacggagcccataataaagtattgcgagcatcaggggtggagagctgcatgtctatttcgtccggttggtaaaattcacgagaggtgtaatatcctttggtacgccagaggttgttcatccgtaacaattcctcttctgtgaactctggtccattgtaggtaattgtttttatatcagtgactatccatgcgccatttttccctatgggttcatatttaataagttcataatcttttccgttaataggtttagatttcttacggaccggatagcacgaaaagcaacctgtcgggtggtgtgaataccccatatagtcattcagataaccattaggtgttctactgttacaatcacatacccatgctttattcaaatctacttttgctaagctatccaaccgccccatcattttatctctaaacggtttatgtccttttgctgttatagtcacctcactcagtagtatagtactgtcactgcctatcacaggcaaatctagaagctgttccctcttatggtgtgacagttccgctatcggataataataaggcctcttcttctttatactatcaatcaaaggaaagtaatccactaattccaatgttggtttgaactctttcgacaacatgggcttcaaatacacatatcctccctgaagtgctttcatcttgtccgggtcaaccataaaatgtccggtggaatctgtccaaataaactgagagtttccctttgcaccgaaaatctgaataagctgttctgccccttcattttgtttggcctttttcttactcttaagagtttgtatgccattgatttcgtccgtcaaaaaaggctgtccttgataatcaggttctactgcattccatacatatcgcctccagccctgagtaagcaacaacagatccaatgcttcttttctgtcactgttcttttcatcaaaataataagtggggttacagattctgcctcgtatctgggatgaaagataacaataagctaagatattcacagggtcagcaggattgttatatgcccggtcgtatacgctaatacccagatttgcccttaccggtttgccttcttcgtctgtcgcttttatttttattgacgccttttcccgaatggcaaaacttgtcttcgtgggttcggccgttatatacagtctcttttgaggatgaacatagaccagtcgttctgcaacgggctgcatggaactgtcgaaaagcgtaaactccgctatgccctgatacaggaaattatcgagcgggatggagattttaagactgtcctttaatatccctttcgccatacagcaaatcattccgcgcatttgccccaagagataaatttgccggtgtggaaagccttcggtttgtgaaaggacaaaatccagatgctctttatcttgcccgcgaaggttcagaaccattccttgtgaatgaatctcgggtaacggatagctttttccattcttcaattcaatcctatattttttattcactaagggagtgaaggaaacagcccccattccatcgtgcacgctttttattccgcacaggaacttatcatcttcatagatagttccttccacagataccggatttcctttaccatcggttgctttaaaagctaacttggagaaaaggccggacacaagattccctccttcgggaaatgtttcaaaacgaaagactgtatctttaagactctccgttacttccgaacgggctatattctttactatccttattttgcgggtaggagttattccgatagtatcattcttgtaaaaagagtgctttgtatagccttccagaaaataatcgccttccgaaagtttttcgtcgatgtaaacatgaccggatacgataccattctctatcggatacttttcttgccagactacgctgtctttcggattaatcatttgcagataaagagtcttacttttatccgataagccgaaggtttgtacatccagctgataagctttgaaccaaaggtcttcacctgcttcataaattcctttgcttgtttgcagatatatacactctgaaggataaccagacaattgtttgttaaccgaagagaacaaactatctatagtacttgttccattcgttttttcatttgcaagaaaattctgtccttgcgcatatatagaaaaagaacatatgaagtataataaaataatctttttcataactctgtagttgcattttattatgaaataatatgtatacaaaaataataaaagtgcaattcattaacaatcagaattacactttttttctgccaaagaattatattttcaacctatttctcggcttgttctctatcttttagaatgtggcttacacccagtttttctttaaaggaaaagcctatttttgatttcgaagtaaaaaaacatatccaatacttgccacagacttttgttactgagtcaagaaataagaaaatcaaaactgtttcttaatttagaatacattttagttgtatcttctattctttttctcttactttgtaaaactaacatatcagtattatcgcgtttacatatttgaaaaccaaaattagcatgaaaaggaatatattattcatgttctttttactgccttttatcgctatggggcaaacgtacaaatatatagggatagaagacggactgagcaaccgaagaatattcaacattcaaaaagactcaaaaggatatatgtggtttcttaccaatgagggaatggaccgctataatggcaaagaaataaaacactataaattagctgacgaagaaaataaaagaaatgcccaaaatcatcttacatggctgtttcgagagaaagaaaacttatggattgtaggtaaaaccggaaaaatatttgaatatcatcatcagtttgacagatttatacccacctataaacctgccaacttatccttgtctatttcatacagctatttagacaatcgaggcaatatatggctgtgcgacaaagattcgattatactatataatacgcagagtgatcaaatttcacgtatttacaacccactgagcagcaacattacctctatggtacaatcagacaactcccatttctttattgcgacagaaaagggaatacgctattgctgtataaatgacaatgagttacagccaattcccattcctccattggatgaaatcaaagggcaaatcagcgaactctattatcacagagtattgaaacgactgtttatcggaacattcgaaaagggcatctttgcctatgatttgcccacgcgccaaattcttcattccgaaacagatttaagcgatgtcaatattacccaaatcagtgccctgaacgagaatgaacttttaattgctaccgaaggtatggggatttacaaaattcaggctaacagtggcgtgatacatccttatctcaccaccaactacgaaagcaataacgagatgatgggaaatatcatcaatgatatctatgtggatgaagaaaagagaatatggcttgccaattatcctacgggaatcaccatagtcgacaaccgatatcaaaactaccactggataaaacattccatcggcaacaagcaatctctgattaatgatcatgtgcataccatcatcgaagatagcgaaggagacttatggtttggtaccggcaacggtatcagtctttacaatactaaaacacgtcaatggcattcgttcctgagttcttttgacaaacaactcaaagataagaaccatatattcattgctttgtgcgaagttactcccggaattatttgggcaggtggatatacttccggtatttacaaaattaacaagaaagcactttctgtggagtacttctctccttcattgctgacgcccatcaatatgcgccctgacaaatacatccgagatatgataaaagattccgaaggaaatatctggtccggaggatattacaatctaaaatgctttgacttaaaaaataataaggtaaaattataccccggggtaaattcaattacatctatcagagaaaaagacagtgaccacatgtggattggcactgctaccggtttgtatctgctaaataagaacacaagccaatataaatatatagagattcccggagagtctacttacatcaatactctttatcaagctcccaacggattattgtacgtcggtaccagtggttccggtctaataatttataaccccggcaaaaataccttcaaacaattccacacagataattgtgcactactcaccaacagcatctttaccatactgcccgaagtgaacggaaatatcataatgagtacagaaaacggtatcacctgcttttccagcaaagataaattattctataactggactaaagagcaagggcttatgtctgccaacttcaatgcttctgccggtgtattactcaaagataaaggatttatattcggcagcatagacggtgccatcgagtttcccaaggatattaaatttcctcattatcaattttccaaaattattctaagtgatttccgactatcctatcagcctgtattctccggtgaagaaaattctccattgacggaagatatcgatgatataaaagtattgaaactgtctcacaatcaaaatactttctcactaaaagtatcgaccatcaactacgactttccatccaatgtgctttacagctggaaactggaaggcttttatactacctggagtcccccgagagcagaaaacataatccatttcgccaatctgaaacccggaaaatacaaactgtatattcgtgctgtgtccaaagaggaacagaatgtcatattcgaagaacgcaccatcgatgtcataatagcacatccggcatggctcagtttttgggctatattatgctatatagtgctagggatactcttgctttttatcattaccagaattatctatctaaaaaaacagaaaaagatttccgatgaaaaaactcaatttttcatcaataccgcacatgacttgcgcacgccgctaaccctgatcaaagctccattagaagagttgagtgaaaaagcacagttgacggcaagcggactcaactgtatgaaaactgctctgaaaaatgtggacgctttgttacgtttgaccaccaatcttatcaacttcgaacataccgaagtctattcacctaagctatacatagctgaatttgagctgaatacttatatgcaaaacctatgcaatggttttcattcttattcagccacaaagaatatagattttacttacgaaagtaatttcaaggaaacgaaagtatggtttgacaaagaaaagatggactccatcttaaagaatatcatatccaatgccttgaaatacactcctgattatggtcatgtaagcgtctgcgtcaccgagaccaaagactcttggaaagtcaaggtatctgatacaggaattggcattcctgccaaagaaaaaaagaaaatattcaaactgcacttccgtggcagcaatgccatcaattctaaaataaccggtagcggaatcggactaatgttggtatggaaattggtaaagcttcatggaggaaaaatcaatatcgacagtaccgaacatcaaggaacagacatcagacttattttctataaaggttatgagcatctgcgtcattacagcatcgtagagccgaatcaagaactgccggtcaaagaagttgtcgaacaagcgaaagttacagaaacgcccgaaaagctacaggaaatgattgaagccgcattattacaacgcattctcatcgtagaagacaatgatgaattgcgcagttatctcgccacatcacttgcaggagcttataccatacaagcttgcagcaacggaaaagaagcattgattatcgttaaagaattttggcctgacttgatcctctctgacattatgatgcccgaaatgcgcggagatgaactatgtacagctattaaaacaaatattgaaacatcacatattcctatcgtattactcactgcgttaaacgatgagaagaatattctaaatggattggcaaccggtgcagatggttatatcaccaaaccattcagcatcaaaatgctaaaggcaagaatatccaatatactgtccaacagagatttattacggcaaagatatgcgatggccactaaaatggattcagaaaagccgggattgttgcctgctgaagccaacacactggactggaagttcataaccgacgtaaagaacaatataaaaaataatattgataatacagattttaccgtagactctttatgctcattacataacatgagccgcactagtttctataacaaactgaaagcattgacaggacagtctcccgccgattatatcagagacttccgtctgaatacggctgcacaattgttgcagaaaaaaaagtactcaattacagaagtagcagaaatgacaggattttgcgacagcaaatatttcagagaggtatttaaaaagcacttcaatgtaagtcccagtaagtatgggaaagaggataaaaaataagtataagatatattcaggcaggcagttacaacagttccttacacttatatcataaactgtaggaatgtgtcaaaaccaaaccggtctatcccatcgtcagctgtaggggcagggtttgcctgcccgaagacacaaagcaaactgttttcgggcgagcaaacctcgcccctacaaactaaacaatacctcattacccttctatttcactcagttccaaccaacgcattgatttttcatcaatcaaatcattcagttccggtaatcgcttcgatttctcggtcagctcttctacactcaaggttccactacaaagggcagattctatatctgctttctcctgttccagttctcctatttccttttccaaccgctcgtactccttcctttccttgaaagtcatacggcgtttatcattcaaccgtacacgtgccgttttctcctctttcggcttctcggcttccttctcacgttgctctttcacttcgcgccaatctctataatcagaatagttgccggggaaatcacgaatatcaccttgtcctttgaataccaataagtggtctaccaccttatccataaagtaacggtcatgactcaccacaatcacacaacccttaaagttctgaagatattcttccaacacctgtaaagtaataatatccaaatcattggttggttcgtccagtaccaaaaagtttggattacgcattaacaccgtacagagataaagccggcgccgctctcccccactcaacttatacacataactgtgctgcgtttcaggtgtaaaaagaaaatgctgaagaaactgcgaagctgtaaggcgcttaccattgcccagttcaattacttcggcaatatcctgcaccacatctatcactttcatctgttcatcaaaccgtaagccatcctgcgaataatatccgaaacgcaccgtctcgccaatatctatcgtaccgctgtccggcttctgctcacccatcagaatcttgataaaggtggattttcccgtaccgttgtttcccacaattcccatcttctcgtatcgggcaaagatataagagaaatcgtccaaaatcttcaagtcaccgaaactcttgtaaagatggtctgcttcaaaaattttcgagccgatatatgacgccttcatttccagcttcacattaccgtcattgaaacgttgttttgccaccttttccagctcataaaaagcctcctcacgataacgcgctttatgtccgcgtgcctgtggcatacggcgcatccattccaattccgtacgatataaattattggcacgggctatttcggcatttgtcgcctctatgcgttcttggcgtttttctaaataataactgtaattacctttataagagtaaacctgcttattgtctatttcgataatttcagagcagacacgatcaaggaaatagcggtcgtgagtcaccatcaaaagactgatattgccacgtctcaaataatcttccaaccactccgtcatatcaaggtcgaggtgattggtaggctcatccaaaatcaggaaatcaggctccgtgataagcacattcgccaaagcaacacgtttgagctgtcctcccgagagatgcttcacctgctgattgaaatcacggattttaagttgcgaaagaatctgttttgcctttcgttcataatcccaggctttttcatgttccatgcgtgccagcaggtcctccattcccggattaccttcggtttccatacacctttcatattccttaataagttgcacggtagtattaccgtgatggaaacacgcttcaagcacagtcagttcttcgggatagtgaggatcttgctccaagtagcctacacacaaatcacgacgaaacacaatgctgccttcatcataaccttcttttccggctataatattcaataatgtagtcttaccgctaccgttcttggctatcaaaccgatacgttgtccttcggctaccccaaaagaaatttgattaaataaaaccaaatcaccaaacgattttgtaagtccgtctatctgtaaatatggaaccattctcttttttaattaatatcatccaacacagcttccgcttcgcgcttaattttcttaaattcagccttcaggtcacaaggaaggtttttcttcgctttattccatactatggcggcaggatcaatcagcatatcggaattcataaactgcaaagccggatattcttcctttccgtctatcactgtcacccattccatgccttccatctcattaaccagaattgtgccaaaagccacaccgaagttctcccaagccatacgctgttgaggttggaaacgcccgctatccattacttcctgaatcttttcgatatcctcttcctgcgaagagaagtcttttgtaagctgtttctttatcgtacttgaggcccattcataagcactattcacctcgcctatctcaagcactcgaataggaataatctctttaggataagccttattttcatggcgtatttctatgctggcaataatattctcggcaacagttttatcaccacccttagctaccgtaaaagaacattccacgcatatatcacgacaatcaataacccaaaaatgagaggtgtaccaaatgccttcttcctgaaagctatccacactgtaagccgattgcacacctcttatcagggtcaattcagcagccggattttctttcaattcataactgacacattcttttccatagtttgtgtcagcacctctataagccgagatacggaaatttccactccatttgtcggggtcataaaataaaaaactctcttctgtatcttcaaactcacgccaacccgcaggatattccagcgagaaccagccaccgggagcaatgtatttcatagttcctattttttatatttatttatttcaccggtaatacttcaatccaataatcatccggatcattaatgaagtatagccccatctctgtattttcataacatacacatcccatttctttatggaatttacgcacttcgtcataatctccttctacacgcagacaaagatggctttcattttcgcccaattcataaggctgcggatgatcacgtaaccaagtcagttccagcaagaagttactatgatcatcagccatatatactaaaataaaagaaccatcagcagctacttttcgattggcttcatgcagccccaatgcagtttcgtagaatcgaatactctgttccaaattcgttacatcaatattaaaatgatcaaatcttccttttactttcatatttctttaaatttttataatctgtccgggatactttatttctataaaatgtgttccatgggtttctgccaaagcacggaaagcatttgctttcccatagtcgggcgcgaaatgcatcggtacaaaaatatttgtttttattctcttcacaaactgttcgggacctctcatatattcacgtcccaaacgcggatctacaggaaacattgctacatccagttcatgcgtataatcatacaggttatccacttcatgaaggaaattcttttcatatcccttccattcctgttccgtactttcttccatccaatgccagttattcaaatcgccggcatggaaaaatttcttattctctacttctatcagaaaagatactcctacatccgtagatccgaatgccctgaccgataaggtttcatcagcatattcctctccttttttcaaccagacggcgtcttctttctgcgctcttctgtgtctcagaatatccttcgaaaagatatagataatgtctggtcgctgtgttttccagtccaatacttccttattgaaatgatctggatgaaaatggctggccagcacatataactttccggggcggtgcaaaagttcatcatgcacctttccctgttcaggtgccaccaccggttcttcaggctgttcattcatcaacctgcgcaaagcagcttccgcctgtttatcttctgtgtcacggtaataatccatgataacagtatacccatcgcccaacagggcaaatccgctatgataaatataaactaattccataccttttataacaaacttacttaccaataggttgtacttgcgcacgtgtcttcttgtctatctccagaaacatataattcacttttcccgaatggataagcgattcgttttctctatatttcttattggcatattcttttgatttctcaaaagtaagtttcgacatttgattctgcgatttccccaccatggtagaatccagtttttcatcaggaaagaaatcgtccaaattcacatctccaatcattgttgtctccagaaaattcatatcggtgtgagtcttgtctgtgtaataacccacaaacatgtgcccggggatacgtaccaatataggattgatatttatcgccttgagcaatgaggcgagcaacacgctcccatctacacagtttatctgcgaagactccaatgcatcatccaacgtacgcacacgctgagtataaaccacattcgacgacaaactgctattggttgtggaactatatttaaagttacgtttttgcaatacattccataaagcataaacttgcttatccacattttcggattgacttgtatctccctgataccccaggaaacgattgactaagcgcgtgtccaatgcttcacgcaaaagtttgtctatctgcggatgttcctcgttcacataagcggcaaaaaactcacctgtatcgtgaaatttcattttatcgtctacataaccaagcggacactcattgatactccgcatagaaatggttttcaatcgctgaggcattttttttctgttaagttccgccttgacagatatactaacgggcactgcctgattattgtcacgcaaagcctgatagttccaaatgatgtcggggaaaacaagatattccttaccgggcttaggcaaaataaattcggaaacagattcagagaagaaaggagtttcagccacttcaatacgcaatttactattggcatagctgttttttatacgaatagcaatacctgatttcggattaccaatataatcggaatcggcaggaacaatcaagtctccatccgtagtagctgtagaaagtatagtagccggaaacacattcccccctaattgatctgttatttcgaaaccactccgaaacggttcatagcgataaacaaatacagaaaatgccatcaccaaaatgatagatagcacaatagttgaccactgccatctatcgagttgtttcaaatttactttcctcatgttcattaatccatttgcccgacatgaaaccgaagtctataaccgtcaccagactaaaacttatattcactatagggtcggatatattcctcccctacaatagacaaaataacagctgttattttgcagcgatgctttcgatttccaccaatgcacctttcggcaatgccttaactgctattgcagaacgggcaggaaaatcaccttcaaaatacttggcataaacagcattcatttctgcaaataaggacatatccgctaaaaaaacagtagtctttacaatatttgcagtagtcaaaccggctgctgccaatacatgcttgatattttcaaaagcctgagcagtctgttcggcaactcctcccggaacaaattcaccggtagcaggatctacaggcaactgacctgagagaaataccataccatttgcctcaatcgcctgactataaggtcctatagctgcaggagccttttctgtaaaaatcacttttttcatgtttattcaatgttttaataataaaaatcaaattttcatgggctaaattagcactttttccgctataaaacacagatatgcctaaacaatctgacttttttttacgttcatttaacatcggtaccgagagaaacataggccgatattttgaagcgtctttttttattaattttaaaaatatggtatttttttctcctatttgaagagtttttcaaaaaaaacagctacatttgcatcagtaaacgcagaatttgccaatctggcaagtttcgtttacgttccgatataatatctataacatattaaatcccgtaatcataaattatgaactgcgatctcaagacatttcatgtgccgattgcgttctttgattacacaataaaaaaatattttactaataacatatactatatgtataacatcattcaattaaacgacaaagacttgtcagaattacaatcaatcgccaaagagttgggtatcactaaaacagagtctctgaaaaaagaagaactcgtttataagattctggacgagcaagcaatagtcggagcaaccaaaaaagtagcagcggccaaagtaaatgaagaccgcaaagaaaaccagcctaaaaagagatcacgtatcagtgttaaaaaagaaggtgacaaggtatatactgccaccaaagataaagcacaaaagctagaagcagctactccaacaacggctgcacacatcgcagaagaggctgaaaaagaagcagtttccacagttgagacagctcaacccatccaagaaaaaacagtaacagaagcagttgaaaagtctgagccgaagaaaagaggccgcaagccgggtacgaagaataaaactgctgccaagacagaagaacaacctgctacaacagcagaagaaaccaataacactactcctcaaaaagtttcggcaaccaatactccgaaagaaaaagaggtaattcttcccgaattggatttcgatagcgatacagacgacttcattccaattgaagatctcccttcggaaaagattgaacttcctactgaattacttggaaagtttgaagcaaccaaaaatgaggcacctgttcccactgtcactccagcttctaaattccagcctcgccaaccacgcgaacaaaacccgagatacaacaaccccaatcaacgcaacaataataattataacaaccagcgtccgaccaacaataacaacgcagaaggtctggaatctccacagcaaccccaacaatcggctcccgagcgtaagccggtagaaaagccttacgaatttgaaggtattctgacaggaaccggtgttttagaaatcatgcctgacggttatggtttccttcgttcatcagattacaactacctttcttcgccagatgatatttatgtgtcacagtcacaaatcaaactatttggtctgaagacaggcgatgtagtcgaaggctctatccgtccacctaaagaaggagaaaaatacttcccgctggtgaaagtagaaaaaatcaatggtctagaccccggactagtgcgcgatcgcgttccattcgaccacctcactccgctgttccccgacgaaaagttcaaactttgcaaaggtggttacagtgataacctttctgcccgtgtggtagatatgttcgcccccatcggcaaaggacaacgtgcactgattgtggctcaacctaaaaccggtaagaccatcttgatgaaagatattgccaatgccatcgctgccaatcaccccgaggtctacatgattatgctgctcattgacgaacgtcctgaagaagtaactgacatggcccgcagtgtcaatgccgaagttatcgcttctacatttgatgaaccggcagaacgtcacgtcaagattgcaggtatcgtgctcgaaaaagcaaaacgcatggtagaatgtggtcacgatgtcgtgatattcttagactctatcacccgattggctcgtgcatacaatactgtttcccccgcttcgggtaaagtattgtcgggtggtgtagatgccaatgcattacataaacccaaacgtttcttcggagcagcacgcaacatcgaaggcggcggttcacttaccattatcgctactgcattgattgataccggttctaagatggatgaagtaatcttcgaagaattcaagggtacaggtaacatggagttgcaactcgaccgcaaccttagcaacaaacgtatcttccctgctgtcaatatcgttgcatccagcacccgccgtgatgacttattgcttgataagactacactcgaccgcatgtggattctgcgtaaatatctggcagatatgaaccctatcgaagctatggattttgtaaaaagccgtttggaaaatacgcgtgacaatgaagaattcctaatgagcatgaactcataaacaaatcatagtttcatatacactataaaaagactgcgtgcacctcctgcagagcacgtggtctttttatttatctataataataccaacacaaacctttctattattttgcaaatagttttttgaacaacgatatatgcatactaattttctatacatttttcctacaaataacagccatacccacaatccataaatcgaaaataatcttccttccaatataaagctaaaaaaaatacatataactttgattagatttagacattcggtgttagtccgtaacacttattacctccaaattcataaaatcatatccccaataaaaactccattaacattatacaataaaaaatccggtcaattcatcaaggatcaaccggatttgtatattaatattttagtagaatttagaatggtaaatcgtctttctcgtctgttgaagcaaaatctaccggagctgccggggctgcattcatcggcgggaacggagcatcaggtgctacaggagcctgagcactcacacgatccactttccaagcacgaatactgttgaaccaacgcccgttccactcacgtgcatcaacatcgaaatatacattcaattcttcacccacctgaatattaaactgcgctattttgtctgcaccaaatacatcaaaacacatcttacgcggatactgatcgtgtgtctcaatcacatattcctgcactttccattcatttccagtttttgagactccgcttctcggttcgagaaccgctataacttttcctgctaattccattatgataaaatttaattttcggcacgaaattacgcttttcccggcgagtaaactaattttttcgctattttttgcgtgcaaaccataatcttttcgtaactttggcagttaaatgagacctatatgtagaatataaatataataatataaaactatgaagttcatcgtttcaagtactggattattcagtcatttacaggctattagccgcgttatcaattctaagaactcgctgcccatccttgattgtttcctgatggagctgacggatgggacactgttcttaactgcatccgacagtgaaacaaccctgtccacctctttggaagtgattgagaatgacggtgacggacgctttgctgtttcttccaaaaccatactcgaagccctgaaagaaattccggaacagccactgacattcgaagtgaatacaaataacctggaaatcaccgtacaatatcaaaacggtaaatacagtctcatgggacaaaatgcagatgaatatcctcaggctcctgcactgggcgccaatgctgtccatgtgactataggagcacctgtaatgttgggaggcatcaaccgagctctgtttgcaacagccgacgatgagcttcgcccggtgatgaatggtatttattttgatatcactaccgaagatatcaccttcgtagcttctgatggccataagttggtacgtaacaagacttttgtggctcacggcgatgaaaaagccgcatttatcctgcccaagaaaccggcaactttgctgaagaacctcctgcccaaagaacagggagatgtacaaatcgacttcgatgaccgcaatgctatatttactctggagaactacagaatggtatgtcgtctgattgaagggcgctatccgaactacaattctgtcattccgcaagataatccgcataaagtgactatcgaccggcagatgcttatcagcgctttgcgccgcgtttctgttttctcttcgcaggcaagtagtttgattaaattgcgcctcagcgaaaaccagatacagatttcggcacaggatatcgacttctcaacctcagcagaagaaacactgatttgccaatatgcaggcaatgccatgagcatcggtttcaaatcgactttcctgatagatatcctgaataacctgactgcccaagaggtaattgtagaattggcagacccatcacgcgcaggtgtcattgttcctgccgaacaggaagagaaggaagacgtgctgatgctgctgatgcctatgatgctgaatgactaaatataataaattacaactcgaaacagaatgaaattgaatttgaagaacccgattgtcttctttgatttagagacaacaggtactaatataaacaccgacagaatagtagaaatttgctatctgaaagtgtatccaaacggcaatgaagagaccaagaccatgcgcatcaacccagaaatgcatatccctgaacagtcttcggctattcatggtatctatgataaggacgtggccgactgtcctactttcaagggagtagctaaagacattgcacgcgatatcgaaggatgcgatttggccgggttcaactccaaccgcttcgatatacctgttttggcagaagaatttcttcgcgccggagtggatattgatatgatgaaacgcaaatttattgatgtgcaggtaatttatcacaaactggaacaacggactttatcggctgcttataagttttattgccaaaaaaacctggaagacgctcatactgcagaggccgacacccgtgctacatatgaagtactgaaagcacaattagaccgttatcccgaagaattacagaatgatatggcatttttggctgaatactccagtttcaacaaaaatgtagactttgccggccgcatcgtatatgacgaaaagggcgtggaagtatttaactttggcaaatacaaaggaatgtcggtcagcgaagtgctgcaaaaagaccccggctattatagctggattttaaacggtgactttacgctgaacaccaaaaacgtattgactaaaatcagactacgcgaatcaggactgactactaaatgagcatgaaaggaaagaaaatcgtattaggtataaccggaagtatagccgcctataaagcggctatactcattcgaggacttatcaaaaaaggagcggaagtgcaagtagtcattacaccggcaggaaaagagttcatcactcccatcactttgtcggcactgacaagcaaacccgtcatcagtgaattctttgcacaacgggacggcacctggaacagccatgtggacttaggcttatgggctgacgccatggtgatagctccggcaacagcatccaccatcggaaagatggcaaacggaatagccgacaatatgctgattacgacttacctgtcaatgaaagcacctgtctttgtggctccggccatggacttggatatgtttgcacatccttccacccaacgaaatctggagacattgcgctcgtatggaaatcatatcatagaaccgggagaaggagaattggcaagccatttggtaggcaaaggacgaatggaagaaccggaaaaaatcatagaagaactggaaaagttctttgaacagcaacaggatctggcgggcaggaaaatcattatcacagccggtcccacttatgaaaaaatagacccggtgcgattcattggcaattattcttcgggaaaaatgggatttgcgctggcagaggaatgcgcctcacgaggcgcccatgtaatcttgataagcggtcctgtcacactgaaaacacagcatccgcacatccgccgcattgatgtggaaagtgccggagaaatgtatgaagccgccagccgtgaatttaccgatgccgatgcaggcattttatgcgctgccgtggccgacttcacgccggaaagtgtggccgaccataagattaagagagaaaaagacgatttggtattacaactgaaaccgacacaagacatcgccgcttcgctgggaaaacaaaaaaagccgggccaaaagctggtggggttcgcactggaaacaaacgacgaacggcagaacgcacaaggaaagctggaacgcaagaactttgatttcattgtgctcaattcactgaatgacaagggtgccggttttcgttatgacacgaacaaaataacgatcatcgaccgccaaggatacactgactatcccctgaaaagcaagcgggaagtggcgtgtgacattatagataaactggtaaggaattaaaaaaagaatatgttgcaatctatctatatacaaaattatgcattaattgatacgctcgatatcagttttacccccggtttttcggtcatcaccggagagacaggcgcaggtaaatctatcattttgggcgccatcggcttgctgctcggacaaagggctgatatcaaagcaatcaagaaaggtgccaataaatgtatcgtagaagcccgtttcaatatttcgacttatcaaatggagcctttctttgttgaaaacgacatggagtatgaccccgaagaatgcatcatacgccgcgaactttatgcttcggggaagagccgcgcctttatcaacgatacccctgcctcactggtacaaatgaaagaactgggagagaaattgatagacgtgcacagccagcaccaaaacttactgctgaaccacgaagagtttcaaatgaacgtactcgacatactggcacatgacgaacaagaactcatctcctacaaaagcctgtatgcaaagtataaaagtatctgcaagcaattggcagactttatcgctcaggctgaaaaaagccgtcagaatgaagattatatccgtttccaattggagcaactgaatgaagcggaattacgggaaggagaacaagcggaactggaacaggaagctgagacattaagccatgccgaagatataaaagcaggcttgtataaggtagaccaaatcatgtcctcagatgaaggaagccttctttctgccaccaaagagtgcatgcagaccttgcaaaacattgccaaagtatatgctccggcacaagaatggataaacaggctggacagttgctatatagaactgaaagacctgtcgcacgacatcgccggtgcacaggaagaaatagaattcaaccccaaccggctcgactttgtgaacgaaaggctgaatcttatttattctttgcagcaaaaacatcgtatgcagaccatcgaagagttaatcgccctgacaaacgattatcgggaacaactcaacgccattacttcatttgatgaccgcattgcgcagctgactgcgcaaaaggacactttgtacaacaaagtactggaacaagccaaagtcctgaccggactgcgtgtacaggccggcaaagacattgaaaaacaaatgcaatcactgctggtccctttgggcatgcccaacgttcgtttcatggtagagcttactccccgaaaagaaccggattccaaaggaatggactgcgttactttccttttctcggccaataaaaacgggacattgcaaaatgtagcttctgttgcttcgggcggtgaaatcgcacgtgtcatgctatccctgaaagccatgatagcgggagccgtgaaactccccaccatcatcttcgatgaaatagataccggagtatcaggctccatcgccgaaaagatggcactcatcatggaaaaaatgggaaatcaaaaccgacaggtaatcagcattacccatctaccgcaaatagccgccaaaggcatcacacattacaaggtatataaagaagataccgatacaggaaccaacagccacatacgccggctgaccaacgaagaacgagtgaaagaaatagcaaatatgttgagtggagctaccttgacggatgccgcactgaacaatgcaaaagttttattaggatataaataaagaatatgacagagaaaaatgaaatgattttcggtgtacgtgccgttatcgaggccattcaagccggaaaagagatagacaagatattagtaaaaagagacatacaaagcgaactctccaaagaattgtttgccgaattgaagggacggatgattcctgtgcaacgcgtgccggtggaacgcatcaaccgcatcacccgcaaaaaccatcagggagtcatagcttttatttcagccattacttatcaaaaaacagaagatattgttccttacctttttgaacaaggaaaaaatccgttgctcatcatgctggacggcattaccgatgtacgcaactttggtgccattgcccgcacttgcgaatgtgccggaatagatgcgattatcattcctgccaaaaacagtgtcagtgtcaatgcagatgccatgaagacttctgcgggagccttgcatacgctgcccgtctgccgtgaacaaagcctgaccgaaaccatcaaattcttgaagaacagcggtttcaagattgtcgcagctaccgaaaaaggcgactatgactataccaaggcaaactacaaagaccctgtttgtattattatgggagcagaagatacgggtgtgccctacgagcacttgtcattgtgtgacgaatggattaaaattccattgctgggcaaaatcgaatcactgaacgtatctgttgccgccggtatcctgatttacgaagccgtgaaacagcgtggctttactactgaagaataacaataaaaactatatcatgaagaaagtacttttgattctgatgtgttgcatggccatccaatcggttcatgcccaagacactcccaaatgggccgacaaagctaagaaagctgttttttctatcgtaacttacgataaagaaaacaaaattaaaaataccggtaacggtttttatatcgataataacggtacagccctgtctgattactctttgtttgaagacgcagaacgtgccgtcattatcaacgccgatggcaaagaactgccggtaacacgcattgccggtgcaaattcaatgtatgatgtcattaaattccgtacagaaaccgagaaaaaaataaccgctctgaaagtagccacacaacctgccgcagtaggagaaactgtttatctgctcccctactccacacaaaaagcggctacctgccaaaccggtaaagtgacccaagtagatactattgccgacaaagcttactactacacactgacaatgaccacaagtgacaaaaccgtaagctgccccattatgaatgcaaatggcgaagtactgggactgattcagaaaagtgcatccgaagaagataaagaaagctatgccatcggcgcatcttacggcgaatcattaagtatttcccccttatctgccaatgacatcaatctgaataaaataggcattgcaaaggcattacccgaaacagaagaccaggccttggtatatctttatatgtcttcatcacagatggatgccaaaaactatctggcaactctaaacgattttttacaagcataccccaacagcaccgaagggtatacacgtcgtgccggctactacatgaacatcggagatgatgaacataatgcattggccgaagccgatttgaaaaaggctatggacgtatcaggcaacaaaacagaaggacaatataatgtggctaagataatctactcttactgcattaaccttgaagaaggcaaaaaagcatacggagactggagttacgacaaagcattaaatatcattcgcgaagctatcgcaacagatgcacaaccggtttatattcaattggaaggcgatattttatttgcaatgcgcaactatacagatgcgtataagagttatgagcaagtaaatcagactcctttagcatctgccgccactttctattcggccgccaaaacaaagcagttaatagaaggaaccgagatgaatgaagtgattgctcttatggatagtgccattgcccgtttcactcctccttacacttccgaagctgctccttatttttacgaacgcgccgagatgaaagcacaaacaggcaaatatcgtgaagcggtggttgactatgataaattttacgatgccatcggagggcgtgtcaccgctgctttctatctacaacgtgaacaagccgaaattcaatgcaaaatgtatcaacaagccatcaacgacatcaacaaagccgtagaaatgtctcctgaaaatgtagaaatgtggatagaaaaaggttctgtacatctgcgtgtaggacaatttaatgaagctgtagaagcattaaagaaagcaatttccctcgatcctaaagcagctgcagcatatcgtatgctgggatactgtcaggtgcagcaaaagaataacaaagaagcttgtacgaactttgccaaagcaaaagaattaggagacactgtagtggacagcttaattcaaaaatattgcaagtaaaaagaaaaaaagttcctccacatccatctatgtttgtgaaattatacaccacatagaaagacttttttctaaaagcttaaaaatccgagtttccctaaagctcggattttttattcagccccttaggaccggaccgccaaagcttctgtccggttccgtttatcctccccgggaaattaaatcaaaaacttcgaaagttcctattatagtattgcagcgaaaaacaacatgctttccgaaagacacaacatgctttctaagagaaagtaatattatgtcgatgaaaggaattctacccatcggtaaagtcaatataatctcctttcacacataacagatattgaaaccttctatccataaggattctgtgtgaaagctatcaaagcccccctcaatacttttaagttaaaccaatcttcagattacccctaaagcttaccagatatgggaatgccatgataccgtatcgctcccgcgtcaaagagcacatttttgggctcagttgtaattcttaggggattaacatttgttaatt

SEQ ID NO: 6711 - DNA, 23391 bp, Unknown
  gut microbiota DNA sequence
ccaggcgccggtccgacaggcctgcggcttttgccatacattcaaacggaaagaccgaatgaagcttgccaagctcactctcattaaaactcttgcggtatttttccagaatatcaaattctgtaaaacccaaagtagggtgaatttctgaaatattttgtatctttgccatatcttattagtttgggtatttcccccgttttggccgtcaaaccttattttcgggggaatacctaaagatacaaaaaagccaactaactcgcaatactttgtgtatgaattagttggctgattttgtaatatttaataaatgtccctatttagtgacatattgccaaaatatcatctttttattgcaggtttgttaggtatttcaatttctttttgtacatttgcaccgcttttgaaaacaatatgaaagtaacaatctaatatactgatatcatgaagaaaattatttttttgaaaggaatgctctctgtagtaatgttgtttattgccagccttacaatttccgcagcaaagccgggcgacaacctggttcacaacactgaagaagtaaacggagtaatcatttcggaaactgttttcaagatggacggtaatatgctgaccaattatatgaagcacaattataagtacgatacaaaccaacaacgtaccgaagatgaaagtcaaaaatggaacagcaacaaaaactgttgggaaaacaacctctgcatccgttatattcacggaaataagagcattactaccgaatattataaatggaattctaagaagaaagaatatatactagtacctgaaatgaccgtaactatggataaataaaatgttcatttaactaacaatctaacacttttcataaaattttaaacaaaaaggcagtcgcgatgactgccttttttcgtagctccaagccaattctatctttaatatgaagcacgataaaaaaagaatggttatctttgcaggcaaattaatggataataatcaaaaaaacagatagataatggctttacaatgtggcattgtcggccttccgaacgtaggaaagtcgacactttttaattgcttatcaaatgcaaaggctcaagcagccaacttccctttttgtacaatcgaaccaaatgtcggcgtaatcactgttcccgatgaacgtttgaccaaacttgccgagctggttcatccgggacgcatcgttcctaccactgtcgaaattgtggatattgccggtctggtgaaaggcgccagcaaaggcgaaggattaggaaacaaattcttagccaatattcgtgagacagacgctatcttacacgtactccgctgctttgacgatgagaatgtaactcacgtggacggaagtgtagaccctgtacgcgataaagaaatcatcgataccgaacttcagctgaaagatttggaaaccattgaaagccgtatccaaaaagtgcagaaacaggcacagaccggaggtgacaaggcggctaaacaaacatacgaagtgcttgtcagatacaaagaagcattggagcagggcaagtctgcccgcaccgtacaatttgaaagcaaagacgaacaaaaaattgccaaagaattgttcctgctgacttccaagccggtgatgtatgtgtgcaatgtggacgaagcaagcgcagtcaacggtaacaaatatgttgaaatggtgcgcgaggccgtcaaagaagagaacgcggaaatcctagtggtagctgccaaaacagaagccgacattgcagaactggaaacatacgaagaccgtcagatgttccttcaggaagcaggtttggaagaatcgggtgtcaaccgtttgattaaagcagcttacaaactgttggatctggaaacattcatcacagccggagaaatggaagtaaaagcatggacttaccgcaaaggctggaaagctccccaatgtgccggagtcatccataccgactttgaaaaaggctttatccgtgccgaagtcatcaaatacgaagactatattcaatatggttcggaagcggccgtcaaggaagccggaaagatgggcattgaaggcaaggaatatgtggtacaggatggcgacatcatgcacttccgcttcaatgtataaaacaaacgattaatatgaataaatttcttatcataggaaccggcggcgtgggaggtagcatcgccggttttcttgctttagcaggaaaggacgtaacgtgcattgcccgtggcaaacacctggaagccatccgcgaaaaaggacttcacctgaagtcggatttaaaaggcgaacattatcttcccgtaaaagcctgcacagccgaagaatataacgaacaggcagatgtcattttcgtttgtgtaaaaggatattccatcaactccattcaggatgttctggaacgcgcctcgcatcaagacaccttggtaatccccatcttgaatgtttacggaaccggtccccgcatcggccgacttgttccacgtgtaacggtactcgacggttgcatatacattgtcggtttcgtgtccggcacaggcgaaatcacgcaaatgggcaaaatattccgccttgttttcggagcacgccccgaacaagaaatagctcccgaacgactggaagccgttgctaatgcactgagagatgcaggcatcaaggcagacatttcggaagacatcaaccgcgacaccttcatcaaatggtctttcatctccgccatggcatgcacaggagcttatcacaatgtcccgatgggcgcattgcagcatcccggcgaagaacgcgacaccttcatcggcctgtctcgcgaaagcagcgaaatgggacgtcgcatgggcatcatattccccgaagacccgatagaatacaacctgaaaatcattgataagctagacccccaaagcactgcctctatgcaaaaggacattgccaaaggccatgaatcggaaatacagggaatgctgttcgatatgattgaactgggcgagaaactgaaagtagacatgcccacttatcgcaaagtagaaaagaaattcaatagttgtcattcataaaccccaagattatgcatcaattactccatatcgtgtggaatcccgagatagaagctttctccatcttcggcatcaccatccgttactactccatcctgtttgtcacagggttgattctggcctattgggtcatctccaaactgtataaagaccaaaagattccgtatgagaaatttgactccctctttatttactgcctgctgggtatcgttgtaggcgcacggttggggcattgcctgttttatgaaccgagctattggctttcccaccctctcgaaatgattcttcccgtcaagtttacagacggaggcatcaaatggacaggctatcaaggtttagcgagccacggaggaaccatcggattgctactttccctttggttttatgcccgcaaaatgaaattaaactacctttcggtactcgacaacattgccattgccacccctatcgccgcctgttttatccgtttgggcaacttgatgaatggcgagatagtcggcaaactgagtaatgtgccctgggcgttcattttcccccgcgaaggaatggaaccgcgccatccggcacaactctatgaagccatagcctatctcatcatcttcgtcataggactgtctttatacaagaaatacaaaacctccctccttccggggttctatttcggctactgcctcaccaccatcttcgttttccgcttctttgtagagttcatcaaagccagccaagaggcatacgaagacagcatgatgctcaatatggggcaatggctcagcattccgtttatccttatcggagcacattttatgtatcactctttcaagccggctaaaaacaaatgaaacatatcatagacattgacacctgggaacgtcgggacaactacaatttcttccgcactttccacaactcatggatatccattaccagcgaagtagagtgcggcgaggcccttgctgcggcaaaagcctccggacgttcttttttcctgtattatctctatgccatactccgggccgccaacgaggtgaaggaattccgtttccgcacggacaaaaacggacaagtagtctatcatgaccaggtggacatcatctcacccatcgccgtccccggcaagactttctacaccgtgcgcatcccttaccacgaggattttgagcgtttttatgccgaggcataccacatcgtccatcatattcccgaagacggcgacccgtatggagccgaaaaagtgattgcagagcaaggtgattttgacatcatccaactgagtgccacgcctcagctttatttcacttcgctcacctacacgcagatggctcccgaccatccattggactatcccctgatgaatgccggcaaagtagtgccacgcgaaggaagattggttatgcccattgctttcaccgtaaaccatgcttttgtagacggagcgcacatagggcaactctttcaaaaaatagaaatgatactgaaagaactggctcaataaatagaggctaaaaagtacgaacatttgtttgtaaaagcagcggaaagagcgtatctttgtttacactagttcaaagtggattcataaataaactgaattatggaatatgtatcatcagacatgaagttgttgccatacggcatgatgaatttcgaagatattcgtcttgacaattattattatgtggacaagacttcgtttatccctttaatagaacgttcggaccggtatttcttctttatccgtccacgtcgtttcggcaagagtctgacactgaatatgctgcaacactattatgatgtgcgtacccgtgacaagtttgacgccctgtttggcgacctctacatagggaagcatcccacagatgaccgcaatagttacttggtgctgtatctcaacttttccggcattaacggcgaattgcacaattaccgcagcggactggatgcacattgtggcattacttttgaaaacttctgcaagatatatgctgaatatctgccacaagatacattagaaggattgtgtgcggcaaagggagcagtggagcaattggactttctctatcaggtatgtgcccgtgcaggccagaagatatatctcttcattgatgagtatgaccactttacgaatgccatcctctccgatgccgacagcctgcaccgatataccgaagagacgcacaaggaaggttatctacgcaccttttttaacaaggtgaaagccggaacttattccagcatcaagcgttgctttatcaccggtgtaagccccgtgacgatggacgacctgaccagcggcttcaacatcggtaccaactactctctctcatcgaaatttaaccaaatgatggggttcaccgaagccgaggtacgcgaaatgctggcttattattctaccaaaatctctttcaatcataccatcgatgagttgatagggctgatgaaaccatggtatgacagctactgctttgcacaggagtgctatggagaaactacgctatacaattccaatatggtgctttattttgtcaaaaactatatagacaataatggcagagtacccagaaatatgatagagagcaatattcgcatcgattacgaaaaattgcgtatgctcatccgcaaggacaaagagtttgcgcacgatgcctccgccatacagaccttagtgagccaaggttacattaccggcgagttaaaagaaagctttccggctgccaacattgtggattccgacaatttcgtgagcctgctctattatttcggtatgcttactatcagcggaatgtataagggaaagaccaaacttactattcccaaccaagtggtgcaggagcagctctacacctatctgctgaacacgtacaatgaagccgacctcagtttcagcaaccatgagaaagacgagcttgcttcggctttagcctacgacggggcatggcaatcttacttcggctatatagcggactgtttgaagcgttatgcctcgcaacgcgacaagcagaaaggcgagtttttcgtacatggtttcactcttgccatgacagctcaaaaccgcttctaccgtcccatcttcgaagcagacactcaagctggatatgctgacattttcctgtgtcctttgctggatatctatccggatatgcaacacagctacatcatcgaattgaagtatgccaagtacaaagatcccgaagaccgtgtggaggaacttcggaaagagggtattgcccaagccaatcggtatgcagataccgatacggtgcagaataccgtgggcagcacacagttacacaagattgttgtggtgtataaaggaatggaaatgagggtgtgcgaggaaatataattctctctgcaatatttataaagcaaacattggtatcaaggcacacgaaaaccaagatggcttttatgggctgtaaaaatatgtccgtatcttttccggagcgtcacagtggtatcatgaatcgatatattgtttgatttgttccataggtattcctaattgtccggatatctcgtccattgatgctccattgttacagagcatcttaaccatggaacgaatcatctgctctttctgttcaatgacctgctctttctgttcaatgacctgctctttctgctcaatgacctgctctttctgctcaatgacctgttctttttcctctatcaccttattcttgagcattattgtcgtatccctgtcctctatttccgaaagaatctcgtcctctatctccatggcacggcgaacggcgggtgcggcagcggccttcagcaggcggtgcaccacatacttcacttcctcgtccatgtgctcatcgtttatttccagataatgctcgctgtcgggctgccggtattcctggtcgaacacgctcagcagacgttccaggcggttgcgggtgcgtccggtgaggaacgggatctgtacgatgatgctgtcatgcgtcagactctcgatgaaagggtcgggagcagggagcggatggtcatcatagtccagatagctgcggcgcacatagaccaccggctcggtgaggtcgcccaggggatgccccaggatgtagatggaaatgatgggcaacccataggtccgtttttgtccgtgctcgttcttctcttcgatgatgttctccttgttgaggtactgcgtgcccaggtactggcggaagcgcaaggtctccgtaatcagccaggtcttttgcagctcgataaggacaaggtgttccgaaccgtcgtgctcgcgaatctttgccgagaagtcgatgcggaagagcgagatgcgtgtctgctccatggatgtatactcgtggcggcgcatctccaggtctatgatctcctttttcagcaatgcggagagcagtatcttggccactttcttgtcttccatcaggaatttgaaaacagcgtcgtaaatagggttggcaatgatggtcataatgcttatggtttgatgatgaaacaaatgtacttcttttttttgaatagcaagcggatggaaaggttaaattcttctatcggaaaggaattacggggccctgtccatgacgcgagcaataaccagtcaaaatgccgatgcgcttctcgtccgcatcggcattctcattttgacggattgttagtttagtttttattcattccctgaaagcactatcgattcattgcattaaaatttataaccgacaccggcggacaagctcagtccatgtccttcgtgattcaaagcatgtttcatcagcgaatatttgcagtcaacagacagcagccagtgtttacgctccaaaaatattccgggtcagtagatttttagtgggaacaaccatacagcttagcaatgcggaaaagaaagaacttctttagctctgaacagtttgattttagcattgaaagattctggcgcagtagaaattacatggggacacttttcggacaagatttgattagtttcctcccccttctgacaaacgtttttttgttcccttgactttggcatagccttaaaacatagaattgtcctcttatttttgccggtgagccagttttacacgtacgtacacaagggctcgcacgtaaatacgtgtaagcctatatatgcgtacgtgtagggctgtgcgtcagtatgtgtgggtgcatgtctgctaacactcaggtttcatttaaggtcataagtataaatatagtcgggtcggccggaattaacagcataaagaatatcatcttccgatatagcatagatgtcaaaagggaaatcaaaacagatgcgcttcttcaattcgcctttccagttccaaagttgcaattcctggataagcttctcgtccgaatagatttcttctgtactatatttgttgttatacaaaacggcaatatatttggaattacactttaatttatgaaacaccggccttagttcaacagacgtcgaaggaacacaagcattgtctattacctgtatatgtttcaacaaattaccctttatgtcataaatgcgtatcaaattctgatgaagatagaaatcacatacacaatcatgggcaacatctccggctgtcagtttataattagtaaagaatcgcctctcttcattctctgatttccggggaaattctccaaaagaactatatccgccattcttatatataatatgttcaccggtgcttccgtttgtcaaacctgccaatatgtagtaatcatcccccaatcttactaattgattgatagcatcaggaagagtgatatcattattcctttttattaccagcgttttatcctcaaagcaaacttctcgctctatatcagagtccaagataaagaagctgctatcggtagaagcgtaataatcacgtcgcggatttattaactcattagggccattccctttcctgccgcatgaaaacaaatgagcaaaatcatcacggtcccaaatggaataaatggagtccttcaatttgggctccattataatcaggtagttctgccaaacatttatgctaagaggatatattaataaactgtcagtgggatataatttgaaagataactgttcaacctctatgtcttgcaaacatattgaatctttcttatattcatcacaacagcataaaaggaataatataccgcataaatataatttaaatcgtgctctcatactcagtcataacaatcataaaagcattacatttctccctgcctgcaacttacatctttcagtttcccctgaaatccattcagcgtatctcctatctgctgcaaaggaaagaccaaggtttcttgatagcgcatctcatccatcgacttatatttgggattataaacccgcatggttctgccttccagacgctcctgcaatttaccgtccacatacagggaagtgcccttgtaatctccttcgatgcggatggaagaccatctgccggccggaagacgataagaattgaacacaaatgtgtaaccgtcgcgagagaaggcaatccgccccgtattctcccagtttgtatataccgtggcatgagcgcctttaaacagcacaccgctgatattcgtcttttcgtccggacagattttgaattccaccgtatagggataacccacttcctgcaaagctgtctgaaccgtatccttaccggtaaagagcagttccttgccgggaaccgtcagggcgacatctttattgggagaaattttacccgacaggttaatgcccggcgcttcgggcatctctttgcaaagagcctcaaatgctttataaggcacttgtttgttgtctcccttccacagtctttcggtcagcacctgaacggccggaaacgtacggatatgcacatcctgttgcgaaataccgttgccacactggtcattccatacggcaaacattccgcccaatacccccggagtgccttcgggaagtgtctgcttgcggtttatcatccagggagtccatgtctcatacagccattgatggtccaaaaactcgcgatagtagcccgcaccgggcacaatatacagataggtatcgcaagtattgataagcttatatccatcttttaaagatacttccggatctacccagtcatacgaccacgcatttaccgttactccctctgcctttacaggagtctttccgggaagccatttcaagcctccccacatacgcggagtcttaccatacttctcaatgtacttcaagtagcggtcagtgaaataacgatactgctcggcttctttcttattgtattcgtccgtaccgatatgcacatcaggacctataaacacgggattctctcctccgatatactcgtccagcaacgaatctacaaaacgataggtttcctccttatacaaatccaaatggtccatgccatactctttgctgcctatttcgggcttatagtgggtgaacgccaatgaatgggcaggaatgtctatttcaggaatcacattcaccccatattccatacccagccgttgcaaatcggtaaactctttcttggtatacgagccgtcttttgcggtcagaccgggaaaacgttcactttcaagacggaatgcagcatacgtcttgttccagtcattgtcaaagaactgaggaaagccgttatcgttcagatgaatctggaactcattcatcttatagaaagaaagtatcttcacatattgcttcaaatagtccaatgtaaagaacttgcggccggcatcaatcataaaaccacggttaggaaataaagggaagtcgcgtgccgttcctttcgaaatctttccctgctgcttataaagcatctgtagcagcgtacgggttccccagaacactccctttcgggtgggcgcttcaatcccggcataccggttcaccgacagtttatagccttcatcacccaactccttgtccggcttcatcaaagccatataaatatcatttttgcccggtttgccgattttcacggagtagtcccaccccatcatcatgctcaagtcatctgccaatatctcggcggtagacaaaagcacagcctcatcagcagggttgacgacaatattaccttcggcaggaagagccagtttgccactgccacctttccattgctgaagagcgggaattacttggggacacggttcttgtgcagaaatcgcgcaacatgctatccacagacagcatagaataaaaaaatttttcataagcattgaggtttaaaaaaaggttgtatcaaaagtatataccgttgacgatttgacagcatcatcaacgctttgacacacctccgactattttcttgatatcattcagtttattcaaagcttcaagaggagtcagattattgacatccaaattcagaatctcatcacgtacctgacacagtacggggtcgtccagttggaagaaactaagctgcatcccatctcggccggaagctatctccgccgtcggtttggcaattccctgctgacggttgtccgtctccaattggtgtaggatatcgtttgcacgtttcacgatactcttcggcataccggccattttcgccacatggataccaaaagagtgctcactgcctcccctctccaacttacgcagaaagatgactttattatcgacctccttcaccgatacattgtagtttttaatgcgtttgaaggatttctccatttcattcagctcatgatagtgagtagcaaaaagcgtacgcgcctttgcacgcggatgttcatggatgtgctccacaatcgcccatgcaatagagatgccatcgtaagtggaagtcccccgacccaactcgtcaaacagcaccagactgcgtggagaaaggttgttcaggatatctgctgcctcattcatttctaccataaaggtagactctcccaccgatatattatcgctggcacccacacgggtgaatatcttatccaccataccgatacgggcactctctgcaggaacaaaacacccgatttgcgccaacagcgtaatcaatgccgtctggcgaagtaaagccgatttacctgccatattaggtcccgtgataatgataatctgctgactgtcggtatccagatacacatcattggcaatgtacttctctcccaccggaagctgtttctctatcaccggatggcgtccctgcttaatatccagcacatcactgtcctctactatcggacggatgtacttattcgcttcggcaacattggcaaaagcaagcagacagtccagacgggctatctgattggcatttatctgaatggcagggatatattcggcaagggaaagaaccaaatcattataaagcttggtttcgagtgccataatcttatcttccgcacccagaatcttttcttcgtattccttcagctcctgtgtgatataacgctctgcattcaccaacgtctgtttgcgaatccactcggcaggcactttgtccttatgtgcattacgcacctctatataataaccgaatacattgttataggcaatcttcaagctggggatgccggtctggtcactctcacgctgctgcaactgcaacaaataatccttccccgagaaagcaatgcggcgcaactcgtccagctcttcactgactccatcggctatcacacctcccttgttcaccagcaacggaggatcattctttatctctttggctattttctcgcgtatattaagacagagattgagttgttcaccaatacgccgcaaactgtcattatcggcattcaggcaagcattcctgataggctcgatggcttgcagcgccaccttcagctgaaccacctcacgcggagagatacgtcccacggcagccttggacacgatgcgttccaaatcaccgatgagatgcattttctcttctatgaactctttaaaatccggttcgcggaagaaatactccaccacatccaaacgttcattgataggcttctcatccttcaatggaaacaccacccagcgtttcagcagacgtgctcccatcggactgatggttttgtcgataacatccagcaggctcgtaccaccatcattcatactgcccagcaattccagacttcggacagtgaatttatccaagcgcacatagcggtcttcctcaatacgcgaaagcgaagtgatatggccgatttgataatgttgcgtcatgtccagatattgcagaatggcacccgaagcgatgatgccgttcttaagatgctccacaccaaagcctttcaaattcttcgtttcaaaatgtttcagcagcttctcgcgggaagaagtctcggtaaacacccagtcttccagctcaaacgtaaagaacttattgccgaagttaccttcgaacattccccgctttccacgttcaaacaaaatttctttgggagcaaagttattcaacagcttatccacatagtcaaacggtccttccgccgttagaaactcacctgtagaaatatccaaaaaagcaacaccacacgcagacttgccgaaatgaactgccgccaaaaagttattttctttatacgaaagcacattgtcattgatggcaacccccggagtcaccaattcggtaatacccctcttcaccagcttctttgtcagcttcgggtcttccaactggtcgcaaatggccacacgcttaccggcacgtatcagtttcggcaaataagtatccaaagcgtgatgcgggaagcccgccatttccacactcttaccttgtccgttggcacgcttggtcagtgtaattcccagtatttcagaagcaacaacagcatcttcggaataggtttcatagaaatctccacacctgaaaagcataatcgcatcgggatgctttgccttcaactcaaaaaactgcttcatcatcggggttaaaaccacatcgtttgccactgttgtatcctttctttttaaaattcttaaatgtcggacaaagatagcaaatcgacttttgattttaaaaaagtgaaaggaaaagttttacactatttatcctttccgcagctacacaatatctacaataatctttgcttctttcaattttcggagcatctttgcttctttcattgagcgtgccggcatcttgccatgagccaaccgccatactttccacggagtaacctgatacttgaatgccagactacaataaacaatatatacccaataaataccaaaatattaaccgcatagtcattttattgtttatatctttgtgcacataaacaaataaagacaatgaaaaagatagaagtaaaagagctgaaagacaacatgtttgagacaatcagcaaagaatggatgctggtaaccgccggtacaaaagataaattcaatacaatgactgccaactggggcggcatcggattcttatggaacaagccggtagccttcatttttatccgccccgaacgctacacgttcgatttcatagagcagaatgattatctcactctctctttcttgggcgaagagcataaggatgttcataaaatttgcggttctaagtcagggcgagacatagataaagtgaaagcaacaggacttcagcccttattcaccgaaaatggaagtattacttttgaacaggcccggctgacctttgagtgcaagaaactgtatgccgatatgattaagccggaagactttatcgaccaaagcattatcgaccgatggtatggagaagcacacggaggctttcacaaaatgtatgtggtagagattgtcaatgtattggaggcaatctcataaaacgcgcggctgagttcctaaaatggaaagcatatatcctgttcttggcacagtttccaaggacaggctctcgtcttccgacagatatttccgcaatctcgccacatagttattcaaactctgctcgctgccggaagtaccctcccacagttcctgcactatctgttcgcgacttactgtttgattcatgttctgtgccaacaatttcagcagtttatattcaaaatcagtcagccttctcacaggttcctcgcctttgaacaacatactgtctccggctctcagattgaacattccgatggatagtcctttcggatgaaaacatggcgtgtgcctgcgtatgtaagccaccaactcctccatttcgaaaggctttcgcagataagcgatgccacctgcatccagcgcccttgccacttccgaaccggctatgtgtgaagagacaaataaaaccggtgtatcgggagccgtcagcttgagttccgcaacggcatctattccattcttctctcctatctctacatccagcaccattatgtccggctgcatttcctgaaccacaccctgaatccctaccagcgtagtgcaatactccgcagcatagcccgaagcccttaatgccaaaatcaccacttgacccaatgcgatgtcatcgtctacaaacaaaacttttgtcttctccatccgtcttttctcctttcaatcaacgacatggaatcatgaatgtaaaagtgcttccttcaccttcggcactcttcaccattatctcccctccatgttcatttataatatattgggattgcgccaatcctatgccgtaacccttctgctgttgctcttcgcttcgggggacccgatagaactgggtgaacaatttcttctgatggcatggggcgataccccaaccattgtctttgacagatacacgcaaccgctcattcacaatggagagcgagacctctatcctcactcctgcatccgaatatttcaaggcattctccatcagattgcgaatcacgttctctatatacataccgtcggccattacctgcaaacccgcaggaagctcattgatgatgcagatggcatgggacttgcccggatagaggcaggacaactccttcttcactccctctgccatttccggaacatcgatcaggcttttattcaataccacctgatgacggtccatgcgtgcggtcattaataaggcttctatattggaaatcaaacgcctaacacccgctttactcgtttcaagcatctccttggtctctttgtcgggtgctgtctgtttcaaccaccccatcatcgtaataacactgttcaatggagacttcaaatcatgaatagtgccattgatggtcatctccctcttgcgaagcaatgcttccttccggcgaatggcagtcagctggaaaaacagacaaagcaataccagcaacatcatgcaggcagaaagagccagcgtccaaagctgatgtcttagaaaatgagacataggaatatctgcctttatctgaagatattgcaagccttttgtgccaataggatgaagctgagatacataatcaggcgtatggctttccaagtctccaacagaagaaatcattacggtgtctttatcataaagaaggaattgatgaggatgacggacaatgctgtctgacgcacgccaaaggctgtccaaagtgtttaaattcaaaggaaaaccagctgcttgcaaaatatcctgctccaacccatgaattctttccgcagcaaatttacctgcagcaatctgtttgacagtggttgaacgaatcatatctgcatcttgaggtgacaaacgaacagtatccggcttttgtaactttatctccgatgagtattcctcggtagtaggtatcatgcttatagactgcaagactcttcgaatccatttctcgtcttctattgccttttctgtttccatctctatcttgattatattttcagttacatactgattatacaagccccaaatgtatttagcttgtaaacagactgttgcaactatggcaatgaatgtgatataataatatttcttcatcttataatcaattctacaggacaaagataattgtttccagtcaaaaagattataaaatgattatgtttttattataaacgctccatacagaactacttacctttgcaatagcaaaacttaaaaaacaattgatatgacaaaaacactcattacactccttttgggagtcatatacagttggccggctataagcatggcacaagaggtggataatctgaaaatagaagtcaccggttccgttatcgacagcctgaataatgaacccataccatacgcttctgtcagcgctctcctaatgcccaatcaaacctgcattgcaagaactgtcccacaccgtaacggaacctttttactggaattaaataaagattctcaatacgctataatcatatcctgtataggaatgaagaccgtaacaaagaatataaagaccggaacatctcctattaacctccatcatattatgctggaagaagattcacaacagttgggagaggtggaagtcatagcaaagaagcagcgcatatcactgaccgacaatggtttctcttacagttttaagaacgacaagactcttttggccgaaaaccttctttatgcaatgaaaaaagtgccgcttgtctctgtaagcggtgatggaacgctttccgtaaaaggaggttcaaattatgtcatttatctgaatggaaaaccctatactttggccaactccaatccgaaagaagtattacaaagcattccggcctcatccatagaaaaggtggaagtcatcaccaacccggacttgcgatatggcatgtcagagggtggctctattctaaacatcatcaccctgaaaaaccaacctaataactaccgcatcattctgaatgccggcggaaatacacatcctgcggaaaatgccggcgtaaacattctttttactaaagataaactatcggcttctttcggttacagtttcaataatacacagctcgaccacgtaccatcatcgtcctatacagaaacatttctgaatgaaacggataaaacagtcaccacacaggaatgggaaacagacggaaatataacaaatcatctgataaaaggactattggaatacaacatagatacactgaactctgtctatgctgatgccaacttcatgctacaaaggattaacatgaacacaatatataacaataattaccaaacaccctcaaatccttattatcactcgaatgtatttgacaaaataaaccaacacgacggtgcccgtgagattaatctgtcatacagaaacttatatccacacaagaaaagagaacggctcttattaacctatcgatatgcattcaacccggataataagaaaaacaatgtgactgaacgctccttcactgactctgaaaataaagactgttataatgaatacatccacaaagccaatacaaaaggtggattaaccgaacacacggtacaagctgattatactattccactgaataagcatactctttctataggagcaaaagatatttatagaaggagcacgtccagtccattatattatgagtggaatcccgaaacagggacatggatagagggaaacaaatatgcgcagaacgagatagataagttcaaacaaaaacagaatatatgggctgcttatttatcttaccagctacgccttaatcaattttccttcagtgccggtgctcgtatagaaaatacttataacaaaatagagtacagcaatgaaaaggagaatgagtactcctatcacacattcgactggataccccgtttgttcctatcctatactttatcacaatattccagtctttctttatcatattcttcactgataaaacgtgcttccatctggcagatgaacccatatcagcagcaagttgatgaattctctgtagaatatggtaatcccgatatccgctcggaaaaaataaaccaaatgaacttatcctactattatttctctaactctgtcacttttgccacatggctggactactcaaacacagacaatgctatcgtcaaatatccatcccaacagaatgagaaaacaatagcatatacttacgacaacttaggaagctataataaaataacaggttttatctatattagttatagccccacagaagcattgtccttcaatatcaacggcagagtaggtaaaacctatatgaaatctacgcgacttgatttcaagcaacatgccacgcactattctttaaatttaagcggagactggaatttgaagcatgattggacaataggagcacaatggggtatttttcagcaagaacctgaaatgcaaatagcatataataagttccaaaagtattcctgctatgtacagaaacgaatgttagacaataaattgaacatcagattaaatattaacagcccctttagaaatgagaaatatcgtgaagccgtacagcatgtgcaaaatagtaatttttcaaggcaaacacgatttggtatcgtcgcacgcagtgtaatgattgatttgtcttattcatttgggtcaggaaaaacctcggcgaaacgaaaagtcataattaataatgatgaccttcttcaaaacacaggtgttcgctgatatcaatacaattaccagcaagacagataggaatggcgcaggaaatacagaaaaaacagactctaagttttttcctttctaccaccaacacgattccatgcagtgcggcattgcctgcctgcaaatgatatgcaaataccatgggaaagagtattcacaagatactctttcccgctactgctttgctaccaacgaaggcgtgtcgctgctgggcatcagcgaagcggcaacccgactgggactgcacaccacgtgcggacgggtaacaacagaacaattacacaaagcccccctgccctgtatcctgcattggaaccaaaatcattttgtagtactctaccggataaagaaaggtaaaatattctacattgcagatcccggcaaaggacttgtaacctatgacaacagggaatttaaagaacattggctcagtacccggtctaatggagaggaaaaaggaatagccatgtttttacagcctacacctgccttttataagcagcaggaagaaacaacaaaagacaaacgctctttccgtttcctgctgggttacctcagacaataccgacgctacttcggacaaatcatactgggggcattagtgggctgtctgctgcaacttatctttccattcctcacgcaagcgattgtagatgtgggcatcgtccatcaaaatctgaactttatctacctcatcctgttggggcaactggtgctgaccatcagtcgcgcttcggtcgactttatccgccgatggattttgctgcatatcagtatgcgaatcaatatttcgttggtttccgactttttcatcaaattgcttaaactccctatgtcgttcttcgacaccaaactgatgggtgacctgatgcaacgcatgaacgaccataacaggatagagaagttcctcaccacccaaatgctgaacgttacgttctcactgctcagtttcgtggtgttcggctgtgtattattcagttataatctgaccattttctgcatctttctgctggcaagcgttctttatgctttatggattgccttgtttctgggaaaaagaaaaattctggattatgaattattcgaaaaacaggcagaaaacagcaacaagacctaccaattcatcactgccatgcaggagattaagctgcaagactgcgagcaacgccggcgatgggaatgggaagatgtacaggcggatctgttcggcgtgcaaatgaaaagtttgaagctgcaacaaacacaggaggccggaagcatattcatcaacgaagtgaaaaatatagtgataaccgtggttgctgctaccgccgtcatccacggacaaatgacactgggtatgatgctggcagtacaatacatcatcggacaactgaacagtccggtggaacaattgatgagcttcctttattcattgcaagatgtgaaaatcagtctggaacgcatcaatgaaattcataaaatgaagaatgaagagaatgagcacaggctattgaacgaaatacccggtatctccaatgacctttcttttgagcatgtcggcttcaaatatgacccccacagcccgaaaatgaccatagaagatgtaagcctcaccatccccgaaacgaaagtgactgccatagtgggtgcttcgggcagtggaaaaaccaccttgctgaaactgttgctggggtattatcctgtaatgaacggagaaataaaaataggagaagccaacctgaacagcttcaacctgaaatggtggcgcagacagtgcggggtagtaatgcaagacggagtgatattctccgaatccattgcccgaaacatcgccgtagacgacggagacatagatggagaaagactgctgcgcgccgtagagatagccaatataaaagaattcatcatgagtctgcccatgcggttcagcaccatgataggcagagacggaatcggattgagccagggacagaaacaacgtatactgatagcccgtgcggtctataaagatccgttatatatctttctggacgaagccaccaatgccttggatgccaagaacgaacgcaccatagtcgagaatctggatcagttctataagggaagaacagtcgtggtggtagcccaccggctcagcaccgtaaaaaatgcccatcaaattatcgtgttggataaaggacgtatagtggagacaggtaatcatgcttcactgatagagaaaaagggggcctattacaatcttgtaaaaaaccaattagaactgggtaattagaaaaaggagaaaattatggcagatttcaataatatagaactaagaagtgaaaaggtaaggaacatcatcggcaaagtaccacccgaaatcatacgcaccggaataggcgatatcaccgtcattctactgatattaatattggcggcattctttattccttatcctgaaaatatcaaggccacagccaccgtaacaggaactgatgtaaccggctgcattcatgccgaagtgcttattccctaccgatacattacaaaagtgaagaaagaaatgcctgtagagatggaattcgaaggatatgaagcaggccggtatggttatccacatgggaaaatagtgaactgcgcgaatacaataaccgtaatggaaggaaataatttcttcaaagccgaaataataataaacaataagcatgcttcttatcccatccttaaagatatgaaatgtagtgcctctatcttgctttcagacgaaagtatagcttaccatatctttccggcgctagggcattaaactttcagaaagatctcagcctcttcaaaaaagttcttgaaacgcataatggcgaaaatccgtttcttcctacctcctttcatctaccgctgaaacgccctgctgatgggggttccggttgtgaaggaatatcgtgtcatccccctttcagcctcctttcattcataaaacttcttccggcttttgaactttttcgataacgctttcatttacggtagtctaaaaagaggtgtagaaagtacacaagggaattactgaaggcagcttgtgaaaggactcggaagcacggctgaaaggaggatgaggggatgtcctgtcagtcttaaccgactgattatccgcatgttttggctaaaatgtaaggatgaacggaaaaggagaaatgaccgacttggtgaggatggttccatcttcccttacataaaaaacataccgagctttttaaaaaagatggtgatgtttttaagaaacatcaccatctttttggaaaacatcaaggtcttttttgcagcatgggagtgtgtaaaaactaaacctcgcccctacgaaccaaaagacagcattgtccacgttttgacatatccccctgtttgtaaaggctcagttgtaattcttgggggattaacatttgttaatttccctttatgcatacacctttgctaatctatacagaaagaacctcttatctactactccacgaaatgaagccctaaatgctttaatttttgcattaaaagcttccgcagcagcatttgtgcttctgttcacaaagtagtttaatatccgttcgtaatgattctcaatggaattggcaacagtagtgaatgtatcataaccaaactcctcaatttcattataccaaagtgccagtttggcacgagccacatctttatctgtatagtctgaaaatatcttccctaatcgtagtgcgtaatagtacacggattttatatccgggaattgttcaaagagtagtttggctcttaccttctggctttgcagccacttgtctggagccttaaacagcaggtaccggcttctggccaacaactgtctgagtgtatctccattgctaaacactttaggttcataactttcccccttggctttagcttccttgattttcctgttctcatccttcattacttgccagcgataagcgatccgaaggtcttgta

SEQ ID NO: 6712 - DNA, 90251 bp, Unknown
  gut microbiota DNA sequence
taaattcccaatgactttcttacggcttctactttttcttctgcagcagcattagcagcatcatagcacttaggacatcccatctcgcctttcacttccatatagaacttaatcttaggttcggtacccgaaggacgaacagaaatcttagtaccgtcttcagtgaagtattgcagtacattagaggtttcaggcatatcaatatctgccacattaccttcaccgtctgtagctttcaaagtcttgtaatcctttgccaatatcactttagaaccaccgatttctttcggaggattggcgcggaagttttccatcattgctttgatttcatctgcaccactcttaccaggcttcactacattgactgtcgtttctttagagaaaccatattccacatagatatccatcagaacatcgaacaaagtcttgccccggtctttggcccaagcacagatttcagccagcaacgcacaagcagaaacagcatctttatcacgaacgaagtcttcggccaggaaaccataactttcttcaccaccgccgatgtattgctgtttgccttcgctcaaacggatttcacgtgcaatccatttaaaaccggtatagcagtcgcgcatctcaatcttattcttgtcggccacagccttgataagctcggtagtaacaatggtcttgacaataaaatcattgtccttcatcttgcccattgcaatgcggttcttgatgatataatacaagaaaagcaaacaagtctgattaccattaatcaatacccattcacccttgtcgttcttacaagccatacctacacggtcggcatccgggtcactcgccatcacgatgtcagcatcaattttcttagccaaatcgatagccatagacaatgcttccgcattttcgggattcggcgagataacagtcgggaaatcgccactcttcaccatctgttcgggcacgcaatgcacattttcaaagccccattgtttcaaagcacgcggaatcagcatcatacccgttccatgaataggagtatacacaatactcaaatccttctgacgcttaattacttcagaatcaatagaaatagtatgcaccttatccaaatagatgctatcgatatcctcaccaatcacctgaatcagttctttgtttccttcaaacttaatatcggcagccgaagcaatcttattcacttcatcaataatacctttatcatgcggagccaatacttgtgcaccatcatcccaataggccttataaccgttatattctttcgggttatgagaagctgtcaggatgataccgctttgacatcccaaatgacggatggcaaaagacatctcaggagtgggacgcatatcctcaaacagatataccttgataccattagccgagaaaatatttgctgagatttcggcaaacagacggctgttgttacggcaatcatgaccaaccacaacagctatttgttcaaggtctttaaagttcttattaagatagttggacaatccctgggtagctgcaccgacagtatatatattcatacggttactacctactcccatgataccgcgcaaaccgcctgtaccaaattccaaatctttataaaatgcttctatcaaatcggttttatcttcattttccaacatacgctttacctctgcctgagtttcggcatcgtatgcaggagttaaccacttcttggctttctcagtcacttgctgaatcaattcttcattttccatgtgatctactttattagagttaatattttaataatacgcaaatgtaaaagaataagttcacaattcctatcttttgaagaaataaattataatggaatccatgcctgtatccatgaaaaaaaatccgcactacacctccatagagatgtaatgcggacagctttttattatcaaacgtaagatacgccttcttattttgtcactttataacgctctcctgtagctttcaccagctcttccaaaaattcctgaggataacccggacgcaccagcggagcacagtttcctgtttccggtcgcaagatagagccgttctttgccattttcttcactgcaccgtcgttgtatttcacaatgaggaattctcccaacttcttccagctgtcaactgccgactgagccgtcatgcaagaatagttggtcaagaactctttcgctttcaccgggtctttctcgtaaaggctgagtgcagcgttttctataccactttgcgcactgtcataagtatcctccaaattgttttgaaccgcacgcatatcctcaatcatcaaactgtatcgaggacgaatcatgtcggccacccagttgtaaatccagaaagcggaattccacgagaaggttacacagtctgcttctttaccgctataacaatcgggaattctgcccgtacagcaatagaccggagcaaatactgtcatgttggcatcatccgcaccaaaccacagtacaccacctatcgcatcggggagttcggcacgcatctgtgccacaaatgtaaatgcagtctgctgagtagaaatcgggcgttcattaaaatactctttgtcgcctactttataagtcaacggtgacaaacgataaggtgttttaaaaggaccggctcccggatcattagtgatatccagcggcgtgccttcataatggtcacgcatggctctttgtacatcgcgcacagaaagcttatggtcgggcttgatataaagaggcatcggttccttgctctctccctttatataaggcaaataggtatctcctaccgctttattaaacatattatagtagctccatacacgtgcttcacaaaaacgaagcccgccgaaatccaaaggattataagcttccgaaaaactaaaatctttgttcataccgtcaaaataacctttctcgcgggcaaacgaaatcacatcgggagaatagagacagttgtctttgtcattcatattaaatttatgaatccggctttgattggcatgtgctgcaatacaatcatccggtatcctgacagctacccatactgctcctttcacacccggccctttgcctatcatttcaagaatccatacttcgttggggtctgcaatagagaatgactcgccactgctgtaatagccgtattccttaaccaagtcagtcatcacttcaatagcttcttttgccgtgcgcgaacgttggagcgcaacataaataagactgccgtaatccataataccggtagtatccaccaactcttcacgcccgccgaaggttgtttctccaatcgttacctgatattcattcatgtttccaatcacattgtaagtttggggggcttcctttatctgtcccaaatacttacccgtatcccattcatgaatatcacgcatggtgcctttggcatgtacacctgcgggataatgatataactcaccgaacattccgtatgaatcggctgaataagatacaataaccgaaccgtctgtcgatgcatttttaccaacaataaagttggtacaggccagtgtttcggtcacggctgccatcagcaaggcagctcctaaaattagcttgttcttcatttatataactttttaattgtgttattctgttttctacttaaaacttatattctttccgcgtctcatttccacaataatcggtcacgatcacttccagcttatggggcactccccttttcaaacgcttcgggtacttcattgacaaccgggctgtcttcgagctgaaactgaaaagctcaaaccgaccatcaatcatcaccttgtaatctctcacacctgtctcggcatcaccaatcttaaactgtatgtttccgcttttccactgagaccggttcaggggagtgactcgcggagaaaccgtatcgacagccacggtatatgttcccaactcacgaatggttgttttcatccagccgtcatcaaacttccctccggcagaacccttcctgtttccccacttacggactacataatattttgatgtgtcttccaccggaaaacgatgcacgccaatcatcaacgtacatcccgcctgcaaaggcactgcctcatcatgcaaccgatattcgtatgcaatggcagcagtatcctttatcaccttagtgttcaatgcaatgtcttcatacagcatgcctcgcggaatgaccaattccattccgggttcctgtatcacattgcctttatcccattccaaataatgttttgcttgcggattatattcttctatcggcatccggcatccacgcaccacaaaccgatatgtgttcttattgccatataaatcctccagttcataacggaagtgataatccctctcctcgtcaatcgtcacgactcctcccttctcatcagcctgtaacatacgcaaaggatttcccggaagtatctgtgaacgcatcacccaactgtttttcttcacatgttcctcataatccgtccaagcgttaatcatgcggttttcttcaggcaaaacgccatccaccgtactacggaacacttcagccgtatctacataaagtacgacagaccgcaccccgtaattgttatgcgtaccgtccatgtagtcgtatgcttttatacctgctgctatttctccccaagcctcaaccggagttcccaatgcggcaaccggaatcgctttcttcttcggagaaccgctcaccactcctttccccggctgaggataaagcatcaccaaagaagcacgaggcggagtcgtgtctttcaccttatccgtataaaactgcaaagggtctatcagctcacctgtatccgtacgacgaatctccatgtgcaaatgaggaccaaacgaatatccttcattaccgctcaaagcaataatctcaccggacttaaacgccagttgtccgggttcaaacttcaagtctaccgcaaaagtctcattctcatactgatattcttccaccagctttgccacagccggagcgaactttgagatatgtccatacacggaagtatagccattaggatgagtgatatacaaagcctgcccataacctccgggcgtaaccgacacacggcttacatagccgtcggcaatgcaatgaataggcttgccaatctccccctgcgttttaaaatcaactcctccgtgaaaatgattggcacgcaactcaccaaagtttccgcttaaagtcaacggaaaatcaaagggggaaataaaaggtttttcgggatgttcctgtgcccgggtagccaaacagcctcccaatgcaaggagcaatatataactgcgtatcgtcatttttctcctatctgtttttttgttcttttccgcccctgcatacgggcaggtgcaaacttacaaaataaattcaaaagttcctcttaatttgtgttgctaaacatacttcacagagaaaaaaaacagagcagcaaggaacctacttttctgacattttgttacctttgatacattcaaaccccttaaatgtgacgattatgatagtaggaattcctaaagaaatcaagaacaacgagaatcgtgtatcgttaaccccctcgggagcacgagaattagtacaaagaggtcacacggtatatgtccagcacactgccggtatcaacagcggatttactgacgaagactatgaaaaggccggagcacatatactcccctccatcgaagatgtgtatggaacagccgaaatgattatcaaagtaaaagaacctatcgaaagcgaatacggcttggtgcgcgaggggcaattggtatttacctattttcactttgcctgcgaccaacagttgacggaagccatgataaaaagcaaatcggtgtgtatggcttacgaaacggtagtagacaggcagggcgcccttcctttattgattccaatgagtgaagtagccggccgcatgtctgtgcaagaaggtgcacgctttctggaaaagccacaaggcgggaaaggaattttactgggtggagtgccgggggtaaaacctgcaaaagtattagttttgggcggtggagttgtgggaaccaacgccgctttaatggctgccggactgggagcagacgtcactatttgtgatatatcccttccacgcctaaggcagctaaatgaatttatgcccaaaaatgtgaaaacattattctcatccgctcacaatatagaacaggaactcgctaccaccgacttggtaataggtgctgttttgattcccggagcaaaagctcctcacctcatcacccgccctatgctcaaactgatgaaaaaaggaagtgtgctggtagatgtagccatcgaccaaggaggttgttttgagacgtcacacccaaccacacacgccgagccgacatacgaagtcgatggaatcattcattattgtgtagccaatattcccggagcagtgccatgcacttctactttggcactgaccaatgcaacattgccttacgccgtcaagttggcagatatgggatgggaaaaagcctgtgaaacagattccggactcaaaaaaggcttgaatattgtaaatggaaaagtcgtattcccggctgttgcagaagccttcggatggaaaatataatcccccccttaaagaagcaaatgtattaaaagccggaagaaattatcatggtgataatgatatggcttttaatacatttctctatttcaaccataaagactaacagcttccgggcataacaatggcatagaaatccagtttatcctctcacaagccactgcatataataaaatcagactctttaaggcaagaacattttacagtcaccggccccatcatttttttctcttttcttaataatattatcaaatattctcctatcttcgcaagaaattgataaaatacacgatatgaaatgttacaaattcattagtttattggctgtgttctttgcggtaacaacattgacacacgcccaaaatgcaggtccatgcacgggaagtgagtatgccactgatgcagagtttttccgtgcgtatgcctctgcacagagtagtgatgcaacagcttccaagaaaaaagccatgaccggtgcccgaacagcccttgaaaaccaaatcaaaacaaaagcagaagctgctgccaaatcgcagactaagatatccggtgctgacattgctcaattcaacagcctgattcagggagtgatacagcaagaagtagtcaaaatgaaagtcatctgtgagaacagtgaacaagccggcggacgatataaaacacatatcgtagtagaagttaccaaagcaagtgtattgacgaatattgtcaacagtgccaaaagtgatgaaaaactgaaagcgaacttcgaagaaggtaaattcaaacaggctttttaagccctcactaaaactccttggtctttttcaaaaactctttgatcttttctgaaaactctttagtcttttccaaaaacctcaaagtctttttaaaagcctctcgaaccttttccaaaagaacaaacgcctaagagtctttcaaaaactctcaggcgctttaaatatacctaagttctgatacctaatcttagaacaataatatataagccaatgtactcaagctgattaccacccacagaatcactccctgaataagcggtttcattcctacttgctttaatacatccatcgacaatgacgcaccgataaagaacatcgttataatcaaccctttacgtgccaaatccgaaatggcctgtcctagttgaggaatgccatccaacacataagtattgagaatgatagcacctataaagtaaaagataaaccagggaacactgattttcttgccacttcccttaaagataaatgaagtagccaatgccaatggaataatccacagcgcgcgagtcaatttaatcgttgtagccactttcaaggcttcctcaccataagcagcccctgcacctaccaccgaactggtatcatgaatggcaatcgctgcccaagttccgaattgctgctgctctaatcccagccaatgtcccaaaacgggaaaaataaacaaggctattgcattcaatacaaaaatagtagccaacgccacagacatttcgctatcctttgcctttaggacaggccccacagcagcaatggcactaccaccgcagatagcagttcctgaacttatcagataagaagtatcacggtctatcttcaatattttacggccgataaacataccgatgagcatagttccaatcactgaaaggatggtaaactccataccttccttaccggaagccagagaagcttgaagattcatgccgaaacccaagcctaccactgaatactgcaataaatattttgaagtttttttattgaacttgggatgagcctgaccacataccaatgcgaatatcaaacctaggaataaagctaccggtggagtgacccaatgtgagaaaggggccaatgccgggatataatccattaacaaaaaaacgatcaacgtggaaagtatacctacataaattactttgttgttttgctgtaaagctgatactgaaatcatatttctacctttctttaaatgttattttctgtttcggagtgcaaaggtagtatatgtttcgatagatcaccaatcgtttttatttataggttataacttttctttataatgttcggcaaactgcataaataaagccggcaatccgttttcctgtccctgcaactgcacaaagtcaaattcccgaaacatagataaatcttttatttccagtactttcatctcacctgcatacaattctttattgacagaacgtatagaaagaatccccaagcaatcacagttttccaaaaaaagtttgatgctttccgtacttcccaaatacattttcacattcaggtctgataactttatattgtgcttttgaagagctgccaataagatatccaatgttccagatcctctttcacgcaacaccaaaggaatttttttaaactcttctaatgtgatttcatcatattccgtccatttactgtgagtatgaacaacaggaaccaattcatcttgcagaaatgaagtatacttcaaattaggctgccggatatttccctccaccaaagcaaggtctatgcgatgttcctgcagagctttttccacttccaaagaatttccgttaaataaagacagagagacttgtgggaatttctcgataaagcgtgccaacaatggaggaagcacatattgggcaatagtggtactagctcccaaacgcagctttccgatatgttcattacgcaacagattcatctcatactccagtcgcccgtattcttccaatatcttctcgcagtgctccaataacagccttccggcatcagtcagcgatattttattccccatccgctcaaagagacgcgtctgatacatcgtctctaactcctgaatatgctttgttatggcaggctgactgatgaaaagctcttgagatgccttagtaaagctaaggttctttgccacacaactgaatactctcaaccgaaaatcagacatagtgctacttttattacaactcgtcggcttttatccctaaagcttgcaaaacagcgaatcccaacatctcccactgataagcaatcgcttcagtcggtggattcatgccaaagacagtcattccgtcttttccgtccaccttatttaatatagcgggaacttcattgccatactcttcttccgcaggaaccgctatcaagcgtttcacatctttcgcatccgcaaccaccctcagtgattcaagaaacaattcatcccttcctgccatatccgaaggctcaaaagaataaaaagcgaactcacccaagtgactcttaaaagctacattattcaattcttgacgcaaatctcccggttggcaagtgctcatattctcactttccttatcataaataagcaatacctgaatattattctccccgaattgtagtccggcatccaaagccaggcactccatcagcaccggcagatcagcctttggcaattcacgccccaatacggtactaaagtgctttttcaagtcgccacacactctgttcaaatatgctgcatctaccagcattacagtttctgcaaaattcatctcattcgccatattcttacttttgtcattttcttttctacattaccggtctaaagatagaaataatcttttctccttccgaaagttttctgcctttttgtatccaattcggactttttttcatttaagagctcttacaccctgtcattttgtctgattcttttaccccaaccacctgtttttcctctgctttcagcttttggcaaagtatttgagcattctttaccgaaatcgcttaaagcattgaacaaagacgtaacgattccgttttcaataggtattttgaaataaaacagaaaggagatacaatatgaattttaacaacttcacaattaaatcacaagaggcagtgcaggaagctgtgaaccttacgcaaacccgcggacagcaggctatcgaaccggttcatttgctggccggtgtgctgaaagttggtgaaaacgtgactaactttatcttccagaaattggggatgaatgcacaacaggttacgttagtcatcgacaaacagatagactcactgccaaaggtcagcggcggagaaccttatctgagccgcgaaagcaacgaggtattacaaagggcaacccagtattctaaagaaatgggagatgaatatgtttcactggaagctatcattctggcattactgaatgtaaagagtaccgtttctaccattctgaaagatgcgggtatgaccgacaaagatttacgtgctgcaatcacagaactacggaaaggagaaaaagtaacttctcaatccagcgaagacacttatcagtccttaagtaaatatgccatcaacttaaatgaggctgcccgcagtggaaagctcgacccggttatcggccgtgatgaggaaatccggcgagtattacagatattaagccgacgtaccaagaataatccgattttaatcggtgaaccgggtacaggtaagacagccatcgttgaaggtttggcacaccgtatcattcgtggtgacgtgcccgaaaacctgaaaaacaaacagatttattcattggacatgggtgcactggtagccggtgccaaatataaaggtgaatttgaggaacgtttgaaatcggttatcaatgaggtgacaaagtcggaaggcagtattattttgttcattgacgaaatccatactttggtaggagccggaaaaggtgaaggagcaatggatgctgccaatatcctgaaacctgcattggcacgtggtgaacttcgcagcatcggtgccacaacccttgacgagtatcagaaatactttgaaaaggacaaagctttggaacgccgtttccaaactgtaatggttgccgaaccggatactttaagcaccatctctattctgcgtggattaaaagagcgatatgaaaatcatcataaggttcgtattaaagacgaagccattattgctgccgtagaactgagtaaccgctacatcaccgagcgtttcctgcccgacaaagccatcgacctgatggacgaggccgctgccaaacttcgtatggaacgtgattctgttcctgaggagctggatgaaatctcacgccacctgaaacaattggagattgagcgtgaagccatcaaacgtgaaaaagacgaacctaagttgcaacaactgaataaggaaattgccgaattgaaggaacaagaaacttcctataaagcaaaatggcaaagtgaaaaagagctggtaaacaagattcagcagaacaaacaggaaatagagcaactgaagtttgaagccgacaaagcagaacgtgaaggagactatggtaaagtagccgaaatccgttacggaaaattacaggctctggaaaatgaaatcaaagatattcaggaagacttaaagcataaacaaggtgacaatgccatgattaaagaagaagtcactgccgaagatatcgctgatgtggtttcacgctggacaggaatcccggtcaataagatgttgcaaagtgaacgtgataaattactgaatctggaacaagaactacacttgcgtgtggtgggacaggaagaggctattgccgccgtttccgatgcagttcgccgtagccgtgccggactgcaagacccgaagcgtccgataggctcgttcattttcctgggtactaccggtgtaggtaaaacagagttggcgaaggcattggcagattacctgtttgatgacgaaagcttgatgacccgtatcgatatgagtgaataccaagagaagcactccgtatcccgactgattggagcgcctcccggatatgtaggttatgacgaaggcggtcagttgacagaagccgtaagacgtaaaccctattctgtggtattatttgacgaaatcgaaaaagcgcatcccgatgtgttcaacatcctattgcaagtattggatgacggtcgactgacagataataaaggacggactgtgaatttcaagaacaccattatcatcatgacttctaacttaggcagctcttatattcagagtcagtttgagaagattaatgatgaaaatcgtgaagtgatagtagaagagacgaagaaagaagtaatgtcaatgttgaaaaagacaatccgaccggagttcctgaaccgtattgacgagacaatcatgttcttgcctttaaataaagaagagattgaacagattgtgatgctgcaaattggcggtatcaagaatatgctcgccgacaatggaatcactctccagatgacagatgaagcaatccgtttcattgccggtacaggatatgatcccgaatttggagcccgtccggtgaaacgtgctatccaacgctacttactgaacgacttgtcaaagaaattattatctcaggaggtagatcgttctaaaccgattatagtagaaactgcgggagacggattgatattccgtaactaattctctataatcaaactatataaaatgccctccctgcgaatgattcgaaatttgcagggagggcgttttataaataataaagaaaagtattattttccttcttctgctgccggttcttcagtggcaaccgcattttgctctacaaaatccgtaataccattgcttaccaagatattgtaccatgacaacagcttcttgatgtcacttgcgtgcacacggtcacggtcatagctgggaagaatttctgcaaaataagcatgcaactcgtttgcagatactttcttatagtcaatagaagccacagccccgttctctttgtttttcactgattccaacactttgctcaaaggcacttcttctgcatctgtatacatcgctatatcagccaatgaaataactttgtcctgtccataagccggaattctttttttagcggcgtcaactgtttctacaatcaacatattctttcctgaagaaatcaatttatataatccgggcttacccgcgattgataaaatggtctttaacatactatttctattttatttatggtttgaggcagcaaaagtacaattcgcgattgaaactcccaaatttatcatacgaattttcctgattttaattcttcaattacctgagtcaactgtggaagcagcggaacagtaccatcattcaaaaccgtaaaatctgccctacttcgtttttcttcgtcatcaagttgtgccaagatacgtgcacgcacctgttgttctgttgcattatcgcgctgcatagcccgcttcacccttaactccaatggtgcataaaccatcactacagcatctactgtattttcaaaaccggcctcataaagaatggcagattccatacccgctatctcacactctttcagttctccaatccaacggataaaatcctccctcaccctgggatgaataatagcattgatttgtctcacatgctcaggagccgaaaaaagataagaagcgagcagaggtttattcaaagctccttctttatcatagacctcttttcccaataaagcaataagctcccgacgaattccctcatcggataccatcaagcgcttagcttcattatcagcattgtagaccggcacatccattgtctccagtaagtgagaaatatatgatttcccactgccaatacctccggtaatagctatcttaatcattgaatattatttgttgttcaatcagataatccacctcttgcggattaagacgcacatgattcacatagcggggaacagatttaagtttcaccggacacttttctcctttattattcagtaattcctcgtaagtcactcctataaaaaaatcttcagccgtaattgccttgaaatgactcagtccgacctgaaaagtaacctgcactttggagggaaaggtacgcaatactttatcaggaggaaaattcacaccacgcacaggtacctccacactcttctctgcatatacatccagcatgagcgttacatcattaaagtcgggaataaaccgggctcctttcacttttgccagactgatgcggcgatgagtcgtatcagacagattctctaataccaccgactctgtataggccgtagtaatggtatccaatatttcctgaggagcatagaccattaccgaatcaggagaatagataacatcagaaatataatactgacgatctaaatcaatttttccctgcaacttgacaggaacttttttagcttcccccttagtataaataaactccaatgtgtcaggccgaacagtcagcaagcgagtcgactggttcaattgacctgtaattttcttcaacagagtagaaaccggaatacgtacttgcgtgcctttgctctcataatccttaaaatcaattgtaaccggatagaaagtttgccccaacatataattggtcaatacagttcccctatccttcactcctatctttaactcactgggtaactcggaagtcagcaccacattattggggacattcttcatacggagaggaatcgaaaattctgtttcataatcatcattcaatatctgaagcaaccaaaaacagaaagaaacgaatacaaaaaacaagaaaatcagaaactccctactattacgactaagcaggaagcttctgattttctctaatgtcctcaaatagtaaatacgtatgttccttttgtcgaacatagcttatataagttttactttgtttgttggtttgcagcagcgttagcatagatagaatttctatcaatcttaatcttcacgcctgatgcaacttccaatactacagtactatcttctatttctttaatttttccataaatgccaccggcagttatcacttcctgacctacttccagattcttacggaaatttgcaatttctttctgtttcttattctgcggacgaatcatgaagaaatacataatagcgaaaatagctaccatcataatcaggaatgagtaatcgcctccgcctgcagcctgcagaaatacaaatgataaattcatactttcaagttttttttagtttataatgttgttacacttacgataacaaacaaagatattaatttttcgtcagcttgttttctttttttaattgattaacgattccatccaatgtaccgttaataaatccaccacttttaggagtactatacaacttagcgatttccacatattcattgagcgacacactaacggggatattaggaaagctaagaacttccgccaaagcaatctgcatgataatcacatccataaatgccacacggtcaagatcccaattctttgtgttctcactgataagatgacgataatagtcagaattcaaaatagcgcggcggaacaaacggcgtgcgaaatcttgatcttcatcatctttaaactcaggtaacaactcttgtttagcaccatttttttcttcaaaacgcttgattgttttaagaacaaaagtgtctacaatttccttgtcatcgttccaatacaagctttggtcttccagcacttgatcaagttctgcattattgaagattatcttcttatatattttgcgccatacttcacggtcttcctcataagaagaagtttcacttgccatatactccttatatatgtcactttccataatttgctcacacagacttttcacaaaatccgcttcattttcccacgttttcttctgattgccggcaaaatccaataactgtttattcacctccaattgggcaataaaacgattctctacaaatttggtgttgggaaacaattcttccttagtagggataagtttgtttttcgcagcattcagttttttgttagcctgtttagttacctcaaccattaaaagcaatagatagttatacaaatcatatgctttagagagactaaagaacaactccttctcggcagtatccaagtttttccctccgttctgataataagcatagattatctgaactatcttaagacgaataagaactctatttatcataattcacataaaattattaaggagttgcaaaagtaggaaaattcattgatttcacataacataattacattttttaatgcaaaatttgcatagaaaagcggaaaacgcttttttcttcgaagtttatgagcaaattctttgcccattaaaaaaaaatatccaattttgaagccgatttataaagattcaaattatggaagagaaaaagaaaagtgtagtggatggtgataaagaaatagttttctcaaaagccattaaagcgggaaaacgtatttattatttagatgtgaagaaaaaccggaaagatgaaatgttcttggctatcacagaaagtaagaaaattgtatcgggtgaaggtgacgattcacaagtgagttttgaaaagcataaaatcttcctatataaagaggattttgagaagtttacaaacggacttcaacaggctattcagttcattactgacgaacaaggtccgatagaaccccaccacagcgaagacatgccggaagaaaaaagaactgaaaacgaaagtgaagaagctctaagctctagtgaaataaaaatagatattgacttctgatttaatgtataagtaagagtccggattaaaaaatccgggctctttttggttaaatcaaaaataagcattacttttgcaccgcttttttaagctccatcgtgtgatataccacatcgtgtgatggcgaattaagcaacaaaatcaacttaatttagagtaacacaaaaaatttaaagaacaatgaaatcaattgaaattaaaggttctgtaagaacagacctcggaaagaaagcaactcgtgaattgcgtaaaaacaatggtgttccttgcgtagtatacggagtacagaaagatgaaaacggaaatcccgtagcaactcatttttcagtaactaccgacggtttgcgtaatctggtatacacaccgcacatctacgttgtagatttgaacatcgatggcaaaacagtaaacgctatcatgaaagatatccaattccaccctgttaaggattctatccttcacgttgacttctatcagattgacgaagctaaacctattgtaatggaagttcccgttcagttggaaggtttggcagaaggtgtacgtgccggtggtaaattggcattgcagatgcgtaaactgaaagttaaagctttatataatgcaattcctgaacgtctgactattgacgttactgctttaggcttgggtaaaaccatcaaagttggcgaattacactatgaaggattggaattaattaatgccaaggaagctgttgtttgtgcagttaaattaactcgtgccgcacgtggtgctgctgcaactgcaggtaaataattactaaccccttaatccttttcaatgaaatatttgattgtaggactgggtaatataggtgaagaataccgaaatacccgtcacaacataggattcaatgtattggacgcccttgcaaaggcgtccaatcttgtttttaccgatggccgttacggtgctactgccaccatgtcactcaaaggacgtcaacttatcttgttgaagccttctacatatatgaacctgagtggcaacgctgtacgttattggatgcagaaggaaaacgttccattggagaacgtgttgataatagtagatgacttagcccttcctttcggagctttacgcctgaaaagtaagggtagcgatgccggtcataacggattgaagcatatagccgccacattaggaactcaagcatatgcccgcctgcgctttggtattggcaatgactttccacgcggagggcaaatagattttgtattgggacactttacagaggaagatatgaaaactatggacgaacgtgtggaattagcatgtgaaataatcaaaagtttctgcctggccggtattaatataaccatgaaccaatacaataaaaagtaatggctgaagcaagaatagataaatggatgtgggcgtcacgcatctttaaaacgcgcacaatagctgcagaagcttgtaaaaagggccgtgtaagcataaacggttcacaagtcaaaccggcacgtacggtgaaaccgggagatgtgatagaggtacgcaaaccgcctatcacttattctttcaaagttttacaagcaatagaaaaacgtgtcggtgcaaaacttattcctgaaattctggagaatgttacttcaccggaacaatatgaactattggaaatgagtaaaatcagcggttttgtcgatcgcgcccgtggcaccggacgtcctacaaagaaagaccgacgcagtatggatgagtttatcacaccggaatatttgccggacgatgatgactttgatttcgattttgactttgaagaggaatagatactaataagtattaatatcccccttgttttccatcagaacgaagtgaaaatatgtatgagcctacacgtatacgtgcaaggccatacatgctaatcacagggatataaatacttcacaacttatatattaatattgtatctctttcttcttacccaacaaatgataaacatcatctctctcgcccactacccatactacatcaccttcacaaaaaatcatattaacatccggtcggatcaaattaccatcgcctcgttctacccctaccaccaaacatctataatcatcacgaataccgctctccttaatactcttacccaagaaaagagaattaccatccaccataaactgcttcaagttcatctcacgcttctcaatatcctcttcttcagcagcagaagagactcgctccacctgacgggcaaattcccccaactgctcatccgtaccgataacctgaattgtatcgccgggaaacaaacggacattggcacccggaatgttgatacgatgcatcccgcgaataatagaagcaacatgcaccccatatttatatcccaaattcaactctttcagtgtatgtcctgcccaaagagaatccgccggcacctcgaaatccgaaagatgaatatcacgtgacaataaatgtccctcatattccggccgcttctgtcccgtaaattcagcatgcatatcacggaagcgtaaattctgtataaaagtacgttccataaaaatggactgtttcttcaaccagcgcgaaagcatcatcatacaaaccaaaataatagcaataccaaccatcaatgcagtagatgccttgaaaatattctcgataataaacaaaacaaaagccacagctatcaccatgcgcaataaaatggtggataataacggagcacggttataacgattatcctgccacaatgcctgaaactcaactgaatgattcttcttcataataatagcacgcaaaaatggcgatatacatacaattgtaaacactgcacccgccaaattcgcccaaaacaaaggtaaacttgcccgaaacagaggaatgatgaaatggaaagaaaggacaattaccgcaatgcaaagcaccgaatagatggcgacaatgcgaataatagcggtcaatagttttctccaattattctcatggttcaccgtctgcgaacccgaagagtagcgatctaaaatttttctccatttgtttggcaaaaccttctctacccgatgataagcgggaacagcaagacgaatcatataaggagtaaggaacgtagtaataaccgaaaccgctaccactataggatacagaaaatcactggttacatgcaggcttactcccaatgaagcgataatgaaagcaaactctccaatctgcgtcaggctaaaaccacactgcattgccacctttagtggctgacctgcaagaatcacacctccggttccaaatataacctgtcccaaaagaatagataaagtaatggcaacaatgggccatgcatactccacaatcatggcagggtccaccatcataccaactgaaacaaagaatattgcgccaaacaaatccttaaccggcgccaccagtttctctatactctctgcctctaccgtctccgccaaaatagaacccatgatgaaagcaccgaaagccggagaaaaacctacttttgccgccagtactaccattccaaagcacatagccaaagaaacgataagcaatgtttcactccccatccacttacgtgaacgtttcagaaaaataggaataagatatattcctactacaaaccaaagaatcagaaagaatactaacttaccaatactgtaaatcatctccgtaccctcaaaattcttacttacagccattgtactcagcatcaccatcaatacaatggcaagaatgtcttccagtatcaaaatgctaagcaccaacccggcaaaccgttgctgccgtaaccccaaatcatcgaatgccttataaataatggtcgttgaagacattgccagcataccgcccagataaaggcagtccatgtgtttccatccaaaagaccaaccggctaccatcccgaccaatatcatacaaaatataatggtacacgccgctataatagcagtacctccgactttcataagctttttgaaactaaactccaatcctaaagcaaaaagtaggaaaataacaccgatatcagaccaagtatgaatatttgccgtatctattactgatggtgtataaggcatatgcgggcttgccaaaaacccggctacaatatagcccaagactaaaggctgcctcaaccgtttaaatatcagcgtcataataccggcgcaaataagaatcaaggcgaggtcacttataaggggagccaattctgacataacaatattttttttgcctgcaaaattataaattatctatcaactgtggagtctttcacctgcttattttgtgataagtactttgttttaactcattgtctgcataacgataaatattatggcaggttggcaaaaaaaatctcctccacccataccacaggcaagatgaaggagataaaaaaaatgaataatattactttctgaacggtggtttgacaaccatcgcctttaatttgcgtccacgcacatcaatgaaaacctctgtgcccggtgtagcataagcagtttgaatatatcccataccgatgccgattttacgaatcggagacatcgttccactggttacttcaccaaccttttctccctctgcatttaccaactcataaccatggcggggtataccgcgatcaatcatttcaaaaccaaccaatttgcgattcaaaccttctgctttctgcttttcaagaatagcacgtgctgtaaaatcctttccttcaacaaacttggtaatccaacctaagcccgcctccaatggagaagtggtatcactcagatcattaccataaagacagaatcccatctccaggcgcaaagtatcgcgtgcacccaatcctataggcttgataccttcaggagcaccggcttcaaagatggcattccaaatcgcttcaccggcttcaggatagaaataaagctcaaagcctccggctccggtatatccggtattagaaataatcacgtctttctgaccggcaaattctccggtagtaaacgcataataaggtatttcagacagattcaccgaagtgagtttctgcaaaacctccattgctttcggaccttggatagccaactgcgccatgcgatcggaagcattttccaattcagcacccgccgtgttatggctgacacaccaattccagtctttctctatattggcagcattcacaaccaacaagtatttttccggttcgtaatgatataccaataaatcatctacaatacctccctcttcgttggggaaacaagtatactgagccttaccaataggcaaaacagctacattattagaagtcacttgctgcaagaaagccaatgcattcgggccttttacccaaaattctcccatgtgggaaacatcaaatacacccactgcattgcatacagtgagatgttcatcgataattcccgaatattcgataggcatattatagccggcaaattcgtgcatctttgctcccagagcaatgtgtttctcggtaaacggagtcgttttcatgttattattcaattattttttaaggttattatattcgtcttatcttgccaccaattctgaaatcttcaccactaccatcatagctttttccaatgactgaataggagcaaactcatatctgccgtggaaattcagaccgccggcaaaaatgttcggacaaggcagtcctttgaaagaaagttgtgcgccatccgttccgccacgaatcgctttcaccttcggagtcacaccggcttcttccatcgccttgaaagctatatcgataatatgcatgaccggttcaatcttttcacgcatattataatactgatctttcaattctactgtcactgtttcttcaccatatttcttattaatctcagctgcccacttcaacatattctctttacgcgcttcaaatttggcacggtcatggtcacgaatgatgtaagacagcgtagtttgttccacctcaccggtaatacctaccaaatgatagaatccttcatagttttctgtacactggggagtctctccatccggcaataaattcataaactgattggccacacacatggagtttatcatcttattcttggcatatcccggatgcacgttacgaccctttacaactactttggcagaggctgcattgaaattttcaaattccagctcacctacctctcctccatccattgtataagcccattcacaaccaaacttttccacatcaaacttatgagcacccaacccaatttcttcgtctggattgaaacctacccgaatctttccatgtttaatttcgggatgctctttcaaataaaccatcgcagtaatgatttctgcaataccggccttatcgtcagctcccagcagcgtctttccattggttacaatcaaatcttctcctttgtggtccagcaattcagggaaccgattaggagaaagaacaacattctcttcctcacacaagacaatatccgaaccgtcataaccataaacgatacgcggagtcactcctgcaccggtcatatcaggactggtatccatgtgagcaataaatcctatcgttggtaccggtttgtcggtatttgccggcaaggtagcaaaaagataaccattctcgtccaatgaaatttcttcaaagcccagttgttccaattcagatctcaagtattgtgcaaataccatttgtttgggtgtactgggcgtcacaccactattatcgtctgattgagtatcgaaacttacatactttaaaaatcgttctatcagtgtcattttatcttcctatttttaatattcaatgctgtaaaaataggaaaagagccgtgaattgccaaacaattcacggctcttttttcattctatcttattattttgatatcagaaacaactggaaccatcaaaacaatgcgtacaaactttgcactttggcaaaccgatagcttcaattaaggtttccaatgtattgaacttcaacgaagtcaatccgaaacggtcggcaatcatttgcaccatcttttggtattgaggtgaatctgttgcagcatatttttcaagatctttattctcatctccttctatttccttaatcatgcggcgtgttatcaactccaagtcaccttttgatgcagtaaagccaaggaaaggacaactgtaaatcaacggcgggcacgcaatacgcatgtgaacctcttttgctccataatcatataaaatcttcacattatcacgaagttgagttccacgtacaatggaatcatcacaaaacaaaacacgttttccttccagcatggcacgattgggaatcagcttcatttttgctaccaacgaacgcatttcctgattggcaggagtaaagctgcggggccatgtgggagtatatttggttatggcacgatgataaggaatgccttttccttcggcataccccagcgccatacctacgccggaatcaggaataccacaggcacaatccacttccgaattatccttctgccccattttataaccactcataaaacgcacttcctccacattcctaccctcatagcaagaaaccgggaaaccataatacacccacaaaaaagaacaaatctgcattccttcattcggcttgcgcatttgttccattccatcggcacgcaagcggataatttcgccggggcccacatatttttcaatttcataatccagattcggcagactgctcgactcgctggtcgcagcataagccccctctttcttaccaatcactatgggagtacgtccccatttatcacgcgccacaataataccgtcttcggtcagcagcaacatggagcacgacccttttatcttattaaatacattttcgatgccatctacaaagtccttgccctgaacaataagcaatgctatcaattccgttgggtttgtcttccccaaactcatttcggaaaaatgcatattcgcagccagcaagtcacgctccagttccgaaatattctgaatcttggctactgtaacaatggcaaatttacccaaatgcgaattgattactatcggctgaggatctgtatcactaataatacctatacccgagttacctttaaacttcgggagttccaattcaaactttgtgcggaaataagagttttccaaattatggatagacctcataaatccttctcccttggcataagtagccaagcctcctctttttgtacctaaatgtgaattatagtccgttccgtaaaataaatcggtaacgcactcagtctttgagactgttccaaaaaaaccacccattcctttttgctgttttttgtttagggtgcaaaattactaaaatctctggaataaacgaacaaaaaaaacaaaatggtaccgaatagcttatgaataaaatgtttgctgtaacaaatccgacctaacattccaccacccgatacaatgcatacgtacgtgtggcccgatgcgtacgtacgtgtaggcttacgcatatatatgtgtaggctgatgccaccgtatgtatagacctatgatcaggctgaatgctgcaaaaagaccttgaggttttcaaaaaagctcggtaagtttattaaaaagatgccgaggttttacggaaacacaccgacctttttcaaaaagctcggcatctttttcacataggggcagatggaatcatcccctcactaagccgatcattccttctttccgttcatccttacatattagccaaaacacattatcaatcaatcgattaaaaatgacaggatatccattcattctcctttcagtcgtgcttcccaagctgctttcaaatctgccttcagtatttatctgtatcaaaaaaagtcttacagatgaaaggaggctgaaaagacaatacgagatgtccattcactaccgaaatccgccataacagggcgtttcaacgactaatgaaaggaggaaggaagagacagatttttccgtttgtatggcgaaaaacacagttatttttttatgaattcagtcattgcacggcaagccactttgggtatttcacgattactgtttattttctccaccctcttccgccacctccatgtgttctttaaaagtcgcgagatttttactttccgagatttctttggtggaaagttctgccagcatattgagcaccaactccttattggtcatattatcgcgcaaattttcctttttcagtcctttgaattgtttatatttcttggcggtcatatcactccatgtctgataaataatgtcagtgagggtagcaaattgcactccctcttacagtccgtgccgtttccattcgtcgtgtaaggtctttgcgaatctctatagatttgagtcgctggttaatccaactattcgaataacccaaccgtttgtagtccattaatgcttggttaatggaaagttcgggatcttgcatttggtcaagacgttctgcagccacttgcgtcatccatagcttaaaaggttctgctttgggcgatggaatagattgaatgaggcggagaagttgctgtgtgtcagccacatcagttaaatacatttttccgtcagtcgatttcattttcagttgcctacaatttgtagccaactcacttccttcctttttaagacgtgtcttcaaaacgctccaatacttgcgtggattagggctatccgttaagacagctactacatctactattgagaagtaccatttttcttctttatcgtcccaaatggttcggactttctttacttcaaaaagcttgatggcattgtgttgggtcatgatattatatttttaattcttagttttaagttgaaacctttgccaagccgcttagccaattcagttggctaaaacctttctcaatcaagacttctcctatcctatattattcgttgtttattgtctttggggaaatactttttataaattctcttgaacagcatgttttgctgtggtatccgaaaaattggaatagagtttggaaagtgttcccatcaagataacctccaatattttccatacaaatggcaagtcaggttcgctatatttgcggaagtgttcagtaataaaatcatcgtgagagtgttccacctctttacatataagagctaaattagctgtaaaacaaacctcactggaagcatgatttccattcataaaccagaatgcagcaaattcaggtgcaaaatatttttgtacggacagcgacttcaatcgtttggatggtaataaagagcaaatatcaaacatatatctttatcttacatgtttctttttcaaatatttttagtaatttttttgaaaaaagttaaaacacaaaattaccgagcatcagatcgactctttcttgtcatagttcatcgtctgctcacataatagatgaagtattataaatacatatccttaatttacgaaaatggggcaagatatggtatttaaagtgctgataagtttcggtagctttgttttttattctattggcgtatgaactcaatatttttatgtacttttgtatgagatgtaatctctactacaaaaaatgtaaattcaaaaaatccattagaatgaaccaagaagataattacacctgcgaagactgcatttatttcatacatggagtaaatgaagaggacgttgatggggtagctatattaaactgctctaagcaaggaatggtaaggagctggtgtccggatttcaatagtgggtataactggaaacctaaattccttgaaaaatgggaagaagattatgtggaagaaagtgagaataataccgatcctccagacaagatgattcatacccatggacaaatttcaccttgccctttctgtggtagccatgaagttaaaacttatagtgatgggacagcacaatgtataaagtgcaaagagtggtgggaatactgataaattcattagattcatgtagaatgctgctcacttcgaatgtaactttttcacaaggtggcatcttgtatgaatgctgagatacgtttacttcacagtaataaaagaatatgaatatagtcgtactttcaggtagccctcgtaaaggaggtaataccgacttgttagttgaagcgtttgttaaaggtgcttctgaaaagcataatgtggaagttgtacttgttcgtgatcatcatattaatccatgtataggctgtgactcatgtttcaagcgtgagaacaattcttgctttcagaacgataatatgcaactgatatacgacaaactccttcatgcagacatgcttgttgttgcatcacctgtatatttctatggcatcagttcgcagctaaaggctgttatagacagatgtcacaaccctattcgagacaagttcgccatcaaacaaatggctttgatacttgtcggtgcggctatattgccagaactctttgacagtattctgactcagtataaactttgcctgaacttctttggattagaagatactggacagattctcattagaggatgcaaagataaaggtgacgtaacgaatacagagactttgcaacaagcttacgaattaggtgaaaatttataagattacaatacccaaagccttattataagccgataagaaaaactttccagaattacagaaaaaatttctctccgaatgaataatccttgctatttttgcattaaaatgcagcagttatgaaatcattattatatatctttatcggaggaggaacaggaagcgtgcttcgttacttacttaccattgccattcagcgccagacagggacggctttcccatgggggacttttgccgtcaacttcctgggttgcatactgataggtgttttttatacgctcacctcacgcattcatatcaccaatgaattacgtctattgctcactatcggactttgcggcgggttcaccactttctctactttcagcaatgaaagccttcaattattaaaatcaggtttttatcccaccttctttgcatacgtgattggcagcgtggttttaggaattatcggagtcatgctcggagtttggatgagtgaatagaacaaaatctcttccttttttgttattatcataaaaccacccaattaaattttagaatcaatatgaaaatagcaaagattaaaggaagagagattcttgactcacgtggcaaccccactgtagaagtagacgtaacattagaatccggtatcatgggacgtgcatctgttccgtcgggtgcatccaccggtgaacatgaagctttggaattacgcgacggagacaagacccgttatggaggaaaaggagttctgaaagccatagacaacattaataatatcattgctccggcattgaccggcatggactcatcagaccaacgcggcattgatatggctatgctggctttagacggtacccccactaagtccaaactcggagccaatgccattctgggcgtatcactggctgtggcaaaggcagcggcaaattatctggatatacctttatatagatatataggaggaacaaacacgtacgtattgcccgtgcccatgatgaatatcatcaacggaggttcgcattccgattctcccatcgcttttcaggaatttatgattcgccctgtcggtgccaaatcatttcacgaagcattgcgcatgggagcagaagttttccacgcactgaaaaccgtattaaagaagcgcggactgagcactgctgttggcgacgaaggaggtttcgctcctgtgttggatggaaccgaggatgcattgaattgcattttggcagccattgaagcagccggttatgagccattcaaacacatcactatcggtttggactgcgcttcttcagagttctaccatgatggaatctatgattatacgaaatttgaaggaacaaaaggtgaaaagcgtactgcatcagagcaagtggcttatctggaaaaactgtgttgggattatcctatcgactccattgaagacggtatggcagaaaatgactgggaaggctggcgtatgctgaccgaacgtcttggaaatcgctgtcaactggtaggtgatgacctgttcgtaacaaacgtgaaattcctggagaaaggaatcagcgaaggttgtgccaattctatcctgattaaagtaaaccaaatcggttcgctgaccgaaacattggacgccatcgaaatggctcaacgtaatggctataccactgttaccagtcaccgttcgggtgagacggaggatgcaactattgccgacatcgctgttgctaccaacagcggacaaatcaagaccggttcattaagtcgcagtgaccgtatggccaaatacaaccaactgctacgcatagaagaagaattgggaagccgtgccgtttacggatacaagaaaattgcacatgatttcaaagtataagaaggcatgtaaagtcaccgcctgacatagcatttcgggagtgtgtcaaaacatggataatgctgcccctacagcctgacgatgggatagcccggtttagttttaacacactcccttttagtcctatcccaaggggctatattttttcttcatttcttccacattcattcccgtgaaatagtcttctataaactcccatctctgctcatcatccaaggaagtattaccaaaaaacaattggaacagctctatctgttcaaggaatatcttttcattattttcaagcacgaagtttttataagcttccgatgtcacctctttctccagcacttcaggcatattaacagtcacctctaccgaaggcacaccaccttcgacagtaaaatcgaccacattgagcattgacaaaagattgagaagcatgtttaggtctgaaaaaggcgtggtgtaaaacagcaacaaatctcctttcactcctgtaatacgctgagagcagagcttctgataacgtgagagcaacaagtcaaagcctcgggtaacagtaaaaaccaacttgtcttcatcctttttcttcgtgctactgatatagctgacgcttcttccctcctccactctcgattccagcaaagaagaaaggaaacgttttgccgaaggaacatccatatcatattcggcaaagatactgcgcaaatcatcttcttcaaacttgcccttattgccatacaaactaacagtcagcaaatctttcaaccgtttcagcagactcgccagttttgtgcatatatctcctgcatcttctttcagcaatacctcatgtttgccgacagccgccgcacggactccttcaaacaaattaccattatataaatcgcgcttaaactcccgataacccatttccgagaaacagctttcccacaatgcttcaaaagataccttataaataccttccgcaccgaccacgggagtcataaactttttatacgtttccctgaaagcagtatcccctgttttttcctgtacatatccatctgtaaagagggtccgggaatttatctcaatgggctgtcctccaaaacggctggataaatcttcctctatccataacaaagccgtttttatcacttgtcccaaatccgattcatattccaacttgttctgcttacgaggaagtttcactgcaaactcaaaatccgacaaagacacttgcatctccttgcttttgcccttcatcaaatagatttcccaaagcttcttcaaaatcatccccaactgattttgcgtaatggctccggcagagtgtaagcgtttcataaaatagaaatcccgttcatgaaagtcggtggccgcaatacctttaatacttttatcacgtgccgcacgtcctatctcctgaatatagtcaacaaatgtactcgaaggagccacatgatacacccggtcaatatcactgatgtcaatacccataccgaatgcttttgtcgcaataatcatccgtttgtcaccttccttaaaagcttcaacaatcgctgccttctgagccttgtccttctttccataataagaagacaccaatcgccagttagtagaacgcacccacattttaatccgggtgtctatgctgccggcaaaaggataatacatgatagttttatgttcatccagaaaatcatcggtacgtccgataatgacacgttgtttcgccttatcataattctcatcttcttcaatagtaagcaaacgaatatcaaagccgatattttcgcgcttcactgttcccacaaacagtctgcaagggtctatacgcaaagagcggatggtttcaaaaaccatatcattccccccgcgaggattccaaacggcagttgcagtcaatgcaaaaaccggaaaagcatagcccaagttcttcttcaaattatccaagtgacgacccaggaaccaataatccacacggaattccttcccccatgtagttaccgtatgtgcctcatccaccacaatcaatcctatccgacggtcacctataaaatgtttaatatcataagccaacaataattcgggagaaagataaaataaatccgtctctccctcgcgcacctgacggtatgcctcatttttttcttcaggtgaaagatcggaagatgcataagacaccttttcatatcccaaatcacgcagattttccacttgatcaacaatcaaagccttcaaaggagaaatcacaattgtaagtaacttatattcttgtcccaaataaatggcaggaagctggaacaataaagatttaccggctcccgttggcgctgtcaacaagaaattataaaccgaatctgtcttcatcgacttttcagactcttcaataacctcttctatcaattgtccttgggaaatttttagtttatctttgccggaagacaaatcattatagacttcaaaatcacgaaaatcagtatagccatatatttcctttaaaagttcttttacggccgggcgacattgctgtggtaaagatgcagttgcaatatttgtttccttcatgaagaaaaaattagctggatgattataaatagaaaaaggaatgaagacttactccattccttttgtctttctgagcctcttgtcggattcgaaccaacgaccccgagattacaaatcacgtgctctggccaactgagctaaagaggcgggtgggtaagcttactatatcgcgccgctacaaccaactacctttgctgcgatcaagccctggaggattcatcaggagctggccgtataggacttacccatttttgttttgcgagtgcaaaggtagatatattttttgaaactgcaatactctcatgcacttttttttgattttagcagaaaaaatacatttttcacccctaaatatagcatgtattcttaataaaagccgtacttttgtagacttattaattttgtgcacttatcaataaagaatgactgaacgtaaaccaactcttcaagaatgcgcaatgcgctatggcacgggcatgggactgctttggtcctttaagttcatgctttttcctttaggactgagaatacctttcctattactcctgtttattgtacttacattaggtgtccctattttgggctatatttttgctaaaaaatacagagaacgttattgcaacaatgcaatcagctttgggaaagcattgctgtttacaatatttatgtatatgttcgcatccctattcgtagcagtagtccattatatctatttccatttcattgacggcggttttgtttttgaattctatcagaatatgattaaccaattcaagacaactgcccaagcagaacttttaccttctatcgaccaattgcaggaagcctttgatatggtggcagcgctgactccattgcaaatcactttccagttgatatcaaataatatattttacggcatgctgatagcaatccctacggcattgctgataatgcgtaaaccgaaaaaccaataagacacatggatatatctgtagttattccactgtacaatgaagaggaatctttgccggagctctttgcctggattcaacgcgtaatggatggcaaccatttcagctatgaagtaatatttgtaaatgacggcagtacagaccgctcttgggaggtaatagaaaatctacgcacccaatcggataaagtaaaaggaatcaaattccgccgtaattacggcaaatcccctgcactctattgcggattcgaaaaggcgcaaggcaatgtggttatcacgatggatgccgatttgcaagacagcccggacgaaattcccgaactctacagaatgattaccaaggaaggttatgatttggtatcgggctacaagcaaaaacgctacgaccccttgtcaaagaccatccccaccaagcttttcaatgctacagcacgtgccgtatccggcatcaacaacctgcacgacttcaattgcgggctcaaagcctatcgccgggacgtgatcaagaacatcgaagtatacggtgaaatgcaccgctacatcccctatttggcaaaaaatgccggcttctctaaaatcggagaaaagatagtgcaccatcaggcacgcaaattcggaaagaccaaatttggcggactgaatcgttttttcaacggatatcttgacttaatcactttgtggtttctatctaaatttggcgtcaaaccgatgcacatgttcggcttcttaggatcactgatgtttatcttcggatttatttccgtagtcatcatcggtgctaacaaattatacaacctaacaaacggcctgccttataccctgataacggattcgccctatttctatctggctttgacgttaatgatactgggcacacaattattccttgccggattcatcggtgagttaatagcacgcaacgctcccgaacgcaacaattataaaatagaagaagagttttgagaatgaagaaattaccaattatcatcctattgttcctgactgcatcaggatacttatggcagggatgcagcgaaagcgattgtcccctgagtacaacatcccttgcacatttcaacttactgagcagtgacagccattcgtccgtcaaactgacttccgaggtcaccattacaggtactaccgtgaccgacgttacagtaaaagacacattgccggacggaaccataacagataaagttgtgaaagactctgtcttgacagacaccatttacaacaaagaaagtgacttgagcagcttcagccttccactcagttatacatcaaaaactacttatacgatacattacaatgaaaagctgaaagacgtgattgaaataacgcatcgcaacatcccttttattagcgatatagagtgtggcaccatgatgttctatcaggtggaaaatatcaattatacaacaaactcactggattctgtagtgattgtaaacccggatatcaacaatgaagaaaagagaaactttaatatatactatactattagggagtagcttactgttatgccccttacgctctacagcccaagaaaagaaaacggcaacaacagaagaaaaagccaccgtacctctgtatcagggcacgtatgtgggcttagatgtatttggtctgggaagtaaaatattcggcagtgactttaccagtgccgaggtgagtgtggaggtaaacttaaaaaaccgcttcatccctattatagaaatcggttacggtcatacagacaccaccgatgacgaaaccaatattcattataaggcttcagcaccttattttcgtatcggtatgaattacaatattcttttcaaaaagcctcatctccccggttacgcgtatggaggtatacgctatggcttcacctctttcacatacgacgtcgatgctcccgcaatggtcgacccgacttggggaaacatcaccgttccgtttacctacaatggggtaaaaagcaatgccggatgggtagaactggtgggagggcttacgaccaaggtatacaagaatttttatatggggctttctgtgcgctaccgggtacgcaccagcatgaagaaaacaggaaatacagaaccctggtatatccccggattcggcaagaacaaagctaaccattttactatcggaacatacagtttaatctataaattacctttttagtgaatgaacacactagagatttggcttttggcaatcagtcttgctatggattgtttcacggtatccataacaagcggaatcatcatgcgtcgcatctgccgacgcactttttttgtaatggcattctttttcggactctttcaggccgttatgccccttattggatggttctgtgccagccggttcagccatttgataaaagactatgaccactggatagctttcggccttttggcttttttgggaggacgaatgataaaagaagggctcagcaacgatgataaatgttgttttgaccctacccgcttaaaagtagtattgacactggctgtagccaccagtatcgatgcgttggctgtcggcatctcctttgccttcgtaggcatgaattcgttcatatccattctttctccaatagcaattatcggctttacctccttcgtcctttctatggcaggcaatctgataggagtattctgcggaaagcggtttaaccttcggacagaactgtggggaggtttaatcctgatagccatcggcatcaaaattttaatagaacatctttatctcaactaattataatattatgaataaaaaaaaactaatctggcagttaccctttcttgtggtgctgattgtgggaacggttatcattctgaaaaagcaacctcctttccgcacagacgaaggatttattttcggtacagtctataaaatcacctaccaaagtgacaaagatttaaagaaagaaatcgaagctgaattgaaaaaagtggataattccctatcccctttcaaccccaattcaatcatcagccacatcaaccataacgaagaggtggttcttgacacactattcacccatgtatttaatctggctcataaaatatccgaagaaaccgatggagcatttgacataacagtggctcccctgactaatgcctggggatttggatttaaaaagtccatccctttggactcattaaccgtagacagccttaaacagcttatcggctatcaaaagatagagttacagaacaacgaaaaaataataaaggcagatgagcggatgatgctggactgcagtgccattgccaaaggtttcggtgtagatataattgcacagttattcaacagtaaaggtattaaaaactacatgattgatattggcggagaggtgattgtaaacggaaaaaatcctaaaatgaatgcatggcgaatcggaattaataaaccaatagacgattccttgtccgtcaaccaagaattacagacaattcttgaaataagcaatgtgggcatggcaacatcaggtaattatcgcaatttctattataaaggtggaaagaaatactctcacaccatcgaccctcgcaccggttatccggtacaacacagtattctttcttccaccgtcattgcccgtgattgcaccacagccgacgcctatgccactgcatttatggtgatggggctagataatgcaaaagctttttgtgcaaaacaccccgagctggaagcttatttcatctgttcaggcgagaatggcgaatatgagatattcttcactgaaggaatgaagaagtacatagtccatgccaataatctaaaataacgatgtattcatgaatgcatccgggagtgtgtcaaaactaaaatgatagattagaacgttgacacattcccttacaggttgatgtttccacaacctgcttatttcaaattctggaactgttctatcagcagagtcaggttagcagtaaaaagccgggcggaaatagccaaaagaatgataccaaagaatttacgaatcacataaataccacctttccccaaaaaacgctctatacggtcggtcagttttaaaaccacataaacccataccatattcagcaccaacgctattacaatgttaaccggagcatattcggaacgcagcgaaagtaaagtcgtaaaagcaccggcaccggccaacaaaggaaataccaacggcaccaacgttgcctctttaataggtccctggtttttaaatatttcaatatccaatatcatctccagtgacatcagaaaaataacaaaagcaccggctactgcaaacgaagcaatatctacctgaaacaacttcaacatcatatcgccggcataaaagaaccccagcaacaacgcgaaagaaataaatgttgccttgttagcattcacatttcttcctttctgcttcaaattcaatataataggtatagaaccgataatatctattacagcaaaaagaacgataaatgcactcaaaaactcctgaaagtcgaaagaaccaaacatacttacctccttttttagctgcaaatatatttattttttatgcactgtacaagcttttatcttaaaacattagtagactgtaagaaacaataaaaaagataaaacagaatgcaactctaaataataaatctcgttttatcgttacctttgtatgttaaactataacttaacgaagattagaacttatggaaattacaatgtacgatacactattacaactccctttgttccaaggattatgtaagaatgacttcacgagcatcttaggcaaagtaaaattgcatttccggaaatacaatgcagacgagattattgtagaacaaggagagccatgtactgaacttatctttctgttaaacggtgaaatctcttctcagattgtcgatgagcaaaaatcatactctttacacgaaacatttggaagtccttttgtattggaaccctattctctgttcggcatgcatcccaactatatcgccacgtatagagcgcgtacagatttgaacttggtcagcattgacaaagcatttgttctgtccgaattgaacaattatgaaattttccgtctcaattacttaaacatattaagcaatcgtgcccaaattgcttataataaattatggaacagctatataggaagtcccaaagaaaagattatcaacttcattttatcacgttctatgagaccggagggtgaaaagcgattaaaaataaaaatggaagatctggccggtttaattgacgaaacccgcatcaatgtctcaaaagagctgaacgatatgcaggaaaaaggcttagtagaattaagtagaaaagaaatcttcatccctgccatggaaaagctctctgaataaaaactgaaacagtctctcaaatcgtcaactacaggggcaggggttgcctgcccgaaccggtggtggcgactttgggagtaatccacaaacaagctgttttcgggcgagcaaacctcgcccctacctattaacaaaatgacagcattatcaacgtttagacacaacccatcattttttatgcctattctggcagaatttcagtcaacaagtttgttagcatatggcatccatttaatatactttgttaaatatatagatagaatgaggtgaatgagacttttttttagcaattttgtaagtcaaatataataatgttatgacagaaacaaaaaacccgtttttagagccttataatacacctcatcatacccctccgttccacttaatcaaagtagaacattatgaaccggctatccgggagggaatgaaagagcaaaacgaagagattgatgctatcgtcaataatgcggagaaacccaattttcaaaacaccattgtggcattggaaagatcagggtcattacttgaaagagtaaccaccatcttcggtaacctgctgagtgctgaaactaacgacgagatgcaggagctggcagaaaagatgatgcctttactggcagagcataataacagtatcagtctgaatgaaaaactttttgcacgtattaaagctgtctacgaccggaaagatcaattgactttaaacggagaagacagtatgctgctgcaaaagacctatgacggctttataagaagcggagccaacctgcaaggagaagcaaaggaaaaataccgtcggctcaataccgaattaagcgtactcgcattgcgcttttcacagaatctgctgaaagagaccaataattatgaactttctctaacgacaagtcaactggaaggtctgcccgaaagtatgcttgaatcatacgcccaaacagccaaagagaaaggaaaagaaggcaatatcatcacattggatgcacccagcttcgttcctttcatgaaatactgcaaagaccgtatactgcgacaacagctttacatggcctataatacgcaatgtactcacgacaacgagtacaacaacatggacataatcaagcaactggttaatatccgtatggaattggtacaactcctcggttattccaattatgcagaatatgtactgaagaaacgtatggcagaaacagaagaatccgtttaccaactactaaaccaactgctggaagcctactctcccaccgcgcatcaggaagtgaaagaagtggaagaattagcccaccgcctggaaggtaacgatttccaattaatgccttgggactgggcctattattcggaaaagctgaagaatgaaaagtttaagctgaatgaagaagaactacgtccctattttgaactcagtcaagtaaaacaaggagtattcggattagctacccgcctgtatggtatcacattcaaggaaaacaaagagattcccgtctaccatccggatgtggatgcttatgaagtatttgatgaagacggcagctttttagccgtactatacaccgattttcaccctcgtgccggaaaacgctcaggggcatggatgaccagctataaagagcaatggatagaaaacggaatcaacagccgcccacatatttccgttacgatgaacttttccaagccatcggcagaaaaacctgcactactcactttctcggaagtaaatactttcctgcatgagttcggtcacgccctgcacggcatatttgccaacagcacttacgccacactgagcggtacaagtgtttattgggattttgtggaactcccttcacaaatcatggaaaactttgccatcgagaaagaatttctcaatacatttgccaaacattaccggacaggtgaacaaatcccggcacaactcattcagaagatagtggatgcatccaatttcaatattgcatacgcctgtctccgccaactgagcttcggtctgctggacatggcgtggtacacccgcaagactccctttgacggagatgtgcgtacctatgaaaaagaagcatggaaaaaagcgcaagtcttaccttctccggccgagacatgtatgtccgtacagttttcgcacatcatggcaggaggatactccgccggatattacagctacaaatgggcagaagtgctggatgcggatgctttctcgctatttaaagaaaaaggaatcttcaaccgggaagtggccgattctttccgccggaacattttgtccaaaggtggaacggaacatcctatgacgctttataaacgcttccgcggaaaagagcccggcattgaggcattactgagacgaaatggaattatcaactaaaaacaagaaaagaaatgaaactgaaatcaattctttacctattaatagcacttccattattgtggagttgtaataacgaagataacatagaagatattttttcaagtggcacttggtatctgatcaatttttatggcggaggagtcgacgatgccggcacacccgaatttactcccaaagatgacaacgccacactggaagttatccaaaagtttaccatcgttttcaataatgacaatacattcaaggcttcggcacaaaatatcacctttgaaggcatttgggaagcaaatggaaaagaccgttcggtgagcatcaacatcgaagaccgccgtaactccactaatctaagtaacaagtttatggatgcactggtaaatgcccgcttttataaaggagacagcaattatctgcgactggctcccgaagacaagaaaagctttatccaactcagacataattaatcacatggaaaccaacgaagaaaaacaactgaaactcgacaaacgatacatccgcatggccggcatctgggcagaaaattcttattgcacacgtcgccgggtaggtgcattaatcgttaaagataaaatgattatttcagatggatacaatggcactccatcgggttttgaaaatgtgtgcgaagatgacaatggagtcaccaaaccttatgtactgcatgccgaagccaacgccattaccaagattgcacgctccaacaacagcagcaacggagccaccatgtatgtcaccgcttctccctgcattgaatgtgccaaactcattattcaggcaggtatcaaacgagtggtttactccgagaaataccgattggaagatggactggaactattgaagcgagccaacatcgaagtaatttatatcgaccccaatgaataatagtaaataaaaatatgagcaaaaaccgtacatcccgttttataccgattatcattgccgtaagcatcgtagccggaatattgattggaactttttacgctaaccatttttcaggtaatcggttaggtatcatcaacacttcctccaataagttaaacgccctgttgcgcatcattgacgaccaatatgtggacactgtgaagatgaacgaattggtagaagatgcaatgcctcaaattttaggggaactcgacccccactcttcttacattcctgccaaagacctggaggcagtaaactccgacttgaaaggaagctttagcggcatcggcattcaatttaccatccagcaagacacaattcatatcagcaatgtcattcagggaggtccgtccgaaaaggtaggtttgatggcaggcgaccgcatcatctctgtcaacgatacagctttcgtaggcaagatagtaaccaactacgaatcaatgaaacgtctgaaagggcccaaaggtagcgaagtaaaactgggtgtttatcgtccgggagagaaagaaccgctatattttaccattattcgcggtgatatccctgtcaagagtgtggatactgcttatatgttgaacgaaaaattcggttatatcaaaatcaataaattcggggaaacaacatatcccgaactgctgattgcattagcaaaactaaatcaagacaactgcaaaggtgtgattatcgacctacgcggcaataccggaggctacatgggagccgctattcaaatggtgaatgaattccttcccaaaaataacctgatagtttacactcaggggcgcaaatctcctcgtgaaaattatcactctaacggaacaggcagcagccaaaaaatgccgcttatcgtactgacagacgaaggttctgcttctgccagcgaaatttttgccggtgccattcaggacaatgaccgcgggaccatcatcggtcgccgttcttttggcaaaggattggtacagcaacccatcgacttcagcgatggttcggctatccgactcactatcgcacggtactatactccttcaggacgttgcatccaaaagccttacgtcaaaggaaacgatatgaactatgaaatggatcttgtaaaacgctacgaacacggtgagttcttctcgcaagacagtatcaagcaagaccacagtactatttactacaccgccaacggacgtccggtttatggcggaggcggcatcatgcccgatatttttgttccccaagatacaacgggagttacttcctattatacagcagcagtaagcaggggcctaaccattcaattctctttccaatacacagatacccatcgtgcggagctgcagaaatatgatacggaagcaagtttgctacagtacttgaagcgtcagaatatcttggaacaattcgcccgctttgcagaaaaaaaaggcttgaaacgccgcaatatcctgatgtataagtcacagaaattatttgaaaagaacttatacggtaatatcatttataacatgttgggcatagaagcctatatccaatacctgaaccaaaccgacaagacagtacttaaagcactggaagtattggaaaaaggagaatctttccctaaggctcccgaagaaaccgtagaaataaaagtcaacgatgaaggaaataaaaaagaaactgcgcaagcagatagcacaggaaaaaagccgtcacaccgccacagagttgacagcgaattccattgctttgcttaacaagttggaacaacatccgcttttcattgcagcaaagacggtattgctttattactcattgggtgatgaagtacagacgcatgattttatagagaaatggtatcggcagaaggacatccttctgccggtagtcaaaggagatattctggagctccgccgttatacaggtccacaaaatctgcaaaccggtgaagcctatcatatagaagaaccgacaggtgaagcatttactgattacactcaaatagattttgccatcatccccggtgtttcttttgataaaaatggcaatagattaggtagagggaaaggatattatgaccggttacttccccaactccattcttataatgtgggtatttgttttgattttcaggtaagtgacgagataccgacagaatcatttgacaaaccgatgcacgaggtatggacggaaaaaggaaagatttcccttcaccaataattaccggaaaataatatttacaataacctgtgcacctacttgcttgttcaaattcctcaccaacaagtctcttcccatcatcagttcctgacggagtacggaagaagtgaggtgtacataaagaatctgattcttaatataaaggttgcttgtataaccggcaatagcgggtcccactacatctttccatgcctgtaccagcctatattcattcaaaggagactccagtccgttcaaacgaaagaacttacgaatcatatctcctatttgttccgcatcattccgcttcattctgtatctcctttccgttctgcaacactgccattttctactccaaacactttatatttcccttcgatattctccaaaatcttatccaaatgttcccggttggtatccgttataaaaatctgtccgaagttatcgcctgctaccagctttacgatctgttccacacgggaagcatccagtttatcaaaaatatcatccaataacaatagaggagtggtattgctgcctgtccgcttcaaaaagtcgaactgcgccaatttcaaagcaataagatacgttttgttttgtccttgagagccttcccttttaattgggaaattccctaactgcatgataaggtcatctctatgaatccctttcaacgaatatcccataatgcggtcacgctgccggcttcctttgatgatttcctgtaagtttccctgtatagcgtgagactcatatgataaattcaccttctccttatcttgagaaatataagaataaaacgactgaaaagtggggataaattcagctatgaattcactacgtttcttatacacgacctctccactcacagccatcatctcctcccacacggaaatcagctcctcatcaggctccacttcagccttcaacaaaacattacgctgagtcaatgctttattatagcgtatcaaagcattcagatattctttatcatattgcgaaatcaccacatccataaatcggcgtcgctcctcactcccgccggctatcagttcggcgtctgccggcgaaaccattaccaaaggaacaaaaccaatatgatcagacagtcgggtatactcttttttattacgcttgaactgctttttttgccgacgtttcaaaccacaataaatttcttccggatcaccttcatccgttacataaaacccttgaatcacaaagaaatcctgatcatgcataacattctgcgaatcaataggattcgtagcactcttacagaaagacagataatagactgcatccagtaagttcgtctttcccatcccattctgaccaataaaacagttcatcttaggtgagaaatccagttccacctgttccagattcttataattcaatatcgaaatacgtttcagtatcatagactttctgtttgatttaagccacaaaattagggataaaaacggtaaaacctaaaaaaatatgcctgtaaatttcattaatacatataaatgaactacttttgctgtccgaaaactatagcagaaaaataataaaaagtaaatataaaaatggcagaaaaaaaacacactcaagatcctttggatatggaagaggctttaagtacctccgaagcattcattatcaagtacaaaagtagaattctgggagctattgcggcagttgtaatcatcattgcaggcttcatgggttacaagcatttcatctctgagccgaatgaaatcaaagcttcagcagctttattcaaaggagaacaatattttggagccgacaattttgaaactgcactgaacggtgacagcatcggttacaaaggttttctgaaggtagctgatgaattcagcggaacagcagccggtaatctggctaatgcatacgcaggtgtgtgctatgcacaattaggtaaatatgaagaggctgtgaaatacttgaataagttcagcgctgacgatcagctggtaagtccggctctactcggaacaatgggtaactgctatgctcaggcagggcaattggacaaggctgccgctaccctgatgaaagcagccgacaaagcagacagtcaggcattaagccctatctatctgattcaggcaggacagatttatgaaaagttgggtaagaacagcgaagctgtgaatgcttacactttgattaaaaacaagtacttcaattcttatcagtcaatggatattgataagtatattgaacgtgcatccatcaaataagaaagaagatattttttaatcatatcgtaggcacggattacacggacacacacggtttctcttcttagaataaactgtgaaagccgcgaaatccgtgccttattaattcatataaactatggcaacagcgtatcataatttatcagattacgacttcaattccgtacccgatgcagaaaatatgcgttttggtatcgtagtatccgaatggaacagcaatattaccggtcctctgttggaaggtgctgtcaatactttaaagaaacacggagctaaagacgagaacattctggtacaaacagtccccggaagtttcgaattaacttatggctctgcacaaatgattaaaagtggcaaagtagatgcagtcatagcaataggctgtgtagtacgcggagatactccccacttcgactatgtatgtgccggcaccactcaaggtatcgcccacctgaatgcaacaaccgacgtgcccgtcatttacggactgattacaaccaataacatgcaacaagctgaagatcgcgccggtggaaaattgggtaataaaggagatgaaggagccgttacagctataaaaatggtcgactttaaaagaaaattgcagaaactttgaaaaaaagttctgcaataatttgcatattcaaaaataagtcgtacctttgcatcgcaattgagaaacaaacctcctcaataagagaattaaggagttcttaataagcgaatgggcaaataccagagtggccaaatggggcagactgtaaatctgctgtctttcgacttcggtggttcgaatccatctttgcccacaaaaattgcggaagtagctcagttgatagagcattagccttccaagctgagggtcgcgggtttgagccccgtcttccgctcttaagataagaggatatccttttcgggtatcctcttattatttataatgataaacagtgtccccctataagaacattctccttcccttgacaatcagcatgaaaacttttcagagtctatttttgttatatacatatcaataacttttaaacaaagaaaggacaagtatgaaaactattattgatagagctacatcaagaggatattttaatcatggctggttaaagacatatcacacatttagcttcgcaaattattataatccgcgacgaatccactttggtgccttgcgtgtactgaacgatgacaggatttcgccgggagaaggttttgatatgcatccacacaaaaatatggaagtggtttccatcccactaaaaggttatttaaaacatggagacagtatagagaaccaaagtatcatcacgcccggagaaatccaagtaatgagcacaggaaaaggtatctatcacagcgaatataacggcagcaatgaaaaagatcttgaacttctgcaaatctggataatccccaataaagaagagacagaaccggaatatcataattacaatatccttccgttaatgaagcacaacgaattagcaaccttcatctcgcccaatggaaacactccggcacatttactgcaagatgcgtggttttcaatgggaacactgagtgccaatcataaagtgagctatcatttgcacaaaccacatacaggcgtctatttcttcattatagaaggcaacgtagatatagccgatgaaaacctgacccgccgtgacggtatcggtatatgggataccgaaagcatcatcattaaaaccaatgaagaatcacaagtactggccattgaagtagctttataaattatttatttgtggcacattcacccatccggttgatttgcgccacaaattcttccttgctgccttgtcccaaccccatttttctgcatatacgataaaccacacggtcgacagaacgggattgaaccccaagtaaatcggcaatatcatcaaaaccaagccccaacacaaataagaaacaaatgtctttttcattattcgtaagcgaaggataaagcgcttcgaggcggtctgcccaacgatgacgtgatacattcagccaatgttccagcttggcacggtcttcggccggattataacgcggattttcttttgatacaatccgcaaataagtctgagcagcttccacggtttcaacaggaagcgaaatatgtttggagcgaaacgtcacttccagttgacgaatacgcaattctttatttttcttctcttcttcaagggcttgcatctgctcctgtaaattcttggcttccccttggttttcttctatctgctcctgaagtgtatcaatctgctcctgaaggatagaagcatcctttttataattacgcaagatatccagtttttgataacggaaaaacttccagcttccccacagcagtaaggctagtgtacacactgaagctatcgttatcaatatcgttatagtccagcgactgcgataatcattactctgtctcagtactgccgaataatcatatttcttttctatctccaataattcggcacggcttcccgatgtaaacagcaactccagttcattaatataatgctgcatatagagggctgcttcacgctcaaatccctttgcttgcatctctctgtacatatctttatataccgatgctcttaacttaggacgggaagatttcagcacttcaacacgcaggctgtccaccgttgcgcctttacccaactttttatacacttcagccagttcgatatcatatccacgccgcgcctcagccgtagaagtacgttcctgtgcctgcttcagcaaggagaccgcctcattccaattcttcttatccttttctaccagcgccaagcgatagtatatcttttcctgagtactaaaatccatccggtttactatatcaaagaatttatcctgtaccaatttcacctcttcattataccggggcgtaccttgccccaaataaagcggaataaaagccgaactgccccccatggctttccatgaggggacagacaggttcaaatccaatgctttcttataatagccaacagattgttcataatgtgcataccgcccgttgatatgtcccaatgccacatacaccagaaaatgaatccgtaaatcttttgcagacttcactgcctcttccgcctgcttataagcatatatggcctcattatcctttcctaaactttccaatacataccctttatacagaaaagcggacgccttttcatcggaagtgccatgagatgaataatatttcacggcaatatcaatcagcgaatcagaagatatttcctgtccgcacctgtgcatgacttgtgtcatgagcaaggcataaagactatattcttctttagaaagtttctccggcgagggaattgttctcaatatctgaaaagcagaatcgggtgcattccacagataatactttccccatgacaattgagaagtatgtttctccccactgcatgcaacattgaaacaccctataatgactacccagacagacaacaagataaacgaacgtttttttatcatatcacaaaaatatcactttttaaactctccgcaatttatatacaataaaaacaggattactatcatcatttacccctttcaactcaggcggaacagttatattgcacttttctttatacagatgcaactcataggcagtgagcaattgaaccaaacaatcaccctgcatacgtccccataccggaaaatcctgatagctcttggttccgagcattccgtaaagcaaattagcatctcccaatgcccggatatctcccggttgcgcacacttctctgccaatacctgccctgtcttcttatggacagaagcaacataatgccccgcattatatctgcaacggaaataataattggaaggagtttcaaacatatcagacacaaaaatgtcataatcctctccaaactttcttttcagcgaactaaaatcagtggcatccaatgaacgtatcacttccttatccgagttacccgtcctcaacacacacgccggaagaatgtcatccgccgtcactctaaagacggtatcattgctgcctgtcttaaacaaaacggattcttccatatcggaataagctgttgccaacgcaatagtaaacccggctttctcatgagatactaaaggagaagaaaagtcgttcttcattgcaatcgtatctgctttatccgaaaaaactcccaagccataactaccgctttcaaaaggcacgtatggaaaagcaactgaagcaaaacgatctttgcccaccatgcgctgataaacaatcgtataatcgtgattcagactctgaataaactcaccgtccaaggtatagaccattattttattggaacaaaacaaatagagacggttatttttttcgtcagcctgcatccccatcaggaaatcgctaaattcacccggtccctgaccgaaaggaatcagtgtcttgacaaactgtcccttccggtcgaactgcacgatacgctgttccttaacaggagaaacataaatataattacttgtcacggcatattcggacactccatccagcaaagaagccggatctgccgtcgtttccaacggaatgtattccacactttctatctcatcttgcaaagcaagcattgacggatgatccataccacttctcaaatctaccgaaagtaactcctgaggagtttgttccgaaccgcaagaagccataaaagacaataaacaaaagtacttaaataatttcatagcaataatcaatttttaaatgtgtatacaataaccatcggattatcatcagcatccaattgcaaagcaaccggtttatctttcagatatcctttattctccaatttctccaatgtcacggcattaatgacctgcacacaaattctgtctttataaatatatctcggacagaaaggcactcccccatcccaatcattctccattcctattacattgccatcactaaatccaaccgacaattccatgaaatcttgtttgaccggctgagacaagaattctcccgtccgtttatccaaacgctggaaaaagcacttttccggcttggacaagacaatagtccggaaatagaaataacgtgaagtttcaaaaaaggtgaacaactctatagtagataatgtatttgtattgtctttagccatttcattgatgtctgctatcttttcattatattcggctccgttctttttatcataaacacaagcaggacaaatacctgtttccgtcacccggaacacagtatcattgcaaagcgtataagctaaagccgaattttgaaaaggaacgaattgtatttcctgcatataacaagcttctgccggaacattagccggaaagggtgatttggttgccatcatctgattcttttcatttttaagggcaaccagccaaggagattgctgaataggagtaatcgaagctcccgacaatgcaaatgagccattattcaacagatagcgattttccacagcctctaccgttgtggtatcggtgcgcagaaactcaccatcataagaatagacaaacgccggcagccgcctgctatttaaaaaaacttctttcttatttacatccaacgaaatattctctatcgtccaaggagcatattcgcccggaccattccctaccctgcctatctgacatacaaactttccttgtcgggtaaatttaaatacctggtctgtcttaccattttgaacaaagatgaaatcatcatccattatcaaataagtcaaattacttatcaaacacgaatccgtcgtttccaaaggaatatattctattcccatcacatcatccttcatcgaaaaaggagtattctgctccatagccgaacgtacatctgccacccaaacatccttcttttctaaagaagcggattggcatgcgcctaatatcaacagagttaaaacaactcctatccatacctgtgctttgtttttcataatcgtattctatttaaatttcgaagcaaagatatagaagaagaaaacatttcggattatgaaatgaaagaagttttgcgactaaacaagtcactgatatttcaacagttacaagtagtaaggaagattttgtgcgacaattaaaaactcttttttaaagggatgaatacacaaagcaaatcgttttcgggcgagctaacctcgcccctacgaactaaacgacagcattatccacgctttgacacactccgaatgcacaaagctataattctattgtcagctccaccggacagtggtccgaaccaaatatatccgtatgaatagccgcccctttcaacttatcattcagagaagcagaagcgagaaaataatcaatacgccagccggcattcttctctctcgctttgaaacgataggaccaccatgaataaattccctcttgctccgggtagaaataacggaaagtatccgtaaatcccgaatcgagcagcgtagtaaacttagcacgttcttcatccgtaaatccggcattcttgcgattggttttcggattcttcaagtcaatctcacgatgcgccacattgaggtcgccacagacgatgacaggtttcttttcctccaatttctttaaatacgcacggaagtcatcttcccatttcatacgatattccaaacggcgcagcccatcttgagaattgggcgtataaaccgtaatcaggaagaatgagtccagctcaagagtaatcacacgtccttcgtggtcgtgctcgtcaatgcccatcccgtacgttaccgaaagaggttcgagacgagaaaaaacagctgtgcccgaataacctttcttttctgcataattccagtaagaacggtatccttcaaattgagcatccaattgcccctcctgcatcttagtttcctgcaagcagaagaaatcagcatccagccgacggaaggcatcggcaaaacctttatcgtaacaggcacgcaggccgttcacattccatgatatgagtttcaacatgattcttttattttttttaggataaaaactttcagcagcaaaagtaagcacaaaagcatatttatcaaaacagaatacgatgaaaaatacacaaacctactttcctgaaaactcccaagcttcgccataaacggctcaagatacgccaacgcaaagaagaaaccgacacggcacgtcctgaaacccgataaaccattcccaatactccgataatatccgcagctgtacactcctcataaaacgcacaaacaccatccccctgcataataaaccgaccatccttcatcccgacaatccggtgaagcaaacaccggccacgataacgaaacaaaaccacatccataggtttcaaagattctgccttacatggataaaccgccacttcatctttcccttcgcgtaataacggaaacatagaactgcctttcatccgaaaacgtacactcttcccatgatgaatatcatcctctacaagagagaagaaacaatcatttggcaaccgcttcatcattctctgcaaataaagtacgacaagacaactccacagcctctctatccggcaaacaggccaaatgataaaaaggaacctgagaaacaattttccctaatgtggtaccgataccttcataaagtctcctgtcataagcaaactccggaggagaagaaggatgaagagctgcataagaccgcaatatccctaatctgaccatccgattggaagtttcctgtgacagtctcacacaaccgaccagttcatatcgctctgctttataacaaggagttttcccgctccatggactgccataaacccatattccggtatgttcgacatgcaccaccggactatcatcattcaacaatacggctcctgcccgatactcctgccacaaacgagtatgagtgctctttcctgtaccgctttcccctaaaaacagtacagccttttgacgatatacgatacaactgctatgtatagccaccgtatccgacattgccgtctgtatcccatagccaatccacaaggcaaaccgcactaagcgagctgaccagttgccgcacagataacaaacatttacttcattatcagtccacaggaaaagacttttttcatttaccggagataatcttaacaaataaccgcccgcagtacatccgaagattccttccaccccttcatgagcaaacacatattgccgttcacaaaaagcaggaatattcccggactttccttccataaaaaagaattccggtacattatcatccccctcggcaacctcaaaaggagcaaacccagccattcgctccaggacagaacacagaatactgcccgatactttaaaacagtggccgcctaccttatatatattatgcattttcttttcaatttaaagttattatacgattacaaaaagccagcgaactctcacgatgggctattgataaaaccgtcagcccccgataatcatttctgagtccgcatatcatctcatttatttcgcattcggttgccgtatccaacgctgaagtagcctcatccaacaacaatatatccgcctccttataaagcgcacgtgcgatccctactctttgcttctgccctcccgacaaacgtgccccactttcgcccagcagcgtatctattcccagcggcaactcatccacccattcgtccagcctcacctgccgtaatatccgcttcactttctccttactgatatcacaacatcccaatgcaacattctcagccagtgtcccgtcaagaataaaaacgccctgcggcacataacctatccggcgatgccacaacttcctgttctctgctgaaaggagaacaccgtctatccgtatctcccctccatcaggcttcaagaatcccaataaaagattgaacaaagtggacttgcctataccgcttgaacctcgaataccaatatactctcccttccgtatcgtacaatcaaactcctttaagactctctttccttccggataagtatacgaaagattggatattgcaatttctttttcaaaagataacccggctgtcggtttttcttcgaatgttgaaaataaatcttccattcctgcttttattatccgcagacaaaaaacggaattctgtatctgagtccatgcagaaagcgattcacgcaaagccggcaataaacgaaaggcacccacggcaaagattcccaccaacgccttcacatttcccgtcccggacaatgcaagcagtgtgagtcctataacaactgataattctgaaaggcaaagcggcagatgatacaccgtctccagcttcaaacggcaaaaagaaatcgtatccaaacccttcagaaaagaatgttgcaaggaaggaaatgcatggtttacttccagctcggcatatcctttataagcttcggtgacaatacgtgtctgttcgcgccgtgccaacaactcctttttaccataataccttatccgcctttttattccgaatatatacatcaacataaaagggaaaaaagcaagatataacatcagcaccgtcatcggtgcatataccaacagtaccgcagtaaccaataaaataagtaatacatcagcagtcatattcagcaacggagacaacaaactcatactgaaagcataacatacgtagttcacctcatatcccaaacgagtgctgcccaaccgactgataaacaagattccgcgatgataataagaagaaaaaagagaaaaacttaatcgtttatacaaagacaataaaaaatagttttgaaaacgggacaatcccatgaccaatacatttttgaataaaataaacccgacagccaacagacaaaacaatagggcttctcccttttcttctttctcttctatcaaaaaaagaagtaccggtattaaagctgcaagtccggcaaaattcagcaacgcactgaaaaacacagccattattaccctcatccccattcttcgctccgagggcaataataaatgatagatttctttcaacataaattatgataccgttcggcggaatatggattgtgggaaacgtacatgttggataacagatatccaaagccactttactaaagatacacgcatcacactgtcacacaaacgatgaatatgtaacatccgcttcagtttatagaccaatattccccatttaccggtagccggtacatttatattataagtgggatgaagcatttcctttaataaattctccgccagctcttcccctcctttcatgacaagaacctctgtacccaagtagcggttgcacaagtgtgtaagtgcataaatcatattcagaaaacgttcatccgtcactccttcgggtatcttcagtccctgcttcttcaacaggcatgcccaatcacataagtgatgcatggcaaaaccaagtgcataatgctgtgccgaatgaaaagcaaggaaaacagtattgaaatccggcgagggagtcagcacctcatacttgccatcaagcactgtcagccggggacggagaagcttccgcaacaaaatatccatcgaaacagccgtacggtatatttccgtattcaggaattttttatgattctctatcggaatacctttataataaaacatactgtgcttttgcgaatgcgaaaaatccacctctattccccggcctctcatcagcttgtcggcaagagagtttgcttccctatcactcagaccggaagaatcggcagaataggtaaagatatcaatatcacctccctcacggtgagaaggaataggataattattggcaaaccccactccttttaattgcacggcagtgatgccgtgtgtggcatagaatgtcgataaatcggatataacccgacaatagtaccgatatcttttttcacatctttctaccgccagccaccaatttatctttaaggatttgggtggttgtaactctgtgggaagagtaatcaaaccatcccaggcaagtgccattacaccctgtcgaacagacaagcggtaacattcctgccaagcttcggaagtgataccggcaaagattgttgcatctgcatgagtaccatgcaaggcagaacgcaacaaggcaaaaagcatttgttccgtaatatccaatttcattttagataaactttagcatataattttttaatcagccgatatgataccgcatttcttcaaggcatccacccaaaccgttgcatccttctttgccgtttcttccgaaacagaataatgctccattaatatttccgcagcatcttctatcaaaaagtctttgtccgaaagctcattccaaagaagccgtgccgaagtattaagagagataatgcgggtaaggtcggcttcgggcgtaccttgattgacaataatagtttctccggctatatcacgaagcttgaatttcgtattgattcgcataataatttcatactttaagaaaaagaaagccgtccaaccgaaccataacggacgaaacggctttcttttgatgagtattacaaactttcttattgaataattatcagttgcttgtttcctgctttacattgctctcgaccttctgtccgttcacggtaatattagcagtaccatactccacagccggattataagatcctgaagtgaaagagcaagagttatcataagtgagcgttacacctttatcctctgctgcattcgcacaaacatgcacagccgggaatgaagaagcatgagtaccctctacttttactgtaacacccgtcatagtaaccgtggtaggatattgataagccccattcaaataattaccgattgttatacctgcaaatgctgctctgttaccgtcttgccattgtttcatgtgattattctcactgtgagtactctcaagctcagctttcagcgtaaatgaagaattcttaatcgtataagttcctccacgcaaaaaagccgcctgatgatttcctgagaactcacaattctcaatattcaccgtagacggaatatttaccaagagagctgtttcagtagcaataaagtgagaattttcaagtactatctttgtactacctaccaccggattcgtatgagcattagtattaactgcataatatccactcgttattgtggagtttttaactatgatagaggtctcctgaacatttttgtcattcaatatacctgcagcatctgcagccgttgctttataaacgataccatccaattccaatttagcattatctgccgcaagagatattcccatttcattatctgtgatatttccatcagtcaatttaagactacctcctttcaccaagatgaatgttctgccttcaatcttatcatcaataatcaatgttttcttattaagatcaatattcactacttgagattcaagtacaataaagggagaaacagtacaatctttgcccaataccaaactgagcttagcatcatctgtcaaataaatcaatgctctttcttttgattccaaagcacttacatcagagaatgtaccacctttgataaaagcagtacaattcttactatatacttgcccttcaaagataccatctttaatttccaaagccttagttccggtctcattttgcaaatccttttcatacaaagcataaggacctgtcagtgttcctccattaataaccactttaaggtctttatcggtaacatgctgtgagacagcaactgccacaccggtcatagtcgtaccactgccattgcccttctcatcaaaggtagatactgtactctttattgcacccgcattgacagtcaatgtacccgaacgcatttctataccggtcggtgcactgacagtaccgccattaactgtcaataatccgtcttgtggatgataaatggctgtaccttctccagcatttgcagccgtaattgctccaccgttaataaccacttcggttccatgacgagtaccattaccactgataccgtaataataacccttaagcgtaccaccgtttactgtcagttttgccacttcaccactggcaccatcattgccatcagtcaacttcactgctgtataaacactttccacctcattataatcaatgctacctttaccgttactgctatcattgatagtcagttgggcaccacgacgtacaagaaccaccgcatccttagttttcagcacttgttccagccccgtagtcttagcctttatgctatgaccattcaaatcaagtgtcaatgctccctcaacaaccaacggtcggaaaagagtaacatcctgttccaaaataaagtttccgccggctttggcaaccgcttccatttccgctattgccgcatcaactatttcaaagtttgcattggcagataaatcaggatattccgcacccgattccacaaagactttcactacattggaattctctgaatgccgttctatggcagtgattgttgcaccctttttcactctcacattccctttcttcacaatcaacttagtgattgttactcctgcatcaacgacaagtgtgttttcggctgtagaagctgttgcctcctttatggtagtacttcctccgtttgaagataatgtgacagtcgtattcggcatattaacatttaccaccggagcctcttcagcaccctctgtttccggcagggcaatcgtcatgtctttcacagatgaagttccgccaccgctagttgctttatcttcaaattctattttagctcccgatgccacactttggaaagcaatgcttataggagtctcagatgattgtgcagcaggcacctctatcttattattttcacctgaaacctcacccgatacggttacggccgtattcttccctaaagcaccggcaacctcagacacagaagataccgtctgggcttcgccaccggtaatcgttccgctggaaatagacaatctcttcaagtctctgcgagctatggtataactgccgccaaagacatttgccaattcttccgtatcattcaatatcttcacacgcacattggtataattacctgtcggcacaggaatgtaaaatgtaccggaagtatttttatcatcgttgctaaaagcaatactgacagtcttttccgaatcgtctgtagcagttgtggcttctaatttaggttcattacctgataatgctaccgtatatttaccggctatcttttgatctgccgtgaaagtcagtttcagattattccccacaggcaatttggcaaacttaatgcaaaacacacctcccaaatgcttcaatgctacattactgttctcaatctttccccacatggcagggttataactattgcctttacctttggtatccgtttgataatcagcatctactttagtatagctgtactctttcgggaaattgtaagtaagcgttgtagtaccattagtcgttgagacagcgtgtccgtcattataaggataagctgcataaccggctatagttcccgtcatatctccactaaaggaagccgtggcttgaccggccccgccttcaaccaaagtaagagctgtaaaaccgatggtataaccgtttccgtcttgcatggttacacccaaacggtcaccttccgaccaataaaatgctccattagcatcaaatcctgcacgtgccataccggaagcattgctttccatggtggctcttaacattccattcgtgaccttcgtaccaaagtcgtcttcgttgttacaaccggtcaacaaagcggttgccacagccaaacttattaaatatctaaatttcataatttgctttttgttttcatgaattatttctaacattacaaatggagtgtgtcaaaaccaaaccggtctatcccatcgtcggctgtaggggcagagtttgcctgcccgaagacacaaaacaaactgttttcgggcgaacgaacctcgcccctaccgactaaacgacagtattatccaccttttgacaccccctcatacatttctttagtcagtccaattaccgttttcgccaccaccactggttgcaaatcctttttctacttccacttcgatgatttccactttcggagcttcatacgtttcaatactattttccttcataacctttgtacaataaaattttaatatgattttctattttaaaaatcagacattatacgccccaattacatatttcgacacttgacaaaaataaacagtaattgctgtctgagggcggaagattcctggcggaccggtggtatatatctcaccgctgtagtcccccgacgtgaaatggaatgcgaagaacggcattcgcgtgtgtttttgttttttcatacgcctgcattgttttagttgcctaaaaacggttaactcttgccatgtcttccctctttgcatgacaattaataaaaaaaagcgtgagggctgtatcttgtttatcctatcgtcgggccttcgcaatgcctttcacctggataaacaacagccacccacgccgtttgatatatagatgccacaccaatggcaggtatataacacagacgtgagcgttgttgttatcatcttcaggtgaaatcaaagttgcgaagtttgacgatagaagataatttcaataacgcttcttaataaagatataaattcccttacgcataagagaatattcggtacaaatataatatattcttaattaggaaaaaaatttcttatttacttttttacttttattatgtactttcgggtcaagtcaaaaagtgtgtgggcataatattttgagaaaatccgggtcacttattattcttggggatttaaatatcatatcacaaacaaagggaagaataagccgttttccaagttcggccaaggtcttttaaacggaagattattacagtctgcggcaatggactgtacagtccactgtagcagactgtacggtccactgcaacggactatacagtctgctgccggagactgtagtaattcgacggacaggcaggcataaccggaaggacggaaacgcctggtccggctaatgaaacgacttaggaagcttaaaaacgcatgcaggggattggaaaccggaggagataacgactgcctcttatcatccacaggagtttcggaccgacccgtactttctttccgtagatgaagttttattataaagaaaaagagaggaaacgctaaaataaaaatcagagaggctcgattcctacaaaggaaacagggtgtatcaaaacgtggataatactgtcgtctagttcgtaggggcgaggtttactcgcccgaaaacagttcttcgggcaggcaaaccctgcccctacaactgataatcggacaggccgggttagttttgacacactcccaaagcccattcccatagattcgaaattacaagaaatttcaaatgtttaattacattcttctatctgctttctttctattttatctattaaagtattgtctatacgcttgccaaacaatggattaacagtcattggagttaattcatacggaagcaaagatacagtgcgagccccggaacggtctgttttacctgctgccctatcaagcgccagtctcaacaaagattcattctcgtcacccaactgataaccgtcaagcggattatcctcagccggataatccggctttaaaccatcgggcatacaaggattattgccatccttatcggcataacggttaatcattacatacaacccccagttcttgataacgcttgggaactttgaataaatgttttcaggaccgagcaacgctcccgtacaatatttaccatgagactgacctccgataagttccactgccatataaggcattaatccgataagtacagattcggaagccgatgccgtacccgaaccgataagcccgtaaatcttagtgatgcctacattggcccttcccacatcaatagttttagaaccattggtgacaacagtgttgaaataagtattcaggtcttctccttttttcttgtaatactccattaaatccttattccatatttctgtttcataaacagccttgctcttcaccacattctccggtgcaagcataaatgccaatacattctccgtaaaaacatagcctcctccattataacgcaaatccagaataagttcactaatgccctcttgtttaaactgacaacaaatatctaccagtttttcagccgaatccaaatcgaaactgctatatgccagatagccgaccttcttgcctccgacatcaaatgttttatgtacaagaattggattttcgtacattgtaacggcatcaagcgtcagggtctgtccgcttaacccaatgtacccgtctttctgctcacccatgcccaaagcaatattcgaactataaagagcttcctgataattgtccttcgttatctctttcccattcagctgcatgatgatatctccgcgttttattcccactttgtaagccggacttccttcataaacaaacgccacgataaagaaataattttcggagttagaaaacttgccaagcatcagattataaccgtaagtagtggcaaccccatccatgttattaatgagactttccatatcatccgtcatcatggtccacttgtctacctccttattattttccttaaatcgtatgtcttttacggtaccaatcggatcctcatttacattcgggtcaagcttctgcatctctgcggctatttcatctttccacaaataataggtatccagcgcatcataagcaaactggttggcataataaatctcatcggttgtcactctgccatcgccactaccttgaccaccgccattatcatcatctttagagcatccgctcattatgcataaaacgcataaaaaaagagaaaggaaatagatttttttcatatatgatattttttagaaacacctagtaccacgtataagtatattcattttcacaaaaatacaataatcttttcaatatcattccatgaaggtgaaagagtttaaaaaaaacggtttgctccccgaaagaagcaaaccgtttttatccttatgattaaggaaaatactttctaaaaattactgtgcagaatcagcaggagcagtttctgttgcggcgccatctgtctgaggagctgcaaaaccggaaggtgcattcaatgggttagtagctccttcttttacagcttgttccataattacagaagattctgtatgagctgtaggaacaaaataagcagtaagcacactgcatgcaaccataaaagcagccaatccccatgtcaatttttcaataaaatccgtagtcttgcgaacacccataatctgattagaagaagcaaaactagaagccaagccacctccttttgaattctgaatcaatacaacgaaacacatcaaaagagctgcaagcacaattaatccaataagtaataaatacattttctttattttgatttagtgttaataatcaatttctccaaaaatcttatttggtctgcaaagtaagcgtttttttttggatatttcaaatttaattttttaataatttcaagagcctttgaatatctttgttgtttaacgtatatttttgccaatgtctcggtaaaataactctcgtcttccggttccggctctttttcttccggctccggttcatcggccctctcttgtgaagaaagaagaggttcatctgaattgttttccagaaaagtatctatcaaatcctgtcctttcaatgacggaatttcttcaaccgggactgcttcttctgtttcggtcaataaataagaggtgtaatccgtcgttatatccattggcaattgtgtaatatctttctgttcttcttccggctgtccggccagaaatgcatctatcagtgaaagcgtacgatcaagtcccaataaatcggacgacttttcttttccttccgatggagtgatggtaaaccgctcaccttctatcaaataaaacagcactttacggtcggctatatataaagccgctctcctcagttcttctccaaaagtaatgtcatgaagcagaaacagatttttcagataaagtaatctcactgtctgaaaataaggataacgggcaagcaaagttcgaagctcgtaaagagtatcccgattcaaaagctcgggatgtgcaatccattcatataagtgctgttgtgtcatgtcaaagatagttattaccaattggctaccgtcatattaaatatctggtctacaatatctttaatcatctgattcaccaattcatcctgtacagacgagagttgctgactggatttatattcacgactggccgagaattgctgattattaaaattattcttcggattagccttatcgacaaagttcactctgaccgtcatacggagttccaccatgtttgaataaccgtcggaaccgatacctttatttgcagcatcatagtttgtgatttctcccgaaagttgcaaatctcctccgcgtcttacctgtgtcagacgcgtttgctgcaaataaacatcttgcaatgcagtgttgaacatattctccatcggtccccaaacaaagccgacagaacggttaggaaaattctcgaaagaaattgttttagtcttcgcataatcaatggaagccccattaaatttataagaaaccgagcaagccgtcaatataccgatcagtacaatcaagctgcctatccatttcatgtttttaatccaagccatattcttttatttttctatatagtgtgcgttctgaaatattcaagtcttttgctgcattcttgcgtttcccatgatgacggtcgagtgctttacgtatcatttctttttctacttcatccagtgacagtgtctcttccacatattcttccgtatcctgaatatcatcatccatcggcatctgcttggttgcagagatgttgatggtaggcacaggaacgggagccggggttgccggaaccagattacgagaaggttcctgataataagataccgctgttgttgttgccggtgctacggttgcagttgttccacgctcggccatcagagtattgactaactttttgagttcggtcacgtcacgacgcatatcaaacaagacttgatataaaatctcgcgctcactgccgaatgttttatcacccggctttatgccaaacaacataggcaaacgcgaatcctgttgctgtgcaggaagatagttctgcaaaataacgggagtaatgtcacgatttgtttcaataatggatatttgctccgtgatattcttcaactgacggacattgcctggccaaggataagccaacagcattgctttcgcatcttctgtcaactgaatggcgggcatacgatatttctcggcgaaatctgaagcaaatttacggaaaagcaaagcgatatcttctgcacgctctctcaaaggcggtatcttgatagggacagtattcagacgataatacaagtcttcacggaaacgtccttcggaaatggcctctgtcaaattaacatttgtagcagccacaatgcgcacatccgttttctgtactttcgacgaacctactttaatatactctccgctttcgagcacacgcaacaaacgagcctgagtagataaaggcaactcacccacttcatccaaaaagattgttcccccatctgcctctgcaaaatatcccttgcggtcactgatagcaccggtaaaagcacccttctcatgaccgaaaagttctgaatctatggttccttcaggaatcgctccacagtttacagctatatactgtccgtgtttacgacgactgaattggtggattatctgcggaaagttttcttttccgacaccactttcaccggttatcaatacagataagtcggtaggcgccacctgaatagcaatatctatagcacgattcagcccttccgaatttccgataatgccgaacctgagcttcacgttttgtatttctgacctgaccatatttctccttgttaatatgacaaaattacaaattccccggcagacagcaagtaattttggcagaaaaaataaaaaacaaacgcggatttcacggattaatacggtctttaataaagagaaaccgtatatccgtgtaaaccgcgtctgcttaatattaataataaaggatactgattaatctatttcctgatcagcctcataaccacccatttcacgaatagcattcttcaaaatagcgtactgctggaagagatgattgacaggaatttcgttttctgtgtagtcgtgcatcgggctcttcaagaagaagctcaagaaacgctggatgccgaaacgtcctgcacgtgcagccaagtcgctcaacaataccaagtccagacacaaaggtgcagcaaggattgaatcacggcaaaggaagttaatcttaatctgcataggataacccatccatccgaaaatgtcaatattgtcccaaccttccttactgtcgttgcggggaggatagtaattgatacgtactttatgataataatctgtatacagatcaggctgttcttcaggtaccagaattgattccaatgtagacaacttgctgacttcttttgtacggaaattagccggttcatccaaaaccaaaccgtcacggttacccaatatattagtagagaaccagccggacaaacctaagcaacgagttccgataatcggagcaaaacctgatttaaccaatgtctgaccggttttgaagtctttaccggcaataggcattttagtcttttctgccaattcccacatagccgggatatcgactgtagtattaggagcacccataatgaaaggagcaccttccgacagagctgcatatgcatagcacatagacggagcgatatgttctttatcgtcagccttcattgcttcttccaaagcagctaatgttccatgtattttttcatcaacaggaacatagatttctgtagaagccgcccaaagaacaacgatacgctcgcaattatttgcagctttaaaattacggatatcttcacgaagttgttccaccatatcccaacggttcttgcaatctttcacattatttccatccaaacggctggcatagttatggtcgaaagcagctttcatcggaactattttttccaactcgtcctttacaggattgatatctttctcttgcaaaacttctgcattaacagctgactcataggcattagccggataaacatcccatgcaccgaatacgatatcattcagacttgccaatggaacgatttcgccataatgcaaatactttttattttctccacggccaacacgcatcttatcatattgagtcatagagccgacaggttttgccaagcccttacgagccatcagcactcccgtcataaaagttgaagtaacagcgcccaatccaacacaaaggacacccaatttaccggtagccggttttacattcattttttccattctaatttccttgttaaattgcatctcatagtagagattaagataattgtgacaaagttacaccttcttttgaaaactaccatgcttttcttagtttttttatacctttgcagccgttaaacatttaatttaggtatgaatgatatttgctgtataggacatataacactggataaaattgtaacgcccaagcaaacggcttatatgccgggaggtacttcttactacttttctcatggaatcagccacctaaaagacaccaagcactataaactggttacggcactcgcccctaccgagtttaaagctgtggaggatattcgtgccaagggaattaaagtaaaagttattcctagccgtcacactgtatatttcgagaatatatacggagagaatcaagacaaccgcacccagcgtgttttggccaaagccgaccctttcaccgtagagcaattgaaggatgtagaagcaaatatttttcatttgggaagcttgctctccgatgacttctctcttgatgtagttaaatacctgtcaggaaaaggcacactggctgtcgatgctcagggttaccttcgtgaggtaagaggtaaaaaagtgtatccggtggactggacagagaaaacagaggcactgaaatatattgatattctgaaagtgaacgaacatgaaatggaagtgctgaccggacataaggaagtgaagcaggctgcgtttcaacttgccgaatggggagtaaaagaagttttgattacccttggaagtcttggctcggttatttttgccgaaggacgtttctatcggattccggcttatccgcctaaaaatatagtggatgccaccggatgtggagatacttatgtcaccggatatctgtatatgaggaacaaaggagcttcttatgaagaagccggatgtttcgctgctgcaatgtctacgctgaaattagaagcatccggtcccttcaacggtacggaagaggatgtgtggaatgtaattcacaaaagataacagagtcctccttattgttctatggattcatgttctgcccgcaaggaataaaacaaaaccacacaaaacgctacgaaaggtacgataaatgacagagacatattactgttgtctgccacatatcccatcaaaaccggaccgatagctcctcctatcggagacatcatgagataagaagaagcgcgtttagtgtggtttcccaaccctttcagagatatagcaaaaatggtaggaaacataatagcctcaaatgcataaacaaaaaacaaagcaaccagtgatatatgccctaaattgcatattaccaacaatgtggcaaataccgttccgacagcacagcacaacagcacacgttcggcacggataaacctcattacccagctaccaacaaagcgtccgcacataaacagtcctaatcctccgaaagaaagcaaaaccgacgcatcacgagcattcatccatccgtcatccactacataatttataaagaaactgttgatcgaaatctctgctacctcatagcaaaacaaggcaaaaacaccgaatacaaaaagtttatgcgaccacaagccttgtttaccgcctgtctcagttacttcatccgcatgtacaatctccggaagctttattcgagaaaacaccaaagccacccccagcactacgatgcccatcaacatataaggaaatgaaatatgcgaagaaccttcttcggaaaacaacaacaagccaccgaccaatggtccgcaaatacatcctagtccgttaaacgattgcgccagattcaatcggctggcagccgtttccctgtctcccagttctgtcatataagggtttgccgctgtttcgagaaacactaatccgcacgctatcacaaacaaagagagtaagaaaaactcaaaggacatccaatattctccgggaacaaacatcaatgaaccgacaccatacaacaacagccccaaaacaactccgcgccgataaccatactttgtgataaaaagccctgccggaacagccattacaaaatatcccaaataaaacaagacctgtaccatggccgaataagtacgagtaatatccaatacctcttggaaatgtttattcagcacatcaagaatggcatgtgcaaatccccataaaaagaacaaagaggtaaccaaaacaaaaggaaccaaatagttccttttcaccaatgcatatctttgcttttccatatttcttatgataataatgcaggcaatcccgctaaatctgtaattatcacatcgggcaaggattcatcaatcacttctccaccccaaccttcacctttcagccagacaaccggacagcctacttgctttgccggaacaacatccttcgagaaagaatctccgacaaccagcactttacaggcttcatatcccattgcttccactcccaaacgataaatagccggatcgggtttacgcactcccactacggatgattcaataatatcatcaaagaaagcgtacagtccaaagtctttaagaatggtttggatatttccataaaaattggaaacaagcaccaatttatatttcccggaaagtgcttccaccacagggcgggttaccttcaacacatccaacacatattcataacaaccgtctgccacctgcttggcataagtttgcaacattctctcatccatcggcaactttccctgttcagccagatactctacctgcaatttagtctttatagagagaacatcatgaaaattatgttgcggccggacaaaaggatatttagccaaagctctttcagcaaacacatatgcttcccggaaactctccttgtctaccggtacatgatattctgcatatttactccacaaaacctctgcccaatggcggctgttggtatctatcgtgccgccataatcaaatataactcctttgatatctttcaacatattcacacttatttatttgcaggcgtaccattgccgactttcatcagcaacacgcctattacaatccaaatcaattctcgtacacgggtaatcaacccggtataaacgccaaatgcccccggaatagccagccctcctaccgccaaggcaaatcctccctcacgcgctcccaactgcatgggagaaaagaagaacagattggcaaacaaagaggtaaatgccataatcaggatacatgccggaaaactgacatctgttgtcagaatattcagaatgaaatatacctccaaacatcccaagacgcgcgccataaactctaagctcaatgaagcatagaaagtagacttacgctgttgatgcagctctgcaatctggctgtccacgcgttctaatgtttcccgtttgttttccgaaaaacgtttcgcccatccttttataaagggaatatgttgcaacaacttcaacgtgcgcactgccattccatttctatatcccttcataaaaaaataaatggcaagcaggcaaaagaaaccaactacagaaagcaccatccccattgcaaaatctaccggacgaagcgccagatacaaaaaaatagagaaaagccaaaaacaaaaatgtgagaaaatatgcatcatcacatacaggataaccgatgaagtagctttgcttgcacctacatatggagtcagttccataatgcgataaggctcgcctcccatcaatccgaccggagtggcataattcaaggcaaagccggaaacagtcagtttatatactttccaaaatggaataggtgttcccttctttccatcccggataatgatataccaagaaagggtattgaataaataaataataacccataaccctataacagccggcaaccagattccggccctgcgaagattagccaacagctcatcatactccatatcaaaagtacagagcatcacaacgatggcaacgattccgaatatcaggaatatgtttctatatttacttttcacagtgctgcgtatttatgataaaaacgggcgctgagagcctcatggcaatggcgcatatacacgaacaatgaagtcatcacaataatctcaaacacaaaataaagccaaggctcacctatcagcagactgacatacaatgcaatggcgcgcgtattgaaagtcagtatattagtgtatttcatcaacggcttactggcagcacggaattcatcgcgcaattcctgaggaacattatcaccatactttgcctttaccaacgcatagaattgctggaaattgggagtcattccctcctgctgacgagtatagtttccataaaaataaaggaatattttccaccagaagtttcccttccacggcaaactgtgaaatatttcacgctgctgcctgaagttgtccaactcacttccgctctttcctttcaagaaataaagatgaatattgcggtaataatccgccagcgtacattgcttactgtgacaaatcgtacccgaaaacacagccagaatccagataaacactccccaatgcattccgtcaccgatattgaaaggcatcggctgattcatcaacctaagacagatagccacataaatggtaaaaaaccaaatatcacctgcaaacccgtccaacatacgtccccactgggttttctgtcctgtgaggcgagccagctgcccgtcagcgctatcataatgattcgcccacatcaacaataaaataccgatgacagtatgtttcatatcgggataatagaacatcacaccggcacctacacctagaataatagataaaatagtcactacattgggatgcactttcagctttttaaagaataaagcccatgcatagccaataggtcggttaaaataaatatccaagaactcctctgtgtccattgatttgaaagaagcctctattcctttcttctcactctctttactcatgtctctattttttcatttgctttttcttcacccggttataaatgcactctgcaatctttacacctgcttcctctcggcaacgggcaaaactgggccaatcattaaaatcaattatcttaagttcaccgtcggcagataccacacaatcacctccgtaaatggggacattcaaaacctcggctgccatatcgctatatttcttaagttcttcttcattaaagggaattcctttggccacgccattgattttctccagaccgaatttgctgtgcgaacaaggagaaggataaaaccaataaaagaaatccgttccctgaacgccataaaatttaattaaatcaccctgaagatgctcatttatcacagctaccggtatgtgccggctacggaaatcggccaaaacacgttccacctcttctttgtcggtggcatagcatacatcttcttttaccatagcatgagaatcaccgcgttttatccagcaaggatagcaatcttcctcaaactgcctgtcagtagatattacgaaactcctcggatgaggaacaccatgttgtatcaaaagttccgtcattggtctgcgcacgcaattatcaattccgtaagccgaattgacaaccagcgcaccttcatcctccaacgatttcaggcgggctattgtcgccctgtcacgagccatatcgaatatcacatccgctttcactccgcaagccacaaattccttttccgcataaagctccactttgcatcccaatagtctcaactcatccgccactttattaaaaatggcggcatcattgtctacgtggttcggtgaatactcattgccacggcttatccctattattgaaaattcatccattcctttatgtcagtgctttaagtttattcttttccggccaaaaaagcctccgcttttacgatatcaccggcatggtctacatccaggattttcttaaaaggataagccttcaacttcagaccatctgcaaccagttgtctttggaaattacgcatacgcgacattcctttgtccatacatgcgtttaaagttctgatagcagtgggtgtcaggcaataaatgcctcccgaaatataacgacattccgatgtagccgcatcatgaaaccctgtgatattcaaagctccatcagtagatatataaagcggcttttcatcatcaatataatccgttactgccatatatccatcattatccgcccgcttaaacgcttcaataaatgcagcgaactcctcttcgcgaaagatagtatctacagtagtcaaacaaaacttgtcatcttgcaaataagaactcagttcataaaaactatgcatggaactgggagtagtcttcactaccacttccaaaggcacttccgtttcctgttgcaacttagcaaggtgctctttggtcaacgggctctcattattaataataaccactactttatcagctccattacggataaaaatccgtatcaggcggtcaatcatggcaactccgttgagctgcaccaaaggtttgggcaaagtaaccccttcttgtgaaagccgggacccttcacccgctgatataattgcgaacttcatttctcttaatcttcttcgtctatagtatccaacttcaacttatcactgtcatcgcgtctctcataatactgcttacgcaacggacgcgcatgaatcgctttctccacgatacggttgcggaatatatccattgctacataaatagcctgccggaacgaatcttccagagcaacaccctgaccggcaatatcataagctgttccatgcgccggagacgtgcgtacaatgggcaagcctgcagtatagttcaccccttcatccatagccaatgccttgaatggcgccaagccctgatcgtgatacatagccaaaataccgtcaaaatgagtataattacccgaccccataaatccgtcggcaggataaggaccgaaacattgcactcccttggcaaccatctctttgatggcaggaataatgatatcattttcctctgtaccgatcagtccgttgtctcctgcatgaggattcagtgaaaagactgcaatacgaggactgtcgattccgaaatcctctttcaaagaacgatggaagatggcaagtttctccataatcagttctttcgtaatatctttggctatatcacgaaccggcacatgacctgtcaccaatgccacacgaaaatcattcttcagtaaaatcatcaaagccttctgtccttcgcccacacgttcctcgatatattcggtgtgtccgggaaaatggaatgcttccgactgaatggtatttttattgataggagctgtaaccaatacgtctatcaagccatctttataatcctgcaaagctctttccaaagcatccaaagcagcctttcccgcctctgttgtaggttttgaaagctccactttcagttcatcttccgtacagttcagaatactcagtctatccggcatagcatcatcagccgagttgatgatgctaaaatttgcctgaatatccattgctttacgatgataagccgccaccttcggtgatccgtaaataataggtgtacaaagttccagcatagtagggtctgcgaaagtcttcagaatgacttcatatcccaccccgttgatatccccgtgagtaataccaactcttatcttgttattatcttccatttagttattattaatctgttctattttattctgcttttgcagttgaatccaccttttcttcagggatgtcggcattgaccaccacttcgtccagcagcgtttcattcggcaatctcaacgtataaagtgaagcctccatctggcgcatcaggttacgtttcattttatcgggagaatagataaacgcttcagcaacaatcacgcgtccgttggcacggtctacccgggcatgagaaacaaacgggccacccatcatgtcgccttccatttcccataatccgcgcgcttcctgagcatattcgccttttaccataatattcttgacatcgacaaacatggagtcggtagccatgtacataccttcacgttcacccggaatattggctttcatcaccgaatcacgtttatgtacaaagaactctttagtaaaggtattcctgtctgtataaggataagaatatattacgaaattcatatcggcagaggcacggttggtagaagcccacaagaaatctttaccgaccttataattcgataactcctgaggaatccagacatcacagtcaaacatactgcccactttggctgaaatggcatcattatgtttttctttcagcaagtttatctggcgattgatttcagatttcacaaagaaatcgataatcacctgcttgttcttttccacaaagtctgcaaactctttttcatcaggtgcctgaatagtcataatcatttgcggtgcagcataaacatcacgcgaaaattttattttaggctgtgtatagatatcctgaatatcaacaacaatgatattacggaaaatcctcatgacacggtcaaagtgttcgggagcgatatttgaaatacggaaagagcgttctgcctgaggtaatccgggaacattcgtatccagcacatcaaataatgcacgtcctgcggggcgatcccacactgccttatttaccaccaccaacacttcgtaaggtcttccgctggaagtcggagtaaacaagtttttctgtcctttcttacaagaagccagcaccagcactaccagtaccaaactcaaatagaatgctattcgtttcataattcttatggtattatatttaataatctatagtgtaacacctttttctttctgttgtttggctgtcgacaacattccgcacgccgcaaatatatcctcccctcttgatgcacgaatagtagcaaaaactccgtgttgtgtcaaataatcacgaaatgccaccattgtttccatgtccgttccttccaaattaacattcgggatggcatggaaacggattaaattgatgcggcagtcgatgccacgcagcaatttaacaatttctttggcatacaccaaagaatcattcacatctttaaacacaatatattcaaaagacaaccgcctttgcttactgaaatcataattacgcaatatatctacaatttcggtaatagagaaagctctttcggcaggcatcagttcttttctctgcgatgggaaaggagtatgcatactgatagccagatggcagtcactctcattcaaaaaacgttccaatccttttttcaatccaacggaagatacagttattcttttcggactccaatgatagccataatcagaggtcagtatttcgagcaccttcagcacttcatccaagttgtcaaaaggctctcccatccccataaacacaagattggtcagcgtatcgcgttccggtatagaatatatctggttcagaatctggttggcagtcaggttggccgtaaaaccttgctttcctgtcatgcagaacttacaattcatcttgcaccccacttgtgaagaaacgcacaaggtagcccggtcttcatccggtatatatacagcctctacaaaattcccggtcggcgtacgaaacagatacttcaccgtcccgtccaccgagcgcatagcttccaccggtgcagatgctccgatttcatagctgcctttcaacatctcacgatgcttcagtgacaggttagtcatttcatctatcgaaacgactttcttctcatacaaccaagatacaatctgctttgcagcaaatttaggcattcccagattctgcgttatgtgctgaatctcattcaatgtcttgccaagtaataccgtttttggagtttccattctatttaaaaagacaattagcgtacaaaggtagagaaaaaataatatatattgcctatctttgcgctgagaaatacatttaaagatgagaaaaacaattaattgttttattccatacgaagaaaacacagcaatagacaaagttgttacagcattgaaagacagcattgttgtaaacaaaatctatttattgacaaccgctcatggctcaatgccatccgttcctgcaggatgtgaaccattcaccattgactccttgaacagcagtgatacgataaagaagattgctcagaaagcagacacccccttcactttattatataccaaagcatctccgtttgaattaggctacatggctttggaacgcatagccgacttcctgcaagaccggaagaccggcatggtctatgccgaccattacgagtggaaagagggagaaaagaaaaagcatcccgccattgattaccaaccgggaagtgtacgcgatgacttcgacttcggggctctgctggcattcagaagcgaatacctgatcggggcagccggaatgatggagaacgagcgcgaagactatcggtatgccggactttatgccactcgcttgttcattgccgaaacaggccgaattgtccacatcaatgaatacctatacactgaaatagaagaagacaaccgcttgtcgggcgaaaagcagttcgattacgtcaacccacgcaaccgcgaagtacagattgaaatggaacaggccttcaccggatacctgaaaagaacaggtgtctatttgccgtctaatttcaaaaaggtaaacttccgaacagaaacatttacctatgaagcttccgtcatcatccccgtaagaaacagagtccgcaccatcgacgacgccatccgttccgccctcgaacagcaaacggactttcctttcaatatcatcatcgttgacaatcactccacagacggcacatccgaagtgattgcccgttataaagaccatccgcaagtcatacacctgcaacccgaacgcaccgatttgggcataggcggctgctggaacctcgcagtccatcatcccttatgcggccgcttcgccatacaactggacagcgacgacctctatagcagtccgcagacgttgcaaaccatcgtaaacactttctataaagaacaatgcgccatggtgataggcacgtaccgaatgacggatttccacctgaacaccattgctccgggcatcatagaccacaaagaatggacaccggacaacgggcacaacaatgccctgcgcatcaacgggctgggtgctccccgcgccttcttcactccccttttaagagaaatcggagtgcccaacgtcagctacggagaagactatgcattgggcctcgccttctcgcgcacctataagataggacggatttacgatgaactatacctttgccggcgttgggagggcaactcggatgccgcactcggcattgagcaagtcaacaccaacaaccattacaaagacagcctccgcacacacgaaatcaatctccgccggtgctataacgaacagcacaaccaaaacgacggtaataaaagcaaagcacaaaacaagcattttatagaaaaacaatttgccgaatggcagacggcaagcgacaaccttgccgctttaagaaaagcgcttgtcaagcaagaagtgatttgcggcatcccgtttactgtgcagcacaacccggcacgcatggtttccaccggagccaaaaccgacaaagaaagcattctctcccgtccctgttttctttgcagaaaaaatcaacccgaagaccagcgcgtctgtcccatcggagacggatacaatctgtgtgtcaatccttatccgatactcccctatcatatcaccatcccatctgccgaacaccgggaacagatcctgcctgctgatttttgcaacaccgtcagcactctcctcaatgaattgcccgacgaatacgccttattctataacggagcactttgcggagcctctgcccccgaccatctgcattttcagggagttccgacggagcacgttccactgattgctttctatcgccggacggacagcggaaaagaaaggctcgcatcaatcagccattcatccgtcctgcactacatcgacagttacgtctgccccctgttcagcatcgaacagtgccgtgacggaaaaacagacgagtccttgtttaccaatataatgaaagaattgccgtgcagcaataacgaaccggaaccgaaagtaaacatactggcatggcaagaagatgaaaaacaaatcatccttatcattccgcgctgtaagcaccgtcccgaatgttacagtgccgaagccggcaaacaaatgcttgtcagtccgggtacccttgatatggcaggcatcattgtcacaccgcgcaaagaagattttgaaaagatatcaaccgaagacatccgacaaattctgcaagaagtcggactgccacgcgaagatgcacaggaaataattaagaagtaccgaaaaagagacagactatgatgaaagagcccgaaataaatgtaggaatagtaaatgcacaagaaatccatttttcgttgaacggccgtttttttgccaaaggagaaaccgtatgtggcgaacaaagcgtctctttcagtgaaggaggcattttgtggaacggcaatctgtatcgtgagctgacattcaccccacaagacgaacgcacttccttctccctctatgatgtgaccatcggcatcaattttcattgggagcgtcaggaaacccaaagctttatgggaacgctgaaactggtggtggatgaaggcaaaataacagccatcaacatccttccggtagaagactatctgataagtgtcatctcttcggaaatgaacgccacctcttcactggagtttttgaaagcacatgcagtcgtttcgcgaagctggctttttgcccaaatggaaaagcgtaaggctctatgcaacaagaatgaaggattcttctcctttgtgaagaccgaaaacgaatacatccgctggtatgaccgcgaagaccacaccatcttcgacgtgtgtgccgacgaccactgccagcgttatcagggaatcaccaaagcatcgaacgcaacagtcgccgaagctgtccgcgccacacgcggccaactgctcatgtacggtcaaggcatttgcgatgcccgtttctccaaatgttgcggaggagtaaccgaagaattcggttactgttgggaagataaggactatccctatctgtccgccatacgagatgacggaaaagaagcctcgcaaccgctccccgacctgactcaggaagcggaagccgaacgctggatacgcacctctcccccggcgttctgcaacaccgacgacaagaaaatcatttcacagatactgaacaactacgaccgcgaaacgacaaacttctatcgttggaaagtgcgttacacacaagaggaactggcagagctcatccgactgaacaccaaaaccgattacggaagcatcctcgatttaattcctgtccggcgaggaaagtcgggacgtatctgcaaactaaaaatcgtaggcaccctgaagaccctcattatcggaaaggaactggaaattcgccgcaccctctcctcctcccatctgttcagttcggcttttgtcatcgacaaaggagaactgaaagacggtgtgccggaatggttcctgctgacaggcgccggctggggtcacggagtaggcttatgccaaatcggtgccgctgtcatgggtgagcaaggctatacatacgacaagattctgctacactactataaaggagcagacatccgccgtttctattaatccaatcttacaggtaatcatgaaaaagacatcaccgtgggcatggattcccaccctctactttgcgcaaggattgccatacgtggcagtgaccatcatctcgcttgtcatgtataaaagactgggcatcagcaataccgagctggccttttataccggctggctcaacctgccctgggtcatcaaaccactgtggagtccgttcatcgacctcatcaagaccaaacgccggtggattgtcaccatgcagatgctcatcggtgcaggactggcaggtattgcctttaccatccccacggaatatttctttcaactgacacttgccttgttctggctgctcgccttcagttctgccacacacgacattgccgccgacggattttacatgctggcgctcgattctcacgagcaagcactgtttgtaggtatccgcagcaccttctaccgtattgccaccattgccggacaagggctgctcatcatgctggcaggccggttggaaacggtgacaggcaacattccatacgcatggtccatcaccttctttatgcttgccggcatctttcttgccgtgtggctttaccatcgtttcatcctcccccatccggctgccgaccatccggcaaaggaagtatccgcttccgggttgatgaaagaattctttaccacctttaccaccttcttccaaaaaaagcacgccaccgttgccattgcattcatgctgctatatcggcttcccgaagcccaattagccaaaatgggaattccttttttactcgacccggttgaaaagggaggcttgggacttactaccgaagaagtaggattcgtgcaaggaacagtcggtatcataggacttacgttaggaggcattttgggaggcattgccgtagcccggggaggtcttaaacgctggctttggcccatggtatgggctatctcgttacctgattttgtttatgtatacctcagctatgcacaaccggattccttgttgtttgtcaacatttgcatcttcatagagcagttcggatacggtttcggattcacagcctacatgctctacctcatttactttgccgacggcgagcacaagacggcacactatgccatctgtaccgcttttatggcgcttggcatgatgattccgggaatggctgccggatggctgcaagagcacttgggatacaaccacttttttatttggattatgatatgttgcatcgccacattcggagtcacggctttgctgaagattcatcccgaatttggaaagaaaaccttaaaaagttaatgttaaattcaacaatacaagccattgcattgtttccttttcagacgataacatataaaacagaagatatatgaaaaaaattattttattggtatcagttgtattgtttggctgcgtaggatacgcacaagcacaaacatctgaaaaaaagctgagtcgtcaagaacgaaaggaagctaaaagagccatggagcaggcattgtttgaagaagccaaacaagccatagaaaacaaaagctttaccctggaagcggatcaggttatctttaaacggggcagaactgcatttgtctcttcaaacacaaattttgtgacagtcaatggtaataaaggctccgtacaggtagctttcaatatacctgtaagcggtcccaatggcttgggtggagtaactgtagacggcaatgtgtccggctacaaagtgaccacagacaaaaaaggcaacatccgtctggcaatgaatatcacaggtgtaggtatttctgcccaagtcaatatttcactggccaatggcggcaacaatgcaacagtggatattcttcccaattttcattccaacagacttaccttatcaggcactctgttgccattggataaatcaagcgtattcaaaggaaggtcttattgacagatttttcctaaattcagcttcaaccgagtttttcatttctactgtcactgctgccaccataggatgcttatcacatacaacatcctatcaataaacgacttatccaagtggtggcagtagcagttcttttaccgtttaaaagccctctaccaccactttttagtatcattccaccaatcttctaattatattcgaaagaaaaagaagattagttcgaaaagcccgtgagcatcatacgttattgcttaaccacgtccgtggttaagtctatccacccgggtggttaaagttagtcacgtaggtgattaaagttaaccacgggggtggttaaataatatccgacgtctaaatagacttgttttgttgattaggcactcactttcaattattattcatatctttgcgtacactataaccattaaccagtaaccatgattgtaatagcagacagtggttccaccaaaaccgattggtgcatcggcaacagccaaacggattaccggatagtccaaactcccggcatcaatccgttttatctttccaccaaagaaataagccggcaaataacagaaaaccttttcccgcagttgacggaaaaagacaccgtcaccgaactttatttctatggcgccggctgcacgcccgaaaaggtatgcatcgtagcagatgccctcaccgaatgtttcccacacgcccatgttgcggtggaaagtgacttgtcgggagccgcccgcgccttgtgcggacacacgaaaggcattgcctgtatattgggaacaggatcgaattcctgcgagtacgacggtgaaaaaattgtttccaatgtttctccactggggtacatattgggggacgaaggaagcggagccgtgctgggtaaacgcctggtgggtgactgcctcaaaaaacagcttccccccgacttgtgcgaactgctgctgaaagaatatgagttgacgcctgcccttatcttggacaaagtatatcggcagccgcttgccaaccgttttctggcaagcctcactcctttcttatccgcacaccggcaaagagcggagattcatgcgttgctgctttcctgtttcaccgatttcttcgaaaggaatgtgatgctgtacgaatatgccggttgcccggttcattttatcggttccatcgcatggcatttccgggcggaggtgaaagaagcagccgatgcattgggcattcaagtcggcaagataataaagagtccgatggaagggttgataaattatcatttcagaatatgagttttattaaaataaccgagcagccgtctttgcacgaagacctggaacagttgtccgtgcgaagcttattggaaggtatcaatgaggaagaccaaaaagtagccttggccgtgcgctcctgtattccccacatagaaagactggtaacaggcatcgtggaacggatgcagcaaggcggacgggtattttatatcggagccggaaccagcggacgcctgggggtattggatgcttcggagattccaccgactttcggtatgcccgatacttatataataggtataatagccggaggcgaaacggctctgcggcatccggtggaaaatgcggaagacgatacgttgaagggatgggaagaattgcaggctttccacatcagtgacaaagataccgtgataggcattgccgcttcgggaacaacgccttatgtcatcggcgcattgcaacaggcacggaaaagaggcatactgacagcaggaatcagcagcaatcctgattctcccctctcacacgcagtggatattcccatcgaaatgattgtgggcccggagtttgtgaccggcagttcgcgcatgaaaagcggcacagggcaaaaaatgattctcaacatgatcagcacttccgtgatgataaaactgggaagggtgaagggaaaccgaatggtcaatatgcaactaagcaaccaaaaactggtagaccggggaatgagaatgattatggaggaactgcagctagacgaaaaaaaggctaaacaattgttgcagaaatatggttcagtaaaaaaggtcttggacatttataataagaaataaattgtataactaaaaacaattaagacatgaaaagttggaaaccggaagccattatcttagcaataggtatgctgattatggggtattttatcaaaaacggactggatactttcgccggtaaagaccgggtagtaaccgtcaaaggattggctgaaatggaagtgcctgccaacaaggttacttggcctctgatgtacaaggaagtgggaaatgacttgcctgccttatataataagattaataatacgaatcagactatcgtcactttcctcaaacaaaaaggtatcacggagcaggaaatcagtatcaatgctcccgaacttatcgacttgcaggccgaccgttataatagtaatccgattcaattccgttataatattacaactgtcatcactgttacatccgacaaagtggaacttgtccgtaatctgataaaagaacagagtgaacttctgaagcagggcatcgccattaccggaggagattaccgctacaacgtgcagtatgactttacagggctcaatgccgtgaaacctcagatgatagaagaagcaacaaagaacgcccgcgccgccgccatcaagtttgccaaagactcggacagtgaactgggaaagataaaaagagcttatcaaggacaattcagcatcgaagaccgcgatgccaatactccttatatcaaacgaatacgcgtggtgactaccattgactattcactggaagattaaaatatcagatacccatcttatgaagcattttcaataattcatctttgttcagaggctttgataaataaccgttgaagcctctggacattacttttcttctgtcttcatcgtatgcaaaagccgttaccgccacaatggggatatcggaagacagttggcgaatggcatccgttgcctgataaccgtccaccacgggcatgcctatatccatcaaaataatatccggattgcattccaggtatttggaaacggcttcttcaccgtttgtggcacggatcaaatcatagtgtttttccagataaatcttatagagcagataattgtcgtccatgtcctcggctatcagaatggttcggcgaacagcccccgcatcgtattcggtttcattgaattcaacggtttccgaaacgtcttccgtccgttgctgcaaaggtaaaaaatcaaaaggtttcaccggcagggtaaaccagaaagtagaacctttgccgtattccgagaatacccctatctcaccgcccagtttcttgataatggtccggctgatagacaaccccaaacccgtgccctgctttttggcatccagtttcatgaaacgttcaaagactttatccaccttcccggccggaatgccggctcccgtgtcctgcacatagaagtagatatcatcctcccgcaccttatatcctaaagtgatactgccttctttggtatacttgaatgcattcgacagaaaattggaaagtacctgtgacacccggttcttttcggtatgaataaagcagaccggcagacaaggctcaaacacaatacgcaccggactgtcagcctcctccagacgcagccggaaaattccttccagttcacgcattatctgattaacatccgtatcggaataaataaactccaatgtccccgcctctatctttgacatatccagaatatcattaaccaactgcaacaacatattcgtattacctttgattatctcaacataagaattacgttcggattcggaagcattggacaacaatcccgcgaaaccaactatcgcattcagcggagtccgaatttcatggctcatattagccaggaaagctgtcttctgttcacctgccacttccgccacccgcctggccacctccagttcttcctgtaccttcttcaaacgcgtaatatctctcacggtcagcaacaccttttcatctctgttctgcaccatatatgcccccgaaacactcaccacacaatccacgtagttatcagtgtcatccgacaaataaagcctcatcggagcttctaaccgggaaaagctgtttttttcgcgaaaacacctttcgatggaagcacgcaccggacaggatttacaattctcgtgagtgccgcatgcaccggaatccaacgcatttttgcaccgaagcaattcccccaccctgtgaaggacacagtcatccttttcactgttcaaactataataattggttttctctaccagaaaattacgattggccaatacaatgtacgcatcgatattgcgtaagatggcatccgaaaaatctttgtttaaaccaagttcgttcttttgggcaagaacttccttattcagactttttgttttctttgtttcgagccaccactttatcataaaaaataaagcaacaaccgctaatagtatggatggtagcatttgctaaatagatttatattatcgcaaagatatgaacataattcaatatcggtttataattagacaattaaatattcaaatttaaagaaaaagcctcaaatctatttgtgattcagtaaattattgtatctttgcgcccgaaattagataatcaatataatgtctaacgtaattaactgagaattttaacaattttattaatggaaaatttaaaaaacatcgctcctgttgaagacttcaactgggaagcttatgaaaacggtgaagccgttacaggcatgagccacgaagctcttgaacaagcttatgacagtacactgaacaaagtaaatgaccgcgaggttgtggacggtactgttatcgcaatgaacaaacgcgaagtagttgtcaatatcggctacaaatcagacggtatcattcctttgagtgagttccgttacaatcctgaactgaaagtaggtgatactgtagaagtatacattgaaaatcaggaagacaaaaaaggacagttgatcctgtcacacaagaaagcacgtgcaactcgctcttgggatcgtgtgaacgctgctcttgaaaacgaagaaatcattaaaggctttatcaaatgccgcactaagggtggtatgattgttgacgtattcggtatcgaagcattcttgccgggttctcaaattgatgttaagcctatccgcgactacgatgtatttgtaggcaaaacaatggaattcaaagtggttaaaatcaaccaggaattcaaaaacgttgttgtttctcacaaagctcttatcgaagctgaacttgaacagcagaagaaagaaatcatcggtaaacttgaaaaaggacaagtac

SEQ ID NO: 6713 - DNA, 2001 bp, Unknown
  gut microbiota DNA sequence
caatatacgagggagtttatcgaatacttactattgtcgtaagtagagggattggaatgtggaagctgaatagcgggattcatttcatgtaatagtttgatcaactccaaatccagtgggccggccggaacttcagtggggaagtccaaatcttccaagatactggtggcggaagaatggtcttcgtaaatgtgcagatagtaatgttcaaaatctccttcacaatgacaattgtgacaggtaaatgcaggaataatatataagtggtggggagaaagtgttatggttcggtcgggaagagttacttctgccataccttttgttacataatagatacgaaaaaacgggctgtttacctctgtccagttccagtcggaatgatgaatcgcatagccgatattaagtagcagaggatgaaatgtgtctgtttcctgaagtatgtccatagggttatttaaacagttattttgtacaaaagtataaaaaaatatcgattttatattatttgtggcggatttattgctactgattgtcttttctttttaaaggatgtatcagagttggctggagtatgatgtggtgtgtttttaagacttttactgttagaagggcaaaaagggacagatatacggtaatatttttttgttttgaaaaaccgtaaatgctgtcccttgtttatgagaatgtgtgtgaagccgggaaatgctatgctttttgaggataatacaggtttttatcagtcattttttcgagtacttcatgcaggtagcgtgcagattcccatttggccataggcaggtcgtggagcagacagttaccgcagtctttaggggtggtacccggcacttcaccttcaaattcggcaacgaagcggaaggtttcttgcatcaattctacaatgtcttttgattccaagtcacctttcatcagtaaataattgccagtgagacaacccatcggtccccaatagacaattttgtcaccccatacaggatggttacgcaggaaggtggcggccaggtgttcgatggtgtgcaatgctccctgacccaaggccggttcgcggttgggctctttcattcggatgtcgaaagtagttacggtgtcgcctcctacttggtcttttcttgagacataaataccgcgcaaaagacggatgtggtcgatggtaaaactgggtattgttttcatatttctgtttttattataaatttgctggtaatgaatggaggaaaatgcgggttacctcgaatgaacggtcggcaatggtgctccagaagttggtgtattgttcccaatgattgtcggcacccggagtgtcgctgataatgcggaaactgaggaacggtaccttatatatatgacaaatttgggcgatagctcctgattccatgtcgacggctagtcctgcggggaaagctgtcttgatggagttgagctcttggcggtcggtgataaatttgtctccgctacagatgagtccgccgtggatggctgtttctgtgtctaatgacatggcgcagttgaacaatgtgtcgttgccttcgaacagggcaggcagtccttggatttgaccgtaggcatttccttctccacaccatacatcatggtagacgatttggctgccggcaactacatccattactttcaaaccactgtctatgcctcccgccacaccggtgctgataatgcaatcggggtgaaagttgcggattagctccaccgtgccggcggcggcatttacttttccgataccgcatttcatcaggatgaccgtgttgttttgaatcgttccttccgtatacaggaacggtccttcgacatattctttcttgttggcgagcagttgttccacttgtttctgctcggaactcatcgcagttataattcctattttcataattcaactttatttcaggtgcaaatgtacgtaatttatcagagtatatcgtatctttgcagcgtgaagttacgaaaagagtgtaatttattggaaatgag

SEQ ID NO: 6714 - DNA, 3881 bp, Unknown
  gut microbiota DNA sequence
cagtcctgttcggagttttgatggcttcatctacaggaacgttcgtgtcttgtaaagactatgatgatgacatcaaggatttacaagaagaactgaataaaaaggcttcacttgaggaaatgactcaaaaactttccacaatggaaactgctgtggctgatgcaaaaaaaatagcagaggaagcaaaagctaaagcagaagaagctttgaaaaaagccgaagaaggaggcagtggtagcggtgaggttacttcgacagaccttgagaacttgaagaaagaacttcaagcacaaattagcaagcttgcttctttagaaagtgtagacaaaaaaatcgcagctttgaaagaagagttaacaggtgacttcattacttcagaaagcttgcaggctttaaacgagaaggtagataaattgagtgccgaagtcatgcagattataggtcatcgtttgactagccttgctttaattccaacagaacatatcaatggtattgccgctattactttgactactctacagtatactcctcagagatataaggcaatggaggaacatgaatcgaaccctggtaatcataccaatcgtcctgttttagaccatgaacctgttggtgaagcacgctatatttctacagaaaagaatgaagcttatttccatgtaagtccaagcatgggagtgcgtaccgaagatattgagctgccatcatttgattgtatcacatcaaaaaacacacaaagatctgctgatgtaacatcaaacagcccgattgtaccgacaagcaaggaaattaaggatggagtattgactgttacattcaaaaaaagtgaagatttcctaggcaaacagattactacagacaaggtaggcgacacagaaacattctatatggcatctttgaaagttcctgttactgaagctaattacacagaaacagagaaagctgacaaagaagcaggaaaaattgagggagtatatgtaaattctgaatattctcgtatagaggaaattgtggctatcccttatttggctaactctaagactgattttgcaaaaccgattgagggcgaatttgcagatgagattcaaaaagatgcagacaacaaagatatttatgttcattatcatgattctatttgtctgtatggctcaaccaataatcagttggtggatgttgagcaggcatataatgaaccgcttgacttaaataaattggttaccgtttgtactactactgaagctaacaaacatgcagaacacagagaactggaaaattatgcagattatggattagaattccgttttgctcttgctcaggctgaatatctacagggtgaccgcaagactgacgaacaggcatttgctaaaatattaaaaggcaatatgctgaaatcggaagtttatgatgtggatttggcagataacgagttctcaagagcttctatcggtcgtgaacccattgtacgtgtatcattaatcgatacaaagaatggtaatgcactgattgcacaacgttacattaaagtgcgttggattgacaaagctgaagaacagatattaaaaccgttcaatttcactgaagacattatcagttgcaaggatatgttccagcaattgttctctcaggatatgaatgaagctatctaccatcaagttcaattcaatggtggacaaagtatgagtaagactgagttccacaatgtattcaagactttaaaagtgaagagtctgatgaaagatggtcaagcaatggatttaagtaaattcactgtttctacagatgctgctgccgattggaatgaaggtagcaaacaacaagaaaaggatggagcagaagcattgaagaatgacgtagatttgttgttcggtttcttggaagacgcacaagacaatacttcatacaatctggtatgggctatgaaccctgcaactgtaggtgcccttaaggataatggaaatggtaactactcttctacatttgatatcgaaattgaatatgtagatgctgtaggtactgtaggtaatatcactcagcactttactcaggaaatagttgctccgaaacaagaatttgcttaccaaggaacatactggaaaaatggtacaggtgaaggtatattcaacgtaaatccgcttgtattcacaactaataacaatggttggaataatggagcaggagttacacctgatcatgaacatgagtataatggaactgattgtgaattgaaagcttatagccatatttccgcagaccttgttaacggatatatctaccaatctacaagtgctaaacctgaaaatttggctcagtttattaagaatatccgttcttgtgccgatgtaagatttgtatttgatgaggctcgtttcaataactatgattatttggcaggatatcatgtaagccaagatggtatttcattatggaagggtactgcacctgctacatggaataacttcgaatacgtccaggaaaataaggaaactttagctgcaactatcgaaaacaagatgggtgctggagagttgtcaaatactcaatacttgccatgggacttcaatgaaacactgggttctggaacggatgaatgcgaaagccacgttcgtttacacgaattagacaaactgaatggtacacctgcagctcaggcattggttggtaaatctgttcctgtaaacttggttgttgaatacaatgagtttaatataattcctgttcagaaatttgaagtattcttcattgatcctttgactattgacggtagcattaacggtaactttgttgatgcagaaatcgatggtagcttcttgaatgtagcaaacggattcaactttacagactggaatggaaataaagttgcagctcaagaccttacggaagttaaggacggtgaatatgcacatgaattgtatgatttctacggtgttcacaatgttaagttcttaacagataaagtaactaccagcttgtcatatgatccagcaactaacacttacaaacatactgaaggtgtgaaagacggtaagttaccaaccaaggcatcactgaaacagatggaagctactgaaaatggtggtgtggttgataaagcaaatgctcaagaggtagtttcagatcctacccacttggcatacttcaacaatgaaggtactccggttaatgttgattataagatgtatatctctgttgaagttgctcataaatggggtgtcttgaagaaagaagctctcgaagtgaatgttcacaaggcagacggtactcccaataactaatatttaggactataatatgaaaaggacgctttttaaaaggagcgtccttttttttacgaaatcaaaataaaaataaacatgaagttatttacttatacgctgattcttctttacttttatatattttcctcatgcaaaggagatagcagtaattctgctccctttgatggtgtgtttgttacggaatcagggataaaatttgagttaaaagaagattcaaccacacttatcctatttgacgataccttaaattatgaaggtgtatggtctatacatcatactaatgagtcagagtatgccaatatagaatttgccggcaaaccggactattattatttaaaagataagaaaatctatcgtagcaagagagagatggaaagtaactggatgggaacaaaaatacaatatctcaattgatatttataacattgatgctattaagaaactttattttatatcataaatatagaagggcggtcttcaattgagaaaactacccttcttttcaccaaaatattataaaagcggctctcttattccgcaatcataatcactacacggttccagtcatttgttgtgaaaggctgcacctcggaacccttgctgtcc

SEQ ID NO: 6715 - DNA, 9102 bp, Unknown
  gut microbiota DNA sequence
atacccatagcccccatcctatagctcttcttttttcattgactaacctcccaacgattattatcatccaaacaaattactgagtcaaacggaatactagcctcagtattagaaacctggacgttgggcaaactctgcattgattttacaccaacatcagaagcttcttccgggaagcagaaaacgaacaaactccctatagacacaaataatgaataaacagagaaaaaatgcatacctataagtttttaattagttagtaaattgtattcatgttaatatcacaaatgtaaatcgctcttcccaaactctttgttattgaattgttatcgtcatgttaattgtgtatctatagaatttgagactttgatgttgctaattcaaaacaatttctaagtccgctaaagagtggcatgaataaaatgccaatatccgttctttcagtaaataggtatatttagcttgtgattgttgggacaacgcatctgccaatttcatttttatctcattatactcatatacagccgactttccagccatatacttctctaacgcataccgatgcgcctcccgattggcaactaccgctttggtagtagactcgtatttctcaaaagctgccagcgcatccatatatgctttctcaatatccttatagaggcttttcttttcattttccaatgacaagcgggcattattctcttccaaacgcgctgtttttacctgattcctggtagagaagcggtcaaaaagagggatgcttaatgtgaaataaatgcttttctgcatattgtttttaaactgctgatgaaaagatggattcattgcaccacgagaataatagtaaccggtattgattccggcacccaaagaaagctgcgggtaatatcctgacttgacaacttttatacttttcactttactctgcaaagaataatgagcttgctttatttgaggcatacagcttaatgccgaggcataaatcccctcaggagtgacagactccatagaaactatactttcatccaaagaatctacatcaaaatactcctcacccttcaactccatcaattgcatcaagtcaagaaaagaaagccgcagcgagttcctggcttctgttgccaccagttcatcatcagctaattgagcttttatatcatataattgagactgcggaacttttccattctctatcagaatccgtgttctgatttcttgttcttttgtcaaccggatttgttcttgagcgatacgataaatttctttattcaacagtatctgaaaataatagttggttacattgagtgacaagttgttttctatcaattccttatttgcctcggccgccaatacatcgaatttatttcgagaaatggatgcacttgttttgaatccggtaaaaagaggcatttcggtactggcagagaatgaagaattttgtatgtttctatcctcataggtattatcctgattcaaagccctgccaaaagaaaaacgttgtgaagctcctacattcagattgggcagaaaactgctcttcagtgtatttctctctacttttaaacttttaatccggttttgactctgtttcacctctatattgtgcagtatggcataatctatacattctttgagactccacttcttattttgtgcttgcatatttgctatcaatgcgatggctgcaacagttacaactattaactttttcatactattcattctttaacctatttcatcaaacagttccttccacaaacgatgatacattccatccgaattgaacaattcttcatgagtacctgcctcaactacttgtcccttatcaatcaccacaatcttatctgcattcttcactgtactcaaccgatgagcaatcacgataatcgttttccccttccgtgccaatgcatcaagtgtctgctttacatagcgttcggaaatagaatcaagcgaagatgtcgcctcatcaaaaataagtatttccggctctttatataaggcacgcgctatagcaagccgctgccgctcgccacccgacaaggatgcaccatgttcaccgatataagtccggtactccttaggcaaaccatctataaaatcctttaaacctaattgttccgtcaaatctacaattttcttcatgtccggatgcaaatcgcctaccgctatattctctgcaatgctgccggcaaataattcaatctgttgaggtactgttcccacccggcgacgaagactgcggttgtctatttgcgcaatatcataatcgcctatgcgaatgcggccctcctgtataggataaatatgctgtaataacgaaatcaaagtcgtcttgcccgacccgctttctcccactatggcagtagtcttccccttttctatcttcaagctcaattccttgaacacatccttgcgcgaaccatagcgaaacgaaacattctcaaacataatatcgcccaccatatccggttctaatattatcttttggttattatcctgttcacgttccaagtccataatctggaataagcggtcggcagcaatcagtgcatcctggatagtctgattggaagaaatcagcgagccgataggagaaattacataaccaaccaaagaataaaacaccatcagagcgccgggtgtcaactcctgatcaaccaccaaaagacttcctaaccaaagaacggcaatcgtaatgcctgtagatacaaactgaatgccgccttgcgccataatggaaccatatatactgcgatatgtattctttaataaatgtacgaaacgagtttccgtcttcaaattagcatattcttctataccgaatcgtttgatagtagaaatagaattaagagattccaccaattgcgcttccaaatcagcactactttccataataccgcgctgatatttccggttcaatttgttaaacccccagaaaataagcaggaataagggagcagacactaaagtaatcaatgccaactcccaggaataaacaaacataaggcatacagagaaaacaagaatcatgatgttaaccaccaaatccaacgaaacattattgataaaattacggattttcactgcatcattgacgcgcgaaataatttcacctacgcgcatcgtatcaaagaattgttgaggtaaagtcaacagatgcttataatatcccaaaataagtgcagcatcaatccgttgccctgtttttaaagccagaatacttttcattgctccgataaaagtccgcaataacaggatgaccagcatgataactcccatgagattaagcaaattgatatttttatctaccaatacataatctgtaattttacctacatagatggaggtagataaacccaagatactataaataagcgcaccaaacacggcttgcagcatcacgcttttatgaggagccagcagagaaaagaacttctttgtcataccggttttcatgtttccggtcttgaaagtttcttccggttccaataacaccagtacaccggtccacattttctcaaattcctgattggtcacgcgatgcatccgcccgtcacccggatccatatattctatgtattctttctttttctccaccttatatatcactacaaaatgctgaagttgttcgtgtactataacatgagcaataacaggtttaggaacaatatacaatgcctcgaatttagctcgcactcctttagctgacaagcccaacttattagcagcctctatcaaccccaaaatatttgttcccttctggtcggtaaacgcatattggcggatacgtgcaatgggaaactgcaaaccataataggcacatatggaagccagacaagccgctccgcaatccgtaatatcaaactgtttgattttaactccttttttcatcttgcattcgtgtttaaaatttagccatcattcttttattctcatattgtttgggattcgcccagtcgtctatcttctgatacaataaatcaaacaatgagcgccgggttatcataaaatgagcactgacggtcataccttttttcaagactcctttttgtccgcttttcagcatcagatagttacgttccatccggcatttcactttatagaatgagtttccctgactgtccgtcagaaagtccgatgaaatttctgttacttttccgggtaatgttccccattcattataattaaatgattccacctgtacattgaccggcatcccgatattcataaaacctatgttcctgggcgtgacatatatctccatacacaaggtagaatccggactgaccactgccaatgactgccctgcctgtatgctgcttcctctgtatatgcccgaaaactggtcaatggttccgctcaccggactacggactatatagagttctttatctttcaactcctgctgcaaggtggtattcatttcactacgggaattacgataggtattcatatctgcctgccatgtactcaactggctttgtatcaatgaagccaattcattttgctggctctgatactggaaataatatttatcatattcttcttctgaaatcaccttcttatcaaacaggtttttattgcgcatatattctttttccgcctgcgccaaagaggtttccagttcttttttctttttgataaaataggtatattcctgctgacgaaccggagaatggaacaccacagggcattcaccttttgccagataagctaaatctgtcaaatgtgcttgataatcattcagacgattagtctgataattgattttataatcggaattattagttcggaaacggagaaggacatctcctttgtttacccgatcgccttcgcgtacataaacagaatctaccaattctgttatagccgattttatttcggttttttcagtcaccggcctcactaccccacttccctgcacggaaatgtctacatagataaaaggcaatgcaataatagcggcagcaacggcagccaataccacccaatagataatctgggattttgtggtgtgttgatagatgtatgtttcaatactgttctctatccattcgtttggtaataacataacatttctacttttactgatttataccgcaaaagtaaaaggaaagaaaaaggaaatgtgttatcggattgttatcattaggttaattatttatccataaaacatgatacataattcttataattctctattctgctttcactgtacatttatattctatcgccatccattcccaactgctttatcaaactaaaattattcagaaagataatgctacttcctattataaggaattacgggaaattttatttagatatttttttaagtaaagaagctaggacagaagagccaacaagagcaaaagcacccccactgaaagatacaattaaatcttgtacactataatacctccaaatgacaaaaagtaataacatgcacataattatataaataattctgtagataaaagttttgtcgctatatggaaaaactattatagaagggaaaaaaaataggatataaaatgaactgtcaatatcagtccaaaaccttaatataaacattattataataaatattaaagacacacatattccaatataatttttacttttcatattttatgtatttcaattattacatatttcaaatttttaatagtccgttaaaaattcaacatattggctaagcggcttctgccactatgccaaagagttctttgataagtttagcattaaatgttctgttcggcttcataccggacttgctaaaaattcttttgagcatataagtgttactcagataggcttttagcagtccgatggagagcgacggatagtaccgttggcgcatgacctttgcgatgtttaccgaagccggtgacgcattgaaagcgaagtcaagtttcttcaagtctcttgcctggcaatcattgagtccagtaaactgtttggaatcccggaagcagaactcgatttggaatcgtgtacgatagtattcgatgatgtctttgtccgacatttcaagatcggtggagaaatagattttgtgttctcctgattctgcgtaatgaaccacgactttgatgtttcgtttcattgcctttgaataggccttgacagagtaggctcttcctccttcgatgtcgaggacctcgcaacgctgaaggtcgagtttcttaaaatcaatcttctcgcctttgatgcgtggtcgtccccgtttgcctgtgcggacaccgtcatgtgaataccacaaggcggcatcatcacgcagacggctgatgacatggaatcccggcagacaggctttacccacgaactttgcctttgagaaccaggcatctgcaacgatataacgtgttatgtcaagcaacttgtccctgtatttgcggagtacgtcaagataccagtcaacaaggttgtactcttcgccttgcttttccagatacgccttgtccggtgtctgctccgcacatagcatcatacagtcccgactgtcaatgtcgacaatgccgataccgagaatctccagtccccgtttcattgcagaagcgcatcccgaccagaacttgccgatataaggagtcttctttcccgactttgaaatgtagcttgcgtcgatggcaatggcttttcttgtactttcaccaaaacgctgccgcatgaggaagaggttgaactgcatccggtcaaactcacgttcaaacaactggcggaagcgttgctctgagctgtctgagtaacgccccatttgggtgaaattaatctttcttggcagtaccatatacaaaatcatgagttggatgaatgctgttttaaaacttttgcgtaacttcgcagaacaacttttcaaagcatcggttacgatttcctcatattggtcaaatgctgttttgttcattactttaatgtgtggtggtttaccattaaagatgctgaaaatcagttacttgacctattttatcttgctaaattatttaaattaacttgtttattttcaacggattagttacaaatttaacgaagtattaatctttcaaattcatatcttttacaaatatcaccacaacaagtcagtttctgagaagtaggtatacctatcttctaattaacaactatatcgaataaccattttattgattgcataagataataaagcacctataaaagttgcaattatatctttataatcaaaagtcaatcctataacttcatagcatatcagccccaaacaaactgccatactataatatatttccttatataccaatttctgtgtcaatgccatgcccaaacaagtcgctataggaactccccaaatattagtaaaggtatctgcaaaataaaaatcatatataccattttcataaatatagggtctataagcaaaattgataacagaaataacaaggagtaaagaaacacagactataaaaaatactaatcttgttcttttagacaaatacataacattgtctcttttgaaaataatcaggcgtcccataatatcttaattgaatgcgccatactaatatggcacattcaattttaaagttaaacaaattatttataaggcattacagaaggagcaaaattatttgcctcaaatccattatactcacattggaataaaaagccaagtagttcccaaacattttttaaaccacctgcgatatttatttcttcatattttgataaactaatataatacttttccatttttttagatgattatttattccacatagcattagctgcatctcgaccggcattaaatgattctatggtttcgccagtatgaaatgttaaatcataaagcattccacctaagaatgtaccaacaacccaatcccaaaagcctccagaaatgtgtttctgtgcttgcaaatctaactctttaattaaattatccataatattaaatataattattgttttctattttataaaatttatcgattcaatcattctgcatctagatagaagctaccagcaaataagatctgctaatggcccatatattttacgaagttcttccatctgttcctccgtaggagacacataacctcccgatacctgtacatgttcctcaccactgagtggcttcatcatgtaataatcattctttttcatacttcattttgtgttttgttgttatatactaaaaaaataattctctaaaacggctgggtactacaaatacactagtcagactattactgctactgtaaatatagcatccaccataaatattcatacattctgctaacgtcagcgtttccattttattaaatttttatcgtgttttgtgtttgtgttattatttcccttatttatagactcgggcagtcccttattcttcgtctgaacaagcggtgagcaaaaagatgaggcatgccattcatccgtttcccttcctgatcttgttcgtttatactcgtttatttcatatctctctgcttgttttgatgcaacaaagataagctgtcttttcttactcctttgttattgaattgttattttcacatgaactacttttacacgctaaaatcaagcgaagaatttctgaaaagtaggcatacctatctcttattcactcgtttgaacaacagaaaaattaaataagttaataatccactgatatatgttgctatcaaatcataaaaatcaaaagttccaaatggaattatttcatataaagtaaaaacaaaaatactataaagaatagctttagataaactctcatattttctcatagccaataataacaaagagagagaaggcactgctaccaaatttcctattgtatcagccaaatgaaaatcaaaaatatgattctcataaatatacggtctgtaagtattggataatacaatacctaagataaagaaaaatccagaacccatataatacagctttttcctcataatgcaatctttaaagagatgagtgcatctttataaaacacactcatctttttgttatcaattaaaatactctaccacaaacatcggcaccattttcttgtgttagtccatgacataatttgccaaacatctaatgcaacaaagataagctgtctttttttac

SEQ ID NO: 6716 - DNA, 61216 bp, Unknown
  gut microbiota DNA sequence
aacttgaggttttggatttttatccttccttggttcccaattatagattcttttcatgtctcctccataaatagaagtttgttctttactgcttaatgttactattgttttttccataatattatatctttaaattatatgtatgagttttagtttgatgttgcaaacataataggaaattgtataataatatgttatcaaaatgttatccgattttaagaataagttattatatttgctacatgataaagactaagtacttgaaaataatcactgccataagcttaacctccatattagcattacaattaatgtggttatgcaatacttatatacttatcagaaacaatatatctgaagaaataaatcaaattctatatacaggaatggaagacgaggctattactcgtcttaataagacccctaaaggaacaaatataaaaggagaagcagcaaccgacagcatccccgaaatcacttatttagaagaaggactctataacttaggttattatatctctatagaaaacgtggactccatcgcttccactctcctcttagagcataaaataagcagcgatttcatattgaatcttatcaatccgaagaccggagaagtgcttcaacaaagcaaaaaaggaaacttttgtctatggaatgccattcactctaaggaaattcctatccgcacagacctatcacaaactgtacaaatgatattggtgaatccgcattggagcatatttgcacgcatgggaatcttgttgctgtctacagcggttatggtagtattcgctttcatcggattgttttaccaaataaaaatcatcatcacagaaaggaaaatagcccggctgaaagaagatttctcctacgccatgattcatgacatgaaaacgcccatcagctctgccatcatgtgcaccagcaggctgcatagcggaaagctggatgataagccggaaataaagaaccattattttactattgtggaaaatgaactggaacatttgttggctctttccaacaaagtgctgacgctggcgaaactggaacagcacaaactggagatgaacaaaaaagaagttccattatctcccatgatagaagacttaattgaaaagttcaccataaaaactgaaaaaacaatccatttcactacagacttaaaaacagaaaaagtatatgccgacgaagagtttctgaaggaagcaatcagtaatctgatagacaatgccataaaatattccaaggaatcggtaaagataaacatcagttcttcaagtgatgccaaccatgatattatcaacatatacgacaatggtattggaattccgcaaaaagaccaaaagaagattttcgagaagtttgagcgtgcatcggccattaaacaaacccgaaaaggaggcccttcaggattcggactagggttgaactatgtttatcaggtaatggaagcccacgagggaagagtatatattaacagtatagaaggggaattcagtgaattcagcctgttaatacctaaaataatagaaagctatgattaaactattattagtggaggatgattccactttcagctacatcgtaaagaatgaattgcaggaaattatcggtggctatgaagtgataaccgctaccaatggtgcagaaggactgaaagcttggaaagaatatcatcctgatattattatttcggatatcgatatgcctgtgatgaacggttatcaaatggtggaacgtatccgcgaaatggatggggatattcctatcttgttcacctctgcattgacatctcccaaagacgtgaaagaaggatataaactgggggttaataactatgtgaaaaagccctttgtgcccgatgaattggacgcacatatacacgccatcctgaaaatgaaggcaggagtcaaattacgcaatgaaaatgaacactatgcattgggacgcttcaccttggatgccaaacatgccacactgcataacaatgaaaacggagagaacaaaaccctgacggtgcgcgaagcccaaatacttcagctcctgtgcgaaaacataaatgaaatagtggaaaggaaggctatcctaagtcgcttttggaatacggaggacgattattttgcctcacgcagtttggatgtctttatcacgaacctgcggaaatcactgaaagatgaacctctcatcgaattgaagaatatccggggagtaggctttgtattattgctaagctgaaaaacactcccatgccgcatttagtgatgttagagcatactgtcacttctaccttcataaaaactaaattgtttcttactgtcagctaaggacttttaaacgtaagattattacagtcacagtccattatggaaaactatacggtccactgcgggaaactgtagtaattctgcttatagaaaggcttaaccaacgttcattggggattaatatcactgtatcgaaggaagtatattcttggccgattgaaccaattcggaaggataaccacacaattccaatatcctgatggcatttccctcctgcgccactcctttcttcagtttataatcaaattgaagtttgtcatcggctattgtttcactaaagtgatataagtcatactgactatgaagcaatgcggtcagttccaaatcatgtgttgatgcaaggaccaaattatccgtctttgccaaatccgaaaatacggcagaattaatcgctattctctccactgtattcgttcctttgaacagttcatcgaaaaccaatagataatttcccttttttcctttatcaagagccgctttcacattctcgacttctttaaagaagtaacttttcccttccaacagattatcttctgtgtgaatcacagaataaagatgtctgtttatatctatccgaaagtcttttgcaaaacaagtattcaatgtctttgctgtcagcaagttaatggcaacagtgcggataaaactggtttttcccgacatattggagccggttataagcatggacttatccgataacgacacactgttagaaacacatccccttatcaatggatgatatatactatcggcatacaagcgttcgcccgatttattatcggaaggcttgcaataataaggaatctgttcacgcaaaaacgatatggaacacagcaaatccaaaaaacctacataacaaaacacttgttctatttcttctttttccttttgaataaaccgaaaagaggttacaatattgatagtggaatataacgtaaaaatattaataagctcagtcagcagataaacaatcatggccgagtcgctttctaacgctatacctaaacggaatgagcccagtttgcggacaagctctttcaaatttcggatagtgttctctattttaacatttacagacaggaatgagggaacagcacttaagtaatcggctgttttcaacaacttatataactggggtacagagaaataataacatgaaagaatgtttttctgtttaaaatgtaagtatccattaaatatataagatactaataaaaataaaagaggaacaggtgaagaaggaatttgaaacatcaagattagagatacagcaggtaaccacctgcatatttggagcaacaataaataaccgcgcgaataggtatgttctttttcggccaaaatatccactatggagtaagcatccggtttattcaacttctgaagagcatttaccagtttattccgaagcagataatctgtttgcagttgctctatgaattgttcatgcgcggtaacatcggaaatcttatcggtacataaaatatgataaagatattgtcttcctacacaagaagaggtgtaatctagctgctcgcacaaatcatctaagttcaaatcttcacaaacagtctctgataacgcttcctttgcatcaccaaaactcaaatatgaatggtatgcttttattcctttctccatatcctgacaattttccttatttacttatacccacaaagataaaatacttttccgtaactctgtgttatcggattgttcattcatattcctgtttcagtttcagtttcaatacgaaaccgaaacaggaatatttgcttcttttaccaactctgcaattctgtccaactcttcgtgagcagcttttttcaaatcatggtcaggagtttcacggtctattgtataaatcatcacttggcggggagctatttcttttactgcctccaaccagggaagaacatattcatctgtcgtattgtccacactttttccttggctttcccccttcataaacatagtttgaataatcagattacccttgaaagctttcatctcttctataatctcgtttacatcataatgtccggtaggacggtctactttattgatataatcaacattcaccgtatccagcttcaagatattattgtctatcttgtttaatgccttaaaaacctccgctttatgaatgaaagtagaattactcaacacgctcacctttgcttgcggaaagtatttatcacgaagcgctaacgtatcatctataattccggcaaactcaggatgggcagtaggttcaccattgccggcaaaagtcaggacatccggttttggaccgttttgctgcatatcgagcagacgggcttccaaagcttcacgaacctgctcacgggcaggtaatttcttcttcggacgatggtctttattaaaaccacactcacaataaatacaatcgaaagaacaaaacttgccgtcttcgggaagaagattgattcccaaagaaactcccaaacgacggctatgcaccggaccgaatataggagaaggataaatgactgttgacatagttatttttctgttgataacagtgcaaaaatacataatgtttttagaatttcatcctcaactgcaaataaagatcaccctttgtacttccatcaatggcctccaacgccgaaccgataacatcccgatttaaataatgcgtcatcccgtatttagcttgaaccatgatatgcttattcaattcataacgtacatttattgccagtcgcataccttcataataaaatgaaggcatggaaaaagcataaagcacattcttttcataaatggttaaccgcgaatcataatcatccgtattaaaccaaacacaacttatatcacattggaaaggcaaatcattgaacttataaccggcactctgcgacaataagaagccggtggaagctgaccggtttcgatagtttacccgaacataatctgctattgttttcaacaacagtttatccttcagtgaataattcaactgataacgacatttctgttgtatataaggaatcgtttgcttgattttatcctctgccgtgaaatcctttttcttgtttttatagcgataccttatgaacatttccagttgataagtaggtgaataacttagctgaatcaagccgtcaaaacctttggttcccggttcgctaaccaaatacttcttccatggaaaataaaaaaagtctccataacaagtcatccctatatatcgtaataacttagtttccaatccaatataaaatccactttcattctgtacactacttccttctcctatagaacgaccataaatactttgatactttgcatcataatatctgttcataactatcaattgtgttcctcccttcggtgaataactcaacatattcatagtggcaacagcaccacttttatcaatagcagtctcacccaaaaaggaaaagtgcttccaaaaaaatttgtaatctcctcctacattataaaagtctttgcctcgaggatagaatttattataaggttttaagtcaggattcaacggcttgttgaaaacattataaaccgctgttaatcctaactcacaatacttcccattataatttaaattactaccaatcacctgattagtaatcatattcttcttttcaaattccctgtataaacgatgatatccgtcctttttcaacgaagttataaaccggttattcacaataccgtccatcttccggtaagaataaaaagcatctgtcgtccaccttttcgacaacttataactggctgccgctccctgaaaataattatattcgtctgtcgaagaatgtttgcgaattccccgattcttatttcccaatgtagaaagcgtagctgttttacccattccgaaatcagtgttaataactagtccataaccatagcttaaacgataattaccgatagccaatgctttgattctgcccatattacgaataaacaagtacggtgaataaaaatcatatccttttctgttctgtccggcaaagaaaggttcgccggcatctttttctgccgtaagtcccaaatatatcttatcccgataatgaaaactatatctcagactgtgataatacccataccccaagtattgtttattaggattcttcttcaattcttccttggtgtgaagcttataccctgatttagtataaaaaggcatatccacacgtgttgataactcttgttttccatatttcaacacttgtttcaaagtaggcttatattcctctttttcagtatgtttaaagcaaataaatggttgtaaacaacgaatagtctgcctgttaatatcttcaatcatccacaattcattctcactaagcatcggtccatacttataaagataatacaagatattttcaatcagcttgtcagacaaaaaaggaaatctctccaactgctcttttgttgccgtattgatattgataggattttctcttaactccgataactcttcaaaattattctcccactgaaaaacttctcctccttcttcatcaattaattgctctgccaattcctcccaagcttcttgtgctgataagttattcacagaaaagcctattgtaatacaagtaattaacattgatttcaacaatctgttcattttgtaatttattggtgtgttttaagttaaatagttttattcaaagcaagagtaaccacatttcttactacttttgcatagaaatgaaaaggaaactctatatagctttatttctttcctttatagtcattgctgcctattctcagcaatcgacaacgactataaacggatacatggtgcctgtatgtgtatacaaaggggataccattccttcactacggctacctaatgtatacgtattcaagccattaaaatttaaaaatgaaaaagaaagacgggaatattaccgcctggtaaggaatgtaaagaagactttgcctttggctcgtgccatcaaccgtgccattatcgaaacctacgaatatctggaaacactccctgataaaaaagccagagagaaacatctgaaactcgttgaaaaaggactgaaagagcaatatactcctgtcatgaagaaattaacttttgcacagggcaaactgttgataaagttggtaaaccgcgaaaccgattcttcctcatacgaattggtaaaagcttttatgggtccctttaaagcagggttttatcagacttttgccgcattgttcggcgcaagcctgaaaaaagaatatcatcccgaagcggaggataagctgacggaacgggtggtattattggtggaaaacggacaaatataaatccggttagttcctcattcttttatagttactcttttctaaacttaatcaatttatttgcaaactcccaaagtacaatgccggtagtaaccgatacattcaatgaatgttttgtgccatattgaggaatttcgatgcaaccgtcacaggcatcaattacttcttgttgaacacctttcacttcatttcccattacgatggcatactttttatccggctcaagctcaagctcatcaagcatggtacttccttccacttgctctatagccaacaccgtatatccttcattatgaagttcttccactgcttccaatgtatgcttcacatacttccagtcaacagtatcttcggctcctaatgccgttttgtgcatttcaggatggggaggagtggcggtaataccacataaataaatacgttctacaagaaaagcatccgatgtgcggaatacggaaccgatattatgcaaactgcgtacttcatccaatatcactgccaacggtaacttgtttgcttgcttgaattcatctactgtaagacggttaagctccgttattttcaattttctcatctttttctacatgctattaatatatattgcaaagataataactaattcacataaccctgttgataacggttgaaaacatgtaaaaagaatgagcatatcatttcaaaagtatttcttgcatatttcaataaaagatatatcgaatgacagaaatcaacaatccaaagaataattcaagaacttaaaccgacaatatcaacacaatttaatcactattttaggcgttcataaccataaagtttttaactttgcatattatcaacagtttgttaatagaaaagataaagactgtattatcagactttaagcccgttgattacttattcatatctctgcaccatgaatgaataacttctcaggcaagaaaagcagtctactttttactaacactattaaccgacaattatcatcactataaattctttttttaagagaagaaagaaaaaacatagaaataatgaataaagaggaatggttgaaaaaggggtatgttgccgaaccggtggacaagaccttagatttgaaagcagagataaataagttgcgtaaagagaagaatgcacttattttgggacattactaccagtcgggtgaaatacaagatatggctgactttgtaggtgacagtctggcattggcacaatgggcagctaaaacagatgccgatattattgtgatgtgcggtgtacactttatgggagaaacagctaagattctttgtccgaataaaaaagtgcttgtacctgatttgaatgccggttgttctttggccgatagttgccctgccgatgcttttgcagagtttgttaaagcacatccggagcataccgtaatttcatacgttaatacaacggctgcagtaaaggctgtgactgatgtagtggtgacttccaccaatgccaagcagatagtggaaagcttcccggcagacgaaaaaatcatcttcggaccggaccgtaacttgggaaactatataaattcgattacaggacgtaatatgctgttgtggaacggtgcctgccatgtgcatgaacagttctctgttgaaaaaattgcagctttgaaaaaacagtatcccgatgcggctattctggtacatcccgaatgtaaaggggctgttgcgaagctggccgataaagtaggttctacggcaggtctgctgaaatatgccattgccagtgataaaaaggattttatcgttgctacggaaagtggaattttgcacgagatgcgtaaacaatgccctgaaaagaactttattcccgctccgcccgaagacagcacttgcgcttgcaatgaatgtaatttcatgcggttgaataccatggaaaagctgtataatacactgaagtatgaatggccggaagtgacagtggatgaagcgatagcccaagaagcggtaaaacctatcaagaagatgctggaaatctcggagaaactgggattatgaaaataaaaagtcgtttattccatacgtttcagagtaagggcgactttttgggatattaataaacaatttactttggcggaataatgtgtccttaaggaatcgtttattccgccaaatttattttcgataggaaaataaaaaggattatagaatgaaaaaaatactatggaaaagaataacgctccttttcaagaatcgtaggataggggattttgtatgcaattttactgctgtagtgctgggtatcatccttacttttatgggaagtgactggatagagaaacggaatacgcagcgggatgtgaagagtgcgcttcatttggtaaaagcggaactacagactaacagggaaaccattttaggcggaaaacagagagtagagcgggaaatacgcgctgcacaatttttattaagaaacaaggatagtcttttggtggtatcgaaagattcattggagtattattccaatatgcctttccaaacttcatttattacttttactactgatgctttggaactgatgaagagttcggcgctttttccacaaataaaagataggcagctggggttgagtattattcaggcttatgcttctataaagtcggctgatgtgctatatactacttatcaaaccttgaaaaaagaacggaatgactgcctggatgcaaaaccggaagtgaagcgtatctatgcccagaaactttctttcgctttgttatggagccgcttgttggccatagacgaaggatatgatttgttggttcagattcctaatatgataaatcccgaatcttttgattattttataaaagagatagactctactatacaagctatagagaaatatgaatgaggattgatagaagtaacaagtgatagaactataatttgcagaaataacttagggatatatgaaaaagttacaagttggttttgatgcaatgttacgtgctacacctactgcatttcataagtatatgtttaatcgtatcaattggaacaatccatcaactgtaaggacagagtctgcctgcccgaatgcatgaagtggactattttcgggcgagtgaacctcgcccctactagcaaaatgatatttttatactacccttttcacctttttacgctttcagaaaccggcaaagcttttccaccgccaatgcacgatggctgattttattcttcgtctcatttcccagttcggcaaacgtttgctcatatccttgaggcataaagataggatcatacccgaaaccggagtcaccgcgtttctctttgataatctcaccttttactacgccttcgaataaatgcttctttccattcgttattaaacaaataacagtgcggaactgtgcttttctattttgtattccttgcatattctgcaataatttctgcatattggcttccgcattatgtccttctcctcctgcataacgggcagagtaaacacccggttctccatttagtgcctctacttccagacccgtatcgtcggcaaaacagtccaaaccgtagtgttcataaatatactcagctttcaacatcgcattaccttccagtgtatcagaagtttcggggatatcaatatcgcaatggatatctttcaagctcaataattctactttctctcctagaatagcggatatttcatccagtttatgagcattgtttgtagcaaatactaattttcgtttcatcttacatcgtatttattgaatgcaaagatactgagaatgaaccaaaataaggtgattcctgacagaataaatatagccggcaaggaagatagaagtctattttgttatgtttacttcggatagcaatcagactccatatataaagccaatcggctcttgacatattcgttaatttctaccaccgatttattaatcggtggtagtgattaataaatcagtggcactgattatagaaccgatggtgatgattaatgaatgcaacggttcgttgtaaagaatgtatcagctcgccggacgaaatatctattgtcccgtttaggttattaaactgacatcttgtgtgttactgtggaaactcccctataaacttatcttatatgtaatgacactctaaataaacttataaatatagttaattaatagttctttttcgcctttaaatgataatgactaaaaatttagtcatatatttagttcgtacttatcaatctaataagttatggaactaacaaaggcagaagaacaaatattgcattatttatggaagttggaggaagctaccgtacaggatatactttcgtgtatggatgacgcaggaaaaccttcgcgcactaccgtatccactattattcgtattcttgaaaacaaaggggcggtcagtcataaaccgggtacagggcgcggttacatttattatcctttggttaaaaaagaagagtactcccgcaaacagctttttggctttatcagccgttattttgataactccttttcatccttggcttctttttttgccaaagaaagtaatatgacggcagaagagttggatgtactgttggaagaaaccagacggaaactgaaaaatgaaaaagggaaggagtaattatgtggatattactcttaaaaatttgtttgctgaccacccttttttatagtttatatcattgggcattgcgtggaaatacctttttcagatttaatcgggtatatcttttagcgggaatgtttatagctttagcactgccttttatccctctatattatgctgtgccaacggtcagtgagactgatttgccggaaacggcttttcggattggcaatatcataagtatagaaatgaaagtcaatgaatctgtcaatttcagtcagataggttgtctcatttatatttcgggacttattgtacttttgttatctcgtatgtggactgttttccggttgttccgatgtattcgcagcggttcaaaagaagttttttgcggtattgtttcgatagagacaccgatggttcaatcttctttttctttccttcgttatatagtgcttccacaagggataaaagaagtggataaaaatgtgattcttgcacacgaagagactcatattcgccaatggcattgcgttgatttattgttgggagatattttttgtatcatacagtggttcaaccctattgcttggctgtataaacgtgacttggtggaaaaccatgagtttttggcggatagtaatgccgggaatgtggcgggaatggatgtttataaggagacacttacccgatattggttatatggaaccatgaaaagcttggttaatccgtttgcatattctacccgattaatgcgtctttccatgttgaaaaagccttcttctcacggcatacaaaaatgttggacagtagctcttgttcctttattattgctgtatgtctggatatttgcagttccggtatcgagtgcagaggttacagattttcagcaggtaacgcttatggggaaaattacagatgaaacaggacagaaaatagtagctgcatctgtatttgttcctcgaaaatcatttggaactatcagtgatatcgatgggaactatcggttgtcggttgggaaaaaggatacggtttatgtttcgatagccggctatgaaaaacaaaaaatatgtgtgtccgattatgctgtagaaaatggtaagttaatgattgatgtgcttttacaatctttaaaatagttatgttatgaaacagtgtctactattatttacttttttatgtgtggctatattgccatccttttcacagcagaaaattgatatattgggcaatgcaggaaaagaacaggaaatcaaattgagtgaggtagccaaaagtgttcgggtaattccattggaaacaacggaggaatgtctattgggtactgatttaaaaatatactatggtgaagaatatatttttgtatgtgatcaaagacaaccgggagctttttatcgcttctcaaaggatggaaagtttcttaataagataggctgttcgggagaaggaccggaagagtatattcgttccctttctttttctgtggatgaggataaaaaagagctttgggtggttgatagtagaggaaacaactttgttatttactcgtatgatggaaaatttatgcgtaaaatacctattcataatgcttatacttatcaagtggtgttgagggaaaatgatattatttatgctaataatatgttttatcatagttcaaaaaattatgaactgttgagagcttctcgtcaggatggaaaattaatacaacgagtacgttctactgttccggaagattataaaatcagattattattgagagagcctttgctatatacttatcaaaatgaggtgtattataaaaatccgttgaagaatgttatttgtgtattgcgtgatggtttgaagcagtatagaagatatgaattgaatatcggtatggtggataatgagaatcgggatgactattttaatcccaaaaagaatcgaaatatgataaatatagccggtgtatatgaaacagaagatttcttgttgtttttttatggttataaagagaaagcttattggatgctgtgttccaagcaagactggatgtgcaaggctaataattatgaagattgtttcacagatgacctttcccctagtgaagaaaagtttgtttgtcgttcgtttacttctgttactcagcgtcatctgatatcaatacgcgaagataaggaaggagatgctaatccgactctgttggtagcggaattaaaataaagaacattattaatttaataaaaaatgaatatgaagtatctgttttcttttttatgcttatgctgtgttttgtcggtttcagctcaaaaacctgtggccattaatttggcaaaagccatcagtgaatcccctaaagagataatgttaaacgagttggcttcagatatcaggtatgtgcctttggagacaaccgatgattgtctgatgaataatgagttctacatcatgcagtatacaggggaagacattattacaagtggcatttttcattttgataagaatggaaagttcctcaataagattggaagtaaaggtcagggtccggaagaatacttgcaaggtttatttgctttcggcgattggaaaaacaagttattatatgttcagaactggactactttgacttgttatggatttgacggaacgtttgtgaggagtgttcctacaccccaattaaatatgggagcagccggattgtttgacgagaatcatattttgtatagtaatgatatttattatgctgacaaggcgaatccgatacagttatatatggtcgacagtcagaatggaaagactgtaagtaagtggcgtggtcatttggaggagaataagaaatacggtatgattctgacttcccgtgattttatgtataattatgataatagtttgttctataagccggccttggagaatgtaatatttaagattttatcgcccaaaaaacgtcagttggtttataaattcgattgttccggcaaagatattgatgtatctgctgatgaagttgaccctaagaaaagatttcagtttctatcggtgtattgggctaaggaaacagctcagtatttgtttgtgaattatggaatgaagaatatttctcgtttgggaatatatgataaagagaagaaaacctttactaatgttactattaaagacaatctggccggtggctatgatatccatcctgcatggacaagtgacgacaatcatttactgatggtctattatgccggtggactcctgcaagataaagaaaagcgttattcaaccggtctcttgcctgagagaaaaaaggaactggatgagttgctgaaaaatataaaagaggatgataatccggttgtcattttagtgactttgaaacctaagaaagataataaacagtaataacatttattgcaagatggtcggacttgattttccaataagggcagatatatcgtcttgttcacataattcacattcgatgagcatgaatgatgtctttcacaatgatttcccataaacaggcggtttcggcagttgttatgtgtgaaaggagatatgcaataaactttctatcgggttaattcttgctttttgtgatgagaacggacgataattcttcattaaaaagaccttgagattttaaaaaaaagttcctggagttttttgaaaatacttccatctttttgatatgccgttggcatgtacttatttatatagattgttttaagaaaataacagtccgaaatgattgccaagcaatagattttattaaatttgcatttgcggtatatttaaaacagaagggtttatgaagtggaaatcggatttatttaacaatatagtccgtatgggaatatatttgttgctttggggcgtttcatcagacatggttgctcaagaggatgtgaaacgcattgttcgtgacagtgtgcggacatcgtccgaaatacaggaaggaaactctttttctgtttcttttctgcatgaagatttttctgtgtcggatgaaaagactttaagttttcctctgccccaacctactccaaccgattctctacttcgtctttctttaaagaagccacttgttcttccttattatacaaatccttcacctatgttcaggggagattacagcaccggagggataataaaaggatttgaaaatggagtgttttatggttcgggagagcagactgctttgcctggtatcggactgatgaataaagcttcgtttggatacatgtacaggttcaatcctcgatggagcgtacaggtgggtgtcgatgccatgaaaatgaatatgcctttcgctgttgggcagtctttcggaacttcgggtgcagtgatgtatcgggcttcagaccgtgttgcctttaaagtattcggttcttattatagaggtcagacgtatggtatggaatcgcacagttatggtgccagcatgacggtggatatgagcgaacggttcagtgtggaaatgggagtgcagcgctattacaatcctttgcgtggaggttgggaaacggttccggtagtagttccttgttataagttcaataagtttaatttagggatagatgtaggcgggttgatttacgagattcttcacaaggtggtgattgacaaggacaggagcaagatgggtaatcctacccttgggccgccgtcccactttcagatgcagggacggtgaaacaagggatagaatttattttattttcaatttatcgaacccttcgccatacactcccactacattgctttgtgagatgaatgcattggggtcaatatctttcaccaagcggaatatatccagtgactggcttttttttgccaataccacaacgacctttatgttttgcttgctgtaccaaccggtgccgtccagcaatgttactccgcggtcgatttgcttggtgatgccttcggctatttcatcatgcttacgtgaaaagatgaggaattgaacagactgacgtgtactgttgattacataatcaatcacaatactcatgatgaacaagacacaaaatccgaataatactcgcttccaatcgtgaaagataaaatagcaggaagaaataatgacgatatcacagtacatcatcattcggcctaacgttacatccttatatttattgataatccaggctatgatatccgtccctccggtacttccgttattgcagaacacaatgccaatgccgaaacctaacaatcctgcacctactacacaagccatgaactcttgtccgggacctaataattgtggtaagttaccatccggcccttttaatattgcctgaaaaagccaaagcagaaatgtcagcatgaagatagcataaactgttttcaaactaaacttggggccgagtatcttcaatgcgaatcctaagaagagtgcattgattatgaaataggaaacttgaatttccacacccgtcacataatagatgatagccgaaataccggttactccacctgtggttatttgatagggcagcaaaaatgctgcccatcccaatgcataacacatcagtccgaaagtaatggataaatagtcctttacatctctaccaagtctgatttttagaattttatccatagacgattatagtacgatatttacaatcttcttcggaacgataattaccttcttcggagtcttgccttcaatccatttctgtgcctgctcgtctgccataacggttgcctgaatggtatcattgtcagcatcagcagggaattccatggtgaagcgtgctttaccgttgaatgaaatagtatatttcacactatcttccttcaggtattcttcattgaatacaggccattgtgcatcgcatacgctggtggtattgcccagtgcttcccacagttcttcggcgaaatggggggcgaatggtgccaacaggacgatcagatggcttaatacttccttgttgcggcatttcaggctgcccaattcgttgacgcaaatcatgaaagcgctgatagatgtgttgtaagagaaggtttcaatgtctccggttactttcttaatcagtttatggatggctttcaattcttctttggtcggttctccttctaccggcaggaattcatctgtacggctatagaagaggttccagagttttttcaagaaacggtgtacaccgtcaataccattggtatcccaaggtttggattgttctaccggaccgaggaacatttcgtacatacgcaaggtgtcggcaccgtatttttcgacaatcatgtcgggattgactacattgtacattgatttactcattttctctactgcccagccgcagatgtattttccatcctcaaggatgaattcggcattgttgtattcgggacgccatgccttgaatgcttcggtatccagcacatcgtttgaaacaatgttcacatccacatgcagcggagtagtttcatactggtctttcaggttcaatgatacaaaggtgttggtatctttgatacgatatacaaagttgcttcgtccctgaatcattccttggtttaccaatttctggaacggttcttccttgatacttatgcccagatcgtgaaggaacttgttccagaaacgggaataaatcaagtgaccggtggcgtgttcggtaccacctacatagaggtctacattctgccagtaatggtctgctttttccgataccaacgattggttgttgtgcgggtccatataacgcagatagtatgcggatgaaccggcaaagcccggcatggtgttcagttcgagcgggaatacatggacgttgtcaatcaaagaattttccactacttcacctttttccacatcccaagcccacttggtggcatgtcccaatggaggttcgcctgtttcggtaggcaggaacttggcaacttcgggaagttcaagcggtaacttagatgaatcaatcatgtaaggcataccgtctttgtagtataccgggaacggttcgccccaataacgttggcgtgagaaaatggcatcgcgaagacggtagttcacttttacacgtcccaaattgtgagcttttacatattctttggtagctgcaatagcttctttgatggtcagaccgttcaatgagaggtcacagtaaggggtagcatctttgcggggagagttgcacacaattccttctttggcatcgaaactttcttcgcttacatcgcaaccttctaccagtggaatgataggcaggttgaaatgctttgcaaaagcatagtcacggctgtcatgggcaggaaccgccatgatggcgcctgtaccatatccggccagtacatagtcgctaatccatacgggaacggcgtcgccggtgaacgggttgacagcatacgaaccactgaatacgccggtcacacggcggtcggcgatgcgttcgcgttcggtacgtttcttggtgcggtccagataagcgtccacttcttctttttgttcaggagtggtaagttgggcgaccagttcgctttcgggtgccagtaccatgaaggttacaccgaacatggtatctgcacgagtagtgaagatagtgaattcgatatcgctgtcttttaccttaaactgtacttccgtaccttccgaacggccaatccagttgcgctgggtttctttcagtgagtctgtccagtccaccgtatccagtccttcaaggagccgttgtgcataagccgaaacgcgcaggcaccattgacgcatttttttctgtactacggggaaaccgccgcgttcagaaactccatccaccacttcgtcattggcaagaacagttcctagttgcgggcaccagttcaccatggtttctcccaaataggcaatgcggtagttcatcaggatttcctgttgttctttttcgctcttggcattccattctccggctgtgaagctgagttcttcgctgcaagctacatcgagtccttcggttcctttctgtgcgaagtgctctatcagtttgctgataggttgtgccgatgaacaggtattgcaataaaagctgttgaacatctgctggaaagcccattgtgtccaatgataataacccggttcacaagtgcggacttcacggtcccagtcaaaacagaaaccgattttgtccaattgttcgcggtagcggttgatattgttgacggtagtgatggcgggatgctgtccggtctggatagcgtattgttcggcaggaagtccgtaagcatcatatcccatcggattgaggacattaaagccctgcaagcgtttgtaacgtgcataaatgtcgctggcaatgtatcccagcgggtgtcccacatgcaatcctgctcccgatggataagggaacatattaagcacgtagaatttcttttttgattcgtcttcagtcacccgataggttttattttctacccatcgttgctgccatttcttttcaatctctctgaaattgtattccatgatttatttttgttatttaatatctttgttattaagtggttgcaaagataatgaaagtcggggagataacagaaagaacggggaaagaaaataatccggtacatggggcttctgtgtctacatcattcggagcttctttctaccttttcgtaggttacgttgatgcgggtataagtccattgatggttgaagaagtcaaagtaacgggctgtcatttctacaacaaaagtatctttgccggttctttccagtcgttccaccacacccaggcggaccgcaccgggattgaccaatcttaaatccactctcgaatcttcggtgagtgtatattcgtaatcagtcaagtcgtgtgtgtagaatgccagataaggttctgtttctttccggttctgaaaaatgatttcttgcaaaggaagtcttagtagcagcagttgataatcaggttggtcatcgaaagccgggcggacttcggcgtagttgctccattcttcaaaatgatagaaaggaataggcgtctcgtctttattattgccgtgtacgggggcagctatctcttcataaagattggaagaactgatgccgtcattgttcaggtcaagaggttgatctgattccatggcggtaatcttgtaatgccctttaaagttattttcaattacggtttcttcattgttttggcaagagctgaatgccaatagtactgataacagcaggtaatggatgtgtttcatattgtttttagttttctaatgtttttattgatgggataggtctgcttgcccgaaaaagttcactttgtgtattggtgaatgtattcgggcaggcagaccctgcccttacagttggcggtttgatagaccatcttaattttgacactcctgaatgcatagagcaaccgggtgatatttattgtttcaatcccaagtccttgaatgttctcggagccggaactttaggcaatggtttgcggtctttcagctcttgcataatgacctctatggctttattcagttgctggtcctctcccatctgttcttttatcgggtcattgtcaatcaggatatcggggtctactccatggttttccacaatccattgaccggtcttggcatcgaagttggtaaagaagggaacgcgtacgtccgtatcgtccatataaggcagcggaccactgattccgacaatgccgccccaagtccgggtaccgattactttaccgattttgtttgctttgaagctccaagggaacaagtcaccgtccgaagccgaatacttattgattagcaatactttcggtcctaccagtgtggcatcgggaatagttcccacttttgtggacgtgcggctcatggtcagacgataaggccggcgaagcaaacgttcgataatcatgggtgagacattgccgccgccattggcacggtcatcgatgatgagtgcttccttgtccaactgtggatagaaataacgggcaaattcgttcagtccgtcaggacccatatcggggatatagacataacctacacggccgttggtggcttcttctactttcttgatattgttttgcacccaattgtagtgatacaacggatattcattgtcgatcgggtttactactacttgacgtgcacctttggctgacggagtactgttgatacttaattcggtcagtacacctgctttgcctattagtaaactataaatattgtctacagtggtagtcgggataccgtcgacggcagtgatgtagtcaccttcttttacgccaagacccggttcggtaagcggagagcggagcttctggctgtaaatggctcccggtaaaatcttttcgatacggtagaatccacttttatcgcggttcagctcggctcccagcaagcccatcttgatgcgttcgggacccttgatttctccggggttcacatacgcatgtccacaggctaattcggcaatcatctcaccgataatgtagttgaggtctaaacgggtttttgcgtatggaagcaaagcggcatattttgttttgatggctttccaatctactccgtgcatattttccaaatagaaaccatcgcggaaagcccgccaggtttcatcgaaaatctgtgcccactcttgtggatagtctatcggggcaatcatgttgtcgaggtttactttcttgtccaaagaagctttgttgcaagggaaatcacatacatacaagtcgccgcctttgtagaagatggcttttttgtttccttcggctacgctcatgttggctccttcggccacgatttcttctttttgttcagccaagtcgaatactttggtgttgccggagttggaataccatactttttttccgtcggaataaagttgataataatagcctgccgcaagaggaagtttgagcaagcgtccgggcaatccttcggtatcgatggttactccggttgcttgaccggctttgttatccgctttattttctttggttgcggctttgtttccggaagcattatcttcgatgctgattttttcgtccgatggcaggaaaggagatggggtatctttggcgagtaaagcaatatatactccccccatacggttgtaagcatgattccattctgtctggctatagatggggttgaaatcgcgctcggaagtaaaaatgagatatttgccgtcagtgctgaaacagggtgatgaagagttataccatttctctgttacaggatattctttacccgaagtaagatggtatacatagaccacagacatgttgttcttgcccgatttggtataagtaatccattggctgtcgggagagtaattgactgaataaaactctccttcagggttttgcatgacagtttttttggattttgagttgacatctacttccacgatacggtttttgcggtcggtgtagagtacttttttgctgttcggactccacatcagttggcggatgtaggtgtcgttgttttcagtcagttggataggttctccgccttcggagggttgcagccagacttcagtttctccggtccggtcgctgatataggcgatgtattttccgtccgggctccaaactgcatcgcgctcgttggcccccggagtacgagtaatgtcgcgggttactcctttatctgccggaacatcaaacacttcgccgcgagcagttaccgctacccggtgtccgtcggcagaaagactgactgcagtcagatttccccctacttttttcatttccttgcgggcaaggatattatcagattttaaagtaatggatattttttcggtttggcgagtcttcgggtcgagtttataaaggtatcctccattctcatatacaatgacttcgccgttcgagctggggaatttgacatcgtagtctgtatagttggtaactttctcagtctgtttcgtttgggtattgtagacaaagatgttcatggtcatgtcacggtcggagataaagaaaatctcgtcgcctatccacatggggacaatgtcttgcgccacattattggtaatgttttccacttttttgtttgcaggatcgtaaatccagatatcgtcagccattccgccacggtagtatttccagttacggaattcacgcattacacggttgtaagccaacttcttaccatctggagagtaagaacagaatccgccttcgggcaatggaatgagttgagacatgcctccgtccttggatatcgtccagagttttccgtcaaatccgtcactgatacgattccgatagacgatgttcttaccgtcggggctccacgtcatgacgatattgttaggccccatacggtctcccaagtcatcacggctgttggtggcagtgtaagtcagtcgggtcggttctcctccatcggcagatatcagatacacttccgtatttccgtcatattgtccggtgaaggcgatagatttgccatcgggcgagaaacgggcaaacatttcatagccgatatgcgaagtgaggcgttgtgcttctccgcctttcaggggagctttgtacaaatcgcctgcataggagaacacaacttcctgtccgtttgtagcaggaaagcgtagtagtctggcctcatcggtagcatgtccgacggaggtagtccctgtcagtaacagggtgaataatagttttttattcattttacttgctgtttgtaatatggttgcttataagagcaaagttaagattatttttttattcatgttctttgttgtctgaaatataattcataaattgcactgtttatcaataatattagttgcttttgtatacctttgcgtttaacctttaatagatatatagaatgaacaaaaaacttttatggctgggcagtggacttgcccttacttcattgggtgcttatgcacaaaagagtcatgatgtgaagccaaatatcatatacattatgtgtgatgatatgggatatggtgacttgggttgttacggtcaatcatatatcagtactcctaatattgataatatggccaaagagggtatgcgctttactcaggcttattcaggaagtccggtcagtgcaccttcccgtgcttcgtttatgacaggacagcataccggtcactgtgaagtgcgtggaaataaagagtattggcgtgacgctcccatcgtgatgtatggtaataacaaagaatattcagtggtgggacagcatccttatgaccccgaacacataatcattcccgagataatgaaggataacggttatactaccggtatgttcggtaaatgggcaggaggatatgaaggttctgtttctactcccgacaaacggggtattgatgagttttatggttttatatgtcagtttcaggctcatctttactatcctaattttttaaaccgttacagtaagtcattaggtgatacggctgtggtgcgtgtgataatggatgaaaatatcaaatatcccatgtacggcaaagaatactataaacgtccgcaatactctgccgatatgattcatcaggaagccatgaaatggcttgataagcaagatggtaaacaaccgttctttggtatttttacttatacattgcctcatgcagaattagttcaacctgaggattctattttggaaggatatcagaaaaagttcttccatgacaagacatggggaggttcggaaggttctcgctacaatgcttctgttcatacacatgcgcagtttgccggtatgattacccgtttggatcattatgtgggtgaagtactgaagaagctgaaagaaaagggaatggatgaaaatacactggttatctttaccagcgataacggtcctcacgaggaaggtggtgcagatcctacattctttggacgtgacggtaagttgcgcggtttgaagcgtcaatgtcacgaaggaggtatccgcattccgtttattgttcgctggccgggtaaagtaaaagccggacaagttaatgaccatcagttggcgttttatgatttgatgccgacattctgtgatgtggcaggtgtgaagaactacgtgaagaaatataccaataaaaagaaaaaaggtactgattatttcgatggaatctccatctatcctactttgaccggacaggaaggacaaaagcaacatgacttcctttattgggaatttgacgaaactgaccagataggtgtccgcatgggtgattggaagatggtagtgaaacgtggcaaacctttcctttataatcttgccgaggatattcacgaagaccatgatgtagcagccgaacatcctgaaattgtaaaacaaatgaaagaagtaatcaagtcacagcatataccgaatcctaatttctcggttactttacctgactttgattaatatcaattcaaggcttttggtgaggctattgaagaatgttggtatcagagctgattatcgaatcattctaatggtttggtgattagttggttttatcgaaatcacccttgctacaactacctgtggcgagggtgatttttagtttatgagagtttcgatacaccttccttctctttatggtattggagtgtgggataacggggtcgcattgttttcttggggatttaaagctcattcagaaacaaagggaagagtaagccgtttcttagggtcagccaaggctttttaagcagaagactgtagtaattcgacttatagacagacgtaatcgaaaggacgaaaacgcttagtccggctaatgaaacggcttagggggctcaaaacgtatgcagcgtttgaaaatcggaggagacaacatccggtgacaggtgaataatgtattataagtaaatttatcgtttacttttgtatatcactgaaaaacaattatctttgtccccgaaatctaaaagcattccgatgagaatctaaacatctatttttaaacaactatttatttcatgttgggacggcaggcgaagtgaattcgtttgttgtgtaatagttgtcctctattcccacaatatacatttcagtattaacattttaattttatagaaacagtatgtgtatacatatacagtcggttacttatatgcatcctgataaagatgtgctcttcagtaatgtcagtttctctatggggaaaggtgagaaagtagcgcttatcgggaataacggatcaggaaaatcaaccttgatgcagctgataacaaaagaattatcaccttcggaaggtgaagtgatttgtttggaaccaccttattatattccccaacacttcggacaatttaatcatctgacgatagccggggctttgcgaattgaaggaaagatacaagcacttcatgccattttgcaaggagatgtttctgtggagcattttacggtattggatgatgattgggatatagaagaaaaggcggttgccgctttacatgaatggggattgccgggagtgcctctctcccatcccatgcatttgttaagtggaggagaaaagacgaaggtttttttggcaggaattgctttacattcaccgtcttttattctgatggatgagccgactaaccatttggatgatgtgagccgtggaaaattatatcgctttatcacttccacttcgtccggtatgttggtagtcagccatgaccggatattgcttaatctgctttcttccacttacgaactcacgtcgaaaggagtaatttgttatgcggggaattatgacttttacaaagagcagaaggagttggccgttcaagcattgcaagcccggttggaagagaatgggaagcagttacagaaggcacgcagacaggcacgtgaagtgatggagcgtcaacagaagcacgatgtgcgtggaaagaagcagaatataaaaagtggagttggcaagatggctatgaatacttttaaagatcaggcagaaaaaagttctgtacgcttgaacaatgttcataccgataaaatacattcattagcaaagagtgttactgatattcggagtgaattaccggacatgaagacaatgaggctggattttaattcttcttccttgcatattggcaaggtactggttactgccaagaacctgaattatgcctatcagtctgaagaattgtggaaatctcctcttagttttgtgatacaaagtggggatcgtattcatctgaaaggggctaacggtagtggaaagactactttattgaaattgctgaccggtaccctctctcctactgcaggtgaactgacgagaatggatgggctgacatgtgtttatcttgaccaggaatattctattattcatgatgacttatcagtttttgaacagcttttttcctttaacaataaactttatgaccatgagcttaaaaccattcttaaccgctttctttttcctgtgtccggttgggataagaaatgtagttgtctgagtggtggtgaaaagatgagactttctctctgctgtctgatggtgagtacgcaaactcccgatctgtttatagtggacgaaccgaccaataacatcgatattatgaatatggagatattgactgatactttgaaggagtatcggggaacattattggttgtgagccatgatgcctgttttgtgcagcaaattaatatagagaagacgataacgttaaatatgtgatgaagactgcaagaattcaaatttacggaaaatcagataaatatgcctgtatttatggcattgttcggaaataaatgttatttttgcccatgtgaaagaaaaacacaaaacaacatgaaaactctcctgcatatcgtagtatatatttttatccttatgggattatccggttgtaatagcgatgtcttcgttgaagattttcagccttctgtttctgatgtgactttagaaggaaacggtgattcggtgactattcgttttaagtcttccaattgggacctgctgagagtgtatgattattatgataactcttcattatattattcggtttatgataaagatggtaatatagtttcgcagaatcagtcacctgttttggaaggattgggcaaaatagtctgtgatgatatcatttataaagataagatggttgattttgccattgagcgtactcatcctagggaggtgaagataacagtaaacgaaaatatgtattcttctctttttcagttttgcgttacggtaagtaacgaatatgaaacgaaaaaaatatatgtatccataacaccttccgacagatatatatttgaccgtatcacttattcgcttgatgcctatagttatacggataaacaaatagaagagcgcaagagcatagtggttaataacaggggagatgagtcaatcgtaaccaactatatcttccctttcaaagatgagcatcggcagatacaattcaccagtaataatcccgaggcttttaatttgttggcagatagtaagccggaggttgagattcccggcattgtagatggccatctggtgatgaacggagaactggcgcgatatgcttctgatatgcaacaattgcctttgccttttcctgatacggaaaaggaggcggtcactactccgcccaaaacttcgcagcgtatcaccctgttgctggaatatgaatggtttgagactaattttactctttatgccgttcatcccaaaacaaaaaaagagaaagtcattaccggtactttgcaaagcaagatgcccaaaggatatttcataaagagtgagaagctcaataattagaacaatgaaaacgaaattactcttattatatattgccggccttttggctgtttgcccggtgggtggaaatttgatggctcagacggctacgcaaccggatgtattaaagaatgacacagtaagccataagttgattcatagactcggcttagatgtacgtcccagttatgtgacccctaccaatgatttctttgatggtgacaatatgcatcaacaacgaatcaggcaggctctttctgtacacctgaaatatgcttttcaattcgataagaattcatctttaggtcggttgtatcctcatgcttatcagggtattggagtttcttacaatacattcttctgcccttccgaactgggtaatcccatagcggtatatgcttttcaagggtcacgcatagcgcagttgtcaccccgtttgtcatttgattatgaatggaatttcggtgcttctttcggatggaagaaatatgataggacatataatccgcagaatgaggttatcgggtctaaaatcaatgcttacatcaatttgggctttttcctgaattggcagcttaattcgcaatggagtctgaccgccggtatggattttactcattattccaatggaaatacacattatcccaattcaggtgtcaatcccattggtggaagagtaggtattgtgcgtacttttggagacggggttacaactgtacaaggttttaaatcgctgtccatcaaaccttatatcagttatgacttggtggtgtatggtgctactcgtaaaagaggattcgtggatggctatgacgtttgtttggtacccggctcttttggtattgttgggttgaactttaatccgatgtacaatttcaacaagtattttagggccggtgtgtctgtggatgctcaatatgacgagagtgctaatatcaaagattatcgagtagaagaaagttcgtcaagtgatgtgaagttccatcgtcctccttttcacaagcagtttgctgtaggtctttctgtccgtggggagctggttatgcctattttttctatcaatgccggtatcggacggaatctgatatgcagtggtgatgatacggagggattttatcaaattctggcacttaagacttctattacaccgcgtttgtttttgcatgtcggctatcagttgagtaaatttaagaaccccaacaacctgatgctggggtttggataccgtttttacaagaaaaggtagaagagattacaagcggttcaatacatcatcggcagcactctgtcccttatatttctttgaatagttgttgaaacggtaaaccacacttaaagaaacatgtcgctggtcctggtcttcattttgccagaagtagatgttatttatacgtccgtcatataggctcatgcgtctgttcagcaaatgttcgcctgccagttttacttgtagcttttcattcaggaatgtcttgctgaggctgatattcaaattgtgttcttctcggaaagtaaaccattgtatgctaccggggctttggtaactatattctatgttggcaagccaatgcttggggaggtgaatattgttttcccaagtcacaatccatacggggcggtctacggctatccgttcattcatgcttttcactttcaggatgtttttctgaaacattccggtgagcgaaggttcgtaccagccgaaacggtgacgcaagttgattatcgccatccatcgttgctgtttattgtagtttttccaggtatagttggttatgttgggatattgagggtcagtggtatagtctgtacctatataatcttttttataacggtaactgagtgacagatataaaaaatcatagctcaacgagtattgtatctgatgggctatttcgggttgcagaccgggatttccttcctggcgcatataggtatttacataataagagttgttattcagctgatcgaagctcggacggatagtgctgatgcggtaactcagtgattgtgaaacttgactcattttataagagatgccgaagctggggaagaaattatgataagtgcgatggatgttgttcgatgcatcatacagattacgatagtccgaagctacattttcgtaacgtatacctgcattaagcgagaagttgttctgtgaataactatatgagaggaagccggcacgtttttcttcgtttgtttttgaacgggcatttttgcctttcccgccatcgtaagtcaggaagttgtcaccggttactttgctccattccccgccgcaaactaatgaatggttgtcattgaaggtataagccagtttcgggcttacggcatacacattataatccgctttgttacggttagtgatttcggacaggcctgaacgctctgattcctcggtcactgtttgcacgcgtccgttgtggatacgggcatagtcggtatagatgtccagttttatcttttcgttccattttcctgtataataggcattcaggtgatggtaatagtcattgttgtttttcagtatcgagttccctttaatataatcgtaaggcttatcgttggcaaggatacgggcatacgacggggcatcgttgtagtcggtggtcacattgccatcatactgtataccgatgctgtgccggtcattgatgctgtagtctgcaccggcagaataattgtacgaagtataaatcatggctttacactgctggtcgaggtcttgtgtccatacggtgtcgggagcagtgatgactgttttcatcagttggtggcttttgcggcggaaatccccgtaagtaaatgtaccgaacaggttcagattgcctgtctgatagtttagtttcacgccttcttcattgctcagccgatggttttggctcagttccccttccagttgcaccgaccaaccttctgttcgccgtatggtggtgataaggagcactgcacctactgaggcatcatattctgctcccggattggttatcagctccacatcttttatattctttacttccaactgtttcacttcgtcaatggaacgagttttctttccattaatataaataataggaataccaccggtaaaggaggtgagttgtccgtcttccatggtcatacccggtattttgcggagcacatccatcactttcgtttctcggtttagtacggaattggcaacattggcaaccacattacctcctttcatcttaaaggtaggtactgaagcagtaattaccacctctcccatcccgacagaggtatctttcaggatgataggttcgggaatgaccatatctgaaacaatggtaagaggtcgggtgtaggtttcatatcccaggaaggaaacgcagagtttataatctcctgtagggatattggggataaagtaatttccgtttgcatcggtaatactacctgttattactttttctcctttctttaacataatggtggcgttttccatcggtgtgctttgctcatcttgtatttgccctttcaaactgttaacactttttacggaagcggagacaactaccacatattggttcccttttagcgtatagtttagtggtttatcttgtaatagaacgttgatagcttgagtgatagtttcgttcttgatagaaaggttcactgtatatttctgtatatcatcataagtgaacagtatgcggtaacctgaggcttgctccagttttttaagtgccgcaggcaattcttcgttttggaaatcgagtgtaatttttctgtctgtttgcgctaagagggtaaactgcaggctgaagaagattagcaaaagataaataagtcttgttttcatgagttagcgttttattttgttcttttggtaataatacggattgcttgcataatcgggtactgcaaaaatagtttttttggctacaatcgtgaaacattgtagataaattattatatttgtcgtaatatcctgtttttctgttggttgtccacatacactcctaaaacgtatttgcttatgaaaagaatctttgtattatatgttgttttaagtatttgtgcggctgctttttctcaaataaagtttccggaaataaaatggaagagtgatagtttgatttttataagggaaaaagaggcattgcgctacggtgttgaaacatttggcgatggcctttatgtggattcgctcattcattatctggatacaatatgtcatgtggaaccccaagtagatagttctgtttctgattctatttttcaggcagtttggaataatgatacactcacttatcgggtacgttcgaagatatatcggggttatgattatgatagtaaatcgaaaaagaaattacgcaatttagtggtagagagtagaatatatccttttgcccgtttttctgcctgtattgagaaattggatgaggctatgattgaagtgttgaaagattccatgttgcgcatggagtgcccccttcctatgctgaagaataactatcaaacttgtattttttatgcgttggatgctttatttcaaacgtatggcatttataccgaaccggtgattactcgtaatactacgtataggcgtgaagaggaattgaatgctttttttgattactttttaacctccacagcttcttatccgtgtcgttataaggaaataaaaaatgttacttttcccgataactgtatcttagccttttataatggttataatcatatcatccatgccgtgttttatcgggatgggctgttctatacaaagaatggcttattctctcccatggtactttctactttgcatcctgtgctgaaatcctacagtcgttgggatacctcactgaaaggattgagtaaagtaggtaagcagttgaaaagtgataaaatagttgtatataccttgaacaagaatttattcagagtaaataagtagttcttttcacaaacctacaattactttatcattctcaaatttggcattgactttctgcatactgttcagtaaattgagaacttgaggaagtgaatcacctctgtccgattggaaatgcatccggtagtgcatagcctctttactggtaaaaatgatattgacgttataccagcgtcccaattctcgcatgatttctattagttcggtatcgtcgaaatagaactgaccttcggcccaagtgctgtattctttggcttgtacttcatgaatggaaaaggttcctcctttttgcaatgtggcattttgtcccggtttgatgagcaattctttcgtgtgatgcgtatcgcttacttttatgctgccttccaatagagtaacatgggcgttgtccggcgagtagacccgtatattgaaagaagttcccaagacttgtgtttccagtaaatcggtttttacgataaaaggatgagcggtgtcttttgccacttcaaaataggcctcccctttcaggtggaccactctcttctcctgcccttcaaagttttcgggatattctaattggctttctgcattcagccatatccgggtaccatctgtcaaggttatttggttattcatgccacggggcaccgtcaggagattctttccttcatgagtgtggatactgatttcttgggctactgtccgggcttcgaaaacagtatagtaagaatgtgcaggcgcatacagccaaaataataaagcaatggaggcagcaatcaaaacgatgcttaaaccaataaagcgcatccgttttacggcagggacagaaagctttcgcccgaatgtatctatgtttcttgtttttcctttcggagcaccatcaggcgaattcagctcacctttgtgtcgtatgtccttttgcgtggtgtgttgtgaggagaatttgctccactccttttctatatcgggagcggttgcattttggcgtgccaatgcctctttgccgtccaacaggtcacggcaagcttgcaagcactttgtatcattcagcaatttccgtaactcttcatcggtaaagttttcggggtgttttattgcttccaatgctcggcttatcttttcctcaaaatatttatcttctttcatggacttgttactccttatatggtatgtacgttttaacttcattttcgggtacttccctactcttcttttttataccgaactcttcgcgtatcagtcggagcgccttcattatatgctttttcactccgttggtacttatgccgaattcatcggctacttcctgatatttcttgttttcgtaatagcattctttcaaaatcgttttggtggggtcggtcagctcttctatcactttctctatacgggctatcctttcttcgcgttcgctgaagtcattgtcggcttcttcttgcgttacagctttgtagaagtcggcatattgttcttttaccagtgaatggcgcaggtggtcgatacatttattacgcacattggcatagagataggcagtgattgtttcttgttggagcgattcatatagattccaagttttctcgaatacatcatttacaatgtctttgcaagtttcggcatcactgataaattggaatgcataataatacaatcgggcgtaattagctttataaagctgttcaaatccgtatttatagtttgtaaattctgtcataatatttagaaagacaggtaggccgggtatgtcatttactttaaaaggtagaagagttgcgtgtttgtataataattgctgaattaccctagagtaaataggcaattactgtatagtaattgtttcattaccctagggtagtttgaaaattattcggactgtttttttgtaaaagcaaatggttattacttgtattctgcccagtcaatcaggcgcatatcacctttctttgccaatgtatcgtgcattgccaatgcagccgaaatgcaatgaggggtctgcccctttgaagccatctttacataatcccataggatattcttgtaatccgggtgggcacagttttcgataatggcatgcgaacgttccaccggactctttccgcggaggtcagcaacaccttgttcagtaataatgatattgacgtcgtgctcgctgtggtcttcatgagataccataggaacgatggcgctgatttttccttctttggcaacggatggacaagtaaagatggaaatataagcattgcgggtgaagtcacccgaaccaccgataccgttcatcatcttggttccactgatatgggtagagtttacattgccgtaaatgtctgcttcgatggcagtattaatagagataacaccgagacggcggattatttccggattatttgaaatttcggacggacgcattaccagtttatcccggaagaaatcgatgtcatcataaatgccttgcaaacattcattggtgactgtcaaagaacaagtacttccgaacttaacgcgtccctgacgaatcaagtctaccacagcatcttgcaatacttcggtatacatttcgaaagcaggaattgtcttatcacgtcctagtgcacctaatacagcattggcaatattacctactccactctgcaatggtaggaaacttgcaggtatgatgcctcgtctcatgtcggcagccagaaaatcagctacgttttgtccgattcggtcggtgatggggtctggcgctgtaaatgaacgtgcctggtcaggcatattcacttccactacaccgataatcttttttgggtctacctgtacgtatggtagaccaatacggtcacttggtttgaagatgggaatctcgcggcgataaggcggatcaagcggtacgtacacatcgtgcagtcccatgccgttcttgctatgggcagcattcagttcgataatcactttatctgccaatcgcgcaatggtcggagcaatacctccggcggcagtcagatatacttttccatcgggagtgatttcgcaagcttccagaatagccacgtctactttacccatgaaaccataacgaacttcttgtgccatttgtgacaaatgaatatcattataagctatttctccattatttaccgctttacggaaatcaggatttgtggtataaggggcgcgatagcgaatagcttttactcttgacagaatcccatcggtggcatctcctgtggaagcaccggtaaaaataccaatttggaacggattacctttggcatgctcttcttctgcaatttttgcgatttcaggagttacggctttgggagtccctgccggagtaaagccactaagtccgatgttatagccatgttttacatagctggcagcttcggctgctgaaatgatattaaatcccatgatattcaatgtgttttctggttgttagtattgttgttattaatattttcgattgaaaatttccgagtaaataaaggcccgtcgtgcttcttcgcgtgtgtttagcgcgatgcgttttttttcatcggaaggagtatgtcgggtattctcgttggcaattggtgctgataagggcttttctttctttttgcggatgggccgaggagtacattttatagggcgtggtgaaatagtctgctcctcttcctccgtttcttctattgtgggaaacatatcagtaagaacttcacgaggagaaggtgtgcccgtttcttttttagccttggtaatttgttgcacaatggcaattgcaatgattaccataaatattaatacttggacaatttccataggctttctttatttagtataatttgataatgaacggtcaaagttagaaaattattttataacttcgttcataaaagggcaaaataaacaaggaaagtataatgtattgggagctatcccaaaaagacttcgtttttcaaaagtgctctttggtatctgtgtcagaaacttcttttaaggaaatgaaacaaagaaaaaaggaagagaacttcacagttgtcttcccctatttttttaacctaaaccttaactatgaaaaaatctaatgtttttcaaaagcaaagatgcaaattatctaaatacgttggtaacgcaaacggagttttttgttcattgattatgataatttaactattagggcttctaatggcttttattatgtcttttcggtctgaatatcaatctataaatatgcaaaaatcaaacaggatatgaggaaatttgccgggaactcaatatctttgcagtgaatttataaaaagagaatatgatgaaagaaacaacaggagcagactttaaatctgcaactgaacaggaaaacaagaaactgtttattgagacgtatggttgccagatgaatgtggcggacagtgaagtgattgcttctatcatgcagatggcagggtatagtgtatgtgatgctttggaggatgcggatgctgtgtttatgaacacttgttctattcgtgacaatgctgaacagaagattttgaaccgattggagttttttcattccatgaggaaaaataaaaaaagaaacctgattgtcggtgtgctggggtgtatggctgagcgtgtaaaagaggatttgattgagaatcatcatgttgatttggttgtgggaccggatgcttatcttacattgcccgacctgattgctgctgttgaagcaggagagaaagctattaatgtagaattgtcgaccacggaaacatatcgtgatgtgattccttcacgtatctgcggaaaccatatttcgggctttgtcagcattatgcggggctgcaataatttttgtcactattgtattgtgccttatactcgtggccgggagcgtagccgtgatgtagagagtatcctgaatgaggtgcgtgatttggccgataaaggttataaagaagtaactttgctgggtcagaacgttaattcctatcgttttgagagagagaatgaagtgattactttcccgatgttgcttcgcactgttgctgaggctgttccgggaatgcgtgtccgctttaccacttcgcatcctaaggatatgagtgacgaaaccttgcaggtgatagccgaagtgccaaacgtttgtaaacatattcatttgcctgtgcagagtggaagttcgcgcatattgaaattgatgaaccgcaaatatacccgtgaatggtatttggacagagtggcggctattcgtcgaatcattcccgattgtggattaagtacagatattttttcgggttatcactctgagacggaagaggaccatcaggaatctttgtctctaatgcgtgagtgtgcttatgactctgctttcatgtttaaatattcggaacgtcccggaacatatgcttccaaacatttgccggatgatgtgcccgaagaagttaagattcgccgtttgaatgaaattattgagttgcagaaccaactttccgccgaaagtaatgccaaagatgtaggaaagacatttgaagtaatggtggagggcgtgtcgaaacgttcgaaagaacaattattcggtcgtacacagcagaataaagtggtggtgttcgaccgcggaaatcaccgtatcggcgattttgtaaatgtacgcataacagaagccagttctgccacactgaaaggagaagaagttttctgatgggaaaaaaagaagcatataaagaaaagaacttgcagtatttgcaggttctttctacccgggcagatatctgctctttaccctgcgggatattctatgaggtgctgcaggcaggtaccggaacggcttcacccactcttcgtagcatcgttactgttcattataaaggcagcctgataaatgggaaggagtttgataattcttatagccgtaattgtcccgaagcatttcgcctgtgtgatgtcatcgaaggatggcaattagcgctccggcaaatgcatataggggatagatggattatttatattccttatacccttggttatggaagtcgtgccagtggtccgattcctgctttctctactttaatatttgaagtagagttgctgagtattgcctgacacggttgggagttagcggttgtgtagtttttcttttactctgtcttcatagccatcacgatatcttctttcgggcattacaatccacagaatcagatagatgattcctcctgaaaaagcggtgaaaatggttgccaaagcataaactatacgcactgtcgatacctcccagccgaaatattcggctattcctgcacatacgccggctaacattctgttattggagcgaagcagtcttttattttccatttattctctagaattaaagttagatatgcaaaaataggaaaaagcaaaatgcatagttaacttatactcttaaaagtacttaaaggaaagtcattgtaattcattttatttgttattttgcagcaaattagggttaaaagtgaacagactcaagatagatacttgtccgttgtgcggcggaaaacagttagaacatgcaataacttgtacagataattatgcttcgggcgaaaagttcgaggtgatgcggtgcacccgttgcggctttctttttacacaagaagtgccggtagaggcggaaataggcaggtattatgaaactcccgattatatttcacacagcgataccaataaaggcttgatgaaccgggtgtatcatcaggttcgcaagtatatgttatcccgtaaggccaaactgattaaacgtacgtccgggctgagtaaaggcagtctgctggatatcggaaccggtacgggatactttagtaatgctatgaaggaacgcggctggcgagtgcgggcgatagagaagaatgtcaaagcgcgtgcgtttgccaaagagcattttgacttagatgtagatgcggaagatgcgttggccggatatgctgatcattcgtttgatgcaattaccctgtggcatgtgatggaacatttggaacacctgaatgaaacttgggaaaggttggcagccttgttgaaggacagaggggtgctgattgttgcagttcccaatccatcttcgtatgatgcggtgaagtataaggaatggtgggctgcgtatgacgttccccgtcatttatggcatttcacaccgtctgtgatgcaacaattcggggtgaagcatggttttaaacttgccgaacagcatccgatgccattcgatgccttctatgtttctatgttgacagagaaatataaaggtagtcgtttttcttttctgaaaggaatgtggacgggattgttggcttggtttagcactttggccagaaaggggcgcagtagttcaatgatttatgtattcagaaagaagtaattatgggaaagaaatcgacgtcttttttcgatatgcagttcattacttccagcattagcactatgttggtgttgcttttattgggtatggtggtcttctttgtgttgtcggccaataatctttctaagtatgttcgtgagaatatcagtttctccgtccttgttagcgatgacatgaaggaagcagatgccattaagttccaaaagaagttgaatgcagagcctttcgttaaggaaacttattatatttctaaagagcaagctttaaaagagcagacagaggcgatgggaacagaccctgctgagtttttggggtataatccctttacggcttccattgagataaagttgaatgcagattatgccaattcggatagtatagcctggattgaagagaagattatggctaacaagaaggtgatggagattaattatccgcaagatttgctggatgcggtgaatagtaatattcgtcgaatcagcttcttgttgcttggacttgctgcacttcttacattgatttcctttgcattgataaacaataccatacgtcttactatatattctaaacgctttttaattcataccatgaaactggtaggagcgagttggggatttattcggaaacctttcttggttcggaatatatggattggtgtattggcggctgtaatggctgatgcggcattaatcgggatggcttatgcacttgtgagatatgaacccgaattgatagagattattacccccatgacgatgttattggtgatgtcgtcagtttttgttttcggtgtgattatcacctttatgtgtgcttatatatcaataaacaaatatttgcgtatgaaagccggtgcgctttattacatctaattaaaaggatatggacaaacagaaatttgcctttgataaaacaaattttatcttactggccataggcatggcagtcgtaattatcggtttcctgttgatgacaggccctagttctacagaagggtattttgagccggatattttcagtgtacgtcgaatcaaggtggcgcctgctgtatgtttttttggttttatttttatgatatatggtattgtgcgaaagccgaaactaacgaaagaataaaaaagtaaaagtgtatggaatggtttgaggcattaatccttggtttgcttcaaggattgacagagtatttgccggtcagcagcagtggtcatttggctatcggatcggctttgtttggaatacaaggtgaagataatctgacatttaccatagcagtgcatgtggcaactgtgttgagtacgttggttattttgtggaaagaaattgactggattttccgtggattgtttaagtgtgagatgaatgcggaaacaaagtatgtattgaatattcttgtttctatgatacctatcggaatcgtaggggtgttctttaaagattatgtagaggaaatctttggctcagggttgctgattgtgggctgtatgttattggtaacggctttattgcttactttttcttactatgcaaaacctcgtgtgaaagagaatattagtatgcgtgatgcgtttatcataggtttggctcaggcttgtgctgtgttgccgggattatcccgttcgggtagtaccattgctaccggcttgttgctgggagacaataaagctaaactggcacaattctcttttctgatggtgattcctcccattttgggtgaggcgttgctggatggaatgaagatagtgaaaggagctgcagcaggaacaacggacatttcggttttgtcgttggtggtaggttttgtagctgcttttgcttcgggttgtatcgcttgcaagtggatgattaatatagtgaagaagggtaagttgatttattttgctatctattgtgccattgtaggagcaattacgatagcttgctcattggcagcataaccgtaggggtaagaagcatgaattttaaagaaggagaagttttatattttgataaaccgctgaagtggacttcttttgcagtggtcaataagataagatatcacatttgccgcaagttgggtgtgaagaagttgaaggtagggcatgcaggaacgttggatcctttggctacaggcgttatgattatttgcacgggcaaagcaacaaagcggattgaagagttccaatatcatactaaggagtatgtggctacgctgcaactgggtgctaccactccttcttatgatttagaaaaagaaatagatgccacttatcccacggagcatatcacccgtgaattggtggaagaaacattgaaacgtttcataggcagtattgagcagataccgcctgctttttcggcttgtaagattgacggtgagcgtgcctacgatcttgcccgaaagggagaggaggtaaatctgaaacctaaaacgctggtaatagacgagatagagttgttggagtgtaatcttcctgagataaaaatcagggtagtttgcagtaagggaacttatatccgtgcgttggctcgtgacattggtgaagctctgaatagcggtgcacaccttataggtttgattcgtacccgtgtgggtgaagtaaaactggaggactgtatgcaagtggaggattttcccgaatggcttgaccgacaagaaattgaagttataaacgaataaggagagataagatgaaactgtcgcaatttaaatttaaactgccggaagaaaagatagctttgcatccggccaagtacagagatgagtcgcgtctgatggttgttcacaaatcaacaggccaaatcgagcacaaggtattcaaggatatcttggagtattttgatgataaagatgtgtttatctttaatgatacgaaagtcttccctgcgcgtttgtatggaaataaagagaaaaccggtgcacgtatcgaggtttttttgttgcgtgaactgaatgaggagcttcgcttgtgggatgtattggtagatccggcacgtaagatccgtattggtaataagttgtattttggtgatgacgactctatggtggccgaagttattgataataccacttctcgcggacgtactttgcgattcctttatgacggtcctcacgatgagtttaagaaagctctttatgctttgggtgaggctccgctgcccagtttcatccgtcgtccggtagaagaagaagatgcagaacgtttccagaccatttttgctaaaaatgaaggtgcggtaacagctccgacggcaggacttcattttagccgtgagttgatgaaacgtatggaaatcaagggaatagatttcgcttatgtgacaatgcatgccggattgggtaatttccgcgaaattgatgtggaagatcttaccaagcataagatggattctgaacagatgtttgttgatgctaaagcttgtaatattgtcaatcaggcaaaagatgagaacagacgtgtttgtgcggtaggtactactgtgatgcgtgcaatagaaacggctgtcggtacagacgggcatctcaaggaattcgaaggctggacaaataagtttatttttcctccatacgatttttcggtggccaacagcatggtcactaacttccacatgccgctttccacattactgatgctggtggctgcctatggtggttatgatttggttatggaagcttataacactgctttgaaggaagattatcgttttggtacgtatggtgatgctatgctgattttagataaatagcaagataagtaaaaggcactgtgtatgaaggtttatttagggcttggaactaatttaggcgataaggaagccaatttgcatacggctgtgcaacaaataaatatgcggatagggaaggtgacttccctttccgctttttatgttactgctccttggggcttctcttccgagcattctttcctgaatgctgcctgttgtgtcgatacttctctttctccctttgaagttttagaaaaaactcagtcgatagagcgtgatttaggtcgcacaaagaagtctgttgatggtaactatagtgaccgtttaattgatattgacctcttattatatggtgatttaatattggatacacctgctttgactctgcctcatccccttatgcatgaacggcgttttgtaatggaaccattggcagagatagcacccaaagtggtgcatccggtattaaagcaaacaatggaatatctgaagcaacagcaatagactttgcattaccaatcatattttcagtgttatgccacaaatcgtcgtgtcaccttgaatgccgacatcattctgactatcagataactgatgaagaaggcagccacagctatacagataatatgaaccactgccggaactcctttaggcaaccatgcggcaaacatatcataccctatttgcacaaagacaaaatggcaaaggtaaataccgaaggtcattgaggccagtcgggaaagggcaggagagtagggcactttgattctctgcataatgacaaacacagggaaggtcatcataaatacattgatgccgccgaatagccatacgatttccaaataggcataattgcccggaaagtattcctgcatgataaggtaacctccaaatgtaatggcatatcctgctgcaaacataggtataccgatggagagggttttcttccaactccattgcaaagggtatttcaccagataataagctaatatcagataaccgatgaagcctgacacatagtagaaggagccgaaagcgttccagtcacacacccccagaatatccatattgccccaattaccgatgtatcccaatgcgggagctgccattttcagatagggaagaaataaggagattccccaaatacgaaggaacagcttgacatctttttgtgaggctcggtctagccatgccccgaaaacgggtataacgaaatacagccctatcagcatataaagataccaaaggggcgtggtgtcgtagttgaaattaaagataaaggtgcaaatcttcgtcactgtcatttgccacgtgaaggtggacatgtcgatggtggggttgtcagtggtggcaatatagttcaggtatacgaagtacagcaccggtagcatgaccgaccagaaaatgaggggtggcacaatgcgcccgatgcgtttccggtagaactcgttcatgctgctgcggaggggaaaaagcaaaactccggtcatcatgacgaacagaggtacgcagcttcgcactgcgcttcccgcagcacacccttgcaggaaagtgctgcggtctgtatcaaagcgcgccacaaaagggtcgcaacaatgtgcaaatacgaccagaaaacaggcgataacacgtaacaggtctatccagcctatggtttcttttctttttaattccatctgtggttaagtgttttatacggtaatattgagtaaaatttctcccttggtattcaatacctttattctcaattcgcctttctttttctcgataaccatcactgtggcactgtccatatcatatcctccgccgacaatgacaggaaaattattatccagttttcctttcggatgataggcatattcgtgggtatgtgcattcaggctgacgttgaaaggagcttttttcagtaatggtttccataagtcttcgcaaaggttcttatagtcgtttccatataaagggatatgatgaatcaggattcgcttttcggcttttttgaactctctggatgccagttcttttttcaggaagtccacttgctcgttacgcagccgggtaaagtcgttcaaaccataatacacccagtggtcatccggtttgtcttcaccacagtccagcatcacgatgcgtgtgtcgccccaattgaaggaaccgtaggttttatttcctacataatcataatggtcacgcagaccgatggaataggcattgcgtatttcatggttgccacgcatgaagaaagtaggtacgcagtctccgtgtactccttcagtcagttcactgataaaggcagttgcctgttcgtggctggcaggatcgtctacacagtcaccgttgaatacaacaaaatcgtaatcgatgtcctgaatctgctgacataaagcgcggaaagttttgggatgttggtgtaagtcattaaatactacggcagtaaagttatcactgtcgggggcaggaagagtgaattcgctgaattccgattgggcggtattgccgaatactttgttataagcctgatagcgcagaatttcttgtgagcagacgcggtaatagtacttctgtcccggctgtaaaccgtccaggcggattttatgcagtttgttgttacacaccgcttgtccgtccataatggtgcgcgcacgttgcagttgggttgagtcggttccgtattccacccagcagtaggcaggtacggtagtctcccacatcacggtgattccgtttcctaccggattctgcaaataaggttttgtacggaatatcttttctgccttttctgctgtgcggagggttaccaccaacgggcggtggtcggatgctaccggttcgtcctgcactttggaggagatggcggcaaatcctttggcattattttttagggtaacaatatagtcgagtgtctcttccggtttgggggcgggaaaagtgggtactttcggattggaaagtatctgaaaatccttttgcaaccctttaatgaaatcggattgaggttcggcattcatatctccggcaaggaagaaaggttttttggcggaagcagcgaaattctttatcatttccagtgatgtcattcggtcttcctccgtcaacgagagatgggtgcaacaatagatatagtcttcaaattcggccataatgagtgcacgggcctcttcacgtcccggcagagccatggtctggatgcggataggagtttgtttggtgagtagtccgatgccatatttccccccgtcgtaatcaatggctggagcaaagtaggcgtgcatttgcgtgcgttcggctatttcgccgagcacgtatgtttttccgctgcggttggtcatactgtccagttcctggatggctacggcatcggggcaggcattatttatcacattggccacacgttggaaattctgtacgttatccatgccgttggcatttttgatattgtaagtcattaaccttaaggtattttgagcttgtgcggacgaaagcgtcagtaaggctgtaacagccagaaagagtgtctttttcatgttttatccggtattatttaaattgaaacgcttcaaaggtaaggataaaaaatattattcggctactcgtttatattatttttgagacattctgtatccattggaagttatttttatcttttcaatgcaggaagtaagttttaaggacttacaacttcggtttcattaggataaaataaaggctgtcatgagagaatcccgtcagattcttccgtatcggtcaatacttttttcctgccggtgaagcctgtgtcattcggatgctgctcactactcccgctccaatggcaaataatatggcaagaaacaaacaggcttgtgcgcggtctccttcgggaaacattcgaaagagcaatgccaccagggtggtgcctaatgtctgtcccaataaccgtgccgttcccagcataccgcttgcgccaccgcttcgccgggtgggtgcggaagaaacaatggtgacattattcggagtctggaacagtccgaagcccataccgcagagagccatccgccatacaatattccaactttcgggatgctcgggaagaatatagagtgagaaaagtcctgctgcaaatacggccattcccattcctcccaacagtcccggatgcacacgctctacaagtcgtccggcaagaggggctgtcaatatcgtggccaaaggccagggagtcagcaacagtccgatttcgacggcattataatgcagtacattctgcatgaagaaaggcaaggacaccattgccaacatttgtgccgtgaatgatgtgatggatgtaccgatggagagtgcaaagatgggaatacgcattaagtcgaccggcaggatgggggcttcctgcttgagttgccggcggataaaaaaggttcctatgatggcgagaagcgcaatttgcagaccgatgaagtcacggttttcagaatgcgcaaagccctccaaagaataaatcagcagtccgaaagtcagtgcattggctattgcactgattttatcgaacttatgtcgtttttcggcaggaggattgtgtggcaataaacgatggccgatgacaagcgctgccagtcctaacgggatgttgatgacaaacagccagtgccagcttcccaacgccagaatgctgccggcgatggatggtccggcggctgccgaaactgcaacgaccatggcattcactcccatgccgcgacctaatatttgtggcggataaatcagtcggataagtgccgtgttgacactcattacacatgcggctccgaatccttggatgacgcgtgccgccgtcagcatccagaatgaagtggataaggtgcaggcaagtgatgcaccgacaaaaatggaaatgccgataaggaatatccgcctatatccatagatatcgcccaatgaggcgaaagaaagcagtgtcatggtgatgaccaattggtaagcattaacaatccaaatggccgttgagggtgttacatcgaaatcgtgtgctagcgtaggcagggcgatattcataattgtcccatccaaaaccgacatcatgatagccagcaatacagctatcacagctaaatattgtcgtggtataaatgcaatcttttctttattcatgttgcaaaattaacgcaaatcggacagactcggtttaatttcttctaaataattaagaaacctgtgttaaagagttgctaaatagtatgcggcttggagaataatgcttatctttgcgaccgttaaaaacagtggagagatttgagtagcttgcaaccacagaaaaaaatgctaaaaaatacattgactttcttccgtataattcctactctgatttaattcccccgtttgataacgaattaacttttagttttaaattcttaattttatattcaaaatgggatacttattcacatccgaatcggtgtcagaaggacaccccgacaaagtggccgatcagatatcggacgctgtgcttgacaaactgttggcattcgaccccagttcgaaagtagcttgcgaaaccctggtgactaccggacaggtagtactggcaggagaggtgaaaacaaaagcgtatgtagacttacaacgcattgcacgtgaggtaattaaccgtatcggttataccaaaagcgaatatatgtttgaaggaaattcatgtggcgtgttctcggctattcacgagcaaagtgcagacattaatcgtggtgtagaacgcgaagatccgatgaatcagggtgccggagaccagggaatgatgttcggttatgctaccaacgaaacagaaaactatatgccgctgtcactcgacctggcgcataaactgctgatggtcttggctgaaattcgtcgtgaaggaaaggtaatgacttacctccgtcccgatgcaaagagtcaggtgactatcgaatatgatgataacggaaagcctgtccgtatcgataccattgtggtttctacccagcacgatgagttcgtggctccggctgatgcctctaaagaagctcagttgaaagctgatgaagagatgctggcgaagattcgcaaagatgtaattgaaatcctgatgccccgtgtcattgcagagattcataatgaagacgttctggctctgttcaatgaccggatagtttatcatgtgaatcctaccggtaaattcgttatcggcggtcctcacggggataccggtttgacaggacgtaagattatcgttgatacttacggtggaaaaggtgctcacggtggtggtgctttctccggtaaagaccccagcaaggtagaccgtagtgctgcatacgctgcccgtcatattgccaagaatatggtggcagccggcgtagccgatgaaatgctggttcaggtttcgtatgccatcggtgtggctcgtcccatcaatatctatgtaaacacttacggccgtagcaatgtgaaaatgaccgatggtgaaatagcccaaaaaatagacgaactgttcgatcttcgtccgaaggctatcgaagaacgtttaaaactgcgcaatccgatttatgaagaaacagcttcttacggacacatgggacgtgaacccaaagtagtgaccaagacatatgaatctatgtatcatgaagcaaagacaatggaagtggaattgtttacttgggaaaagctggattatgtggataagataaaggaagcattcggtttataaaagccggattcggatattgtgtgttttcgggcggattcattccgcccgaaaatataagagtttacaagaatgaatgatataaaaaacgtatgtgtatatagtgcgtccagcacaaagatagcaaaagaatattttgatgctgccgagaaattggggcgtcttttggcggaaaagcgaatcaatctgattaatggtgcaggctgtatcggcttgatggctgcaacctccgatgcggcattggctgccggcggcactgtgaccggtgttatccctcattttatggtagaacagggatggcatcacaccggactcaccaagctgattgaaaccgaaaccatgcacgagcgcaaacgaatgatggccgacctgtcggatggagtgattgctttgccgggtggttgcggcaccttggaggaattacttgaaatcattacttggaagcaattagggctctatctcaatcccattgtcatcttgaatatcaacggcttctatgactccctgttggatatgttgcaaagagcagtggacgaaaactttatgcgaaaagagcatagtgccatttggaaagtagcttctgaacccgaagaggctgtaaatttactctatacaacacctgtctggaacaaagaaatccgtaaatttgcagcgatatgagcgaaaattgtcatcccggaatagaatatctgcttcagctgtatgccgaagaacagagccgtgtagatacggctttgacacaaaaggtgcatcatgtcaccgttcaggaagggatgaaaggagaaccaataccctatcaactgcggtcggattggatggtgaccagtgttttgtttctgtgtttcattttggtatcctatgttcttgcccatggaaagaaacatctggagcaacagtttaagaatttttccttgtcgaaagagcgtgccagtttatttgatgataccactgcctcggatgtccgttatacattggttttgatattccaaacctgtatccttgccggtttctgtgtatatgattatttttcggaccacgatttgcttttattccgcgttgtaccccactatctgctattgagcactttcatcggatgtgtggtcattttcttgttgtttaagtggttggcgtataactttgtaaattggatattctttaacaaaaccaagaatatgatttggatagagtcatattttaatgtgataatcggagccggttttttgctttttcccattgtccttttgattgtttattttgatttatcgccgcaacttgcaccttattttatcggttttgttataataattgctaaaatattgctgttttataagtgcattcataactttttcaacagaatttatggcgttctccatttaattctgtacttttgtgcgctagaaattctccctgacttgatactgtggaggggaatagttatagcgaacaacattttggttttaaatttttagtacattgaaaataaaaaaagtcctcgtttctcagcccaaaccgacttctgagaagtcgccttattacgatatagctgagaagtacggtgtgaaaatcgattttcgcccgttcatcaaagttgagagcttgtcggccaaagagttcagacaacaaaaagtctctattcttgatcatacagcagtgatatttacttcaagacacgctattgatcattttttcggtctgtgtgccgagttgcgtgttaccatacccgagacaatgaagtatttttgtacttctgaaacaattgctttgtatatacagaaatatgtgcaatatcgtaaacgcaaagtattctttggggcaaccggtaaatttgcagatttgcttccgtctattatcaaacataacacagagaagtatcttgttccgatgtcggatgtgcataatgacgaaattagaaacgcattggatgctaagaagattcaacataccgaggtagtgatgtatcgcacagtaagcaacgatttcactcccgaagaaagttttgattatgacatgttgctgttcttcagtcctgccggaatcaactcgttgatgaaaaatttccctgaattcgatcaacaagagattgccatcggatgttttggtcctgcaacagctaaagcggtaaaagatgccggtttgcgccttgacctggaagctcccactgtagaagctccttcaatgacggctgcattggatatgtttatccgtgaacgtaacaaagattaaattttttagtttatagcccgaaatcgggggttttgtatcaaaaagttataactttgtgattcgaaacccccgatttctttttatatggaaaagtaaaactatggcagaatatacacttagcaaagcagaacgattgaatagcaaggcgatgatagaacgtctttttgccggtggaaacaagtcttttccggctttccccctgcgtgtggtgtatatgtggttggatgcttcggaaggggaggcgcctgtttctattttgataagtgttcccaagaaacgctttaaacgggcagtgaaacgcaatttggtgaagcgccgggtacgggaagcgtaccgcaagaacaaacagctattgacggatgcactggttgccaagaataaaagactggttttagcctttatatggttggacaatgagattcatccttcggccgagatagaagggaaagtgaagagattgctgtttcatataatggaaaaaatagaatgaaaaagctgctttcacgtcttctgttactccctatttatttctacagagggtatatttctcccatgactccgccttcctgtcgttttgttcctacttgttccgaatatgctatcgaggcgattaagaaacacggtccttttaaaggattgtatctggccgttcgtcgtttgttgcgttgccatccgtggggtggttcgggatacgaccctgttccttaaattatatcatttatgctacttgatattcacagtcattatgcagctccgatagcgggcgagagcatttggaatgtagaacctgccgttttctctcctattgaggggaattattattctgtgggcattcatccgtggaaggcaggagcggtgcgcgaagaagagtggaggctgttgcgtgaagcggcggagcatccggctgtgctggctatcggtgaggcaggtcttgataaactgatgccgataaaaccggcacttcaaatggcagttttcgagaagcagattttgttggcggaagcgatgggaaaacccttgattattcattgtgtgaaagcctttaacgagttggtggaactgaaaaggaaattccgtccgaacgtgccgtgggtggtacacggcttccgtaataatgtgaatatagcccggatgttgctgcgtgaggatattcgtctttcgataggagagaagtatcaactacctgtgttgcaggagattcctttggagtgcttgctgaccgagacggatgaaagccggatgcccgtccgtgacatcataaagagtattgccgaagtgcggcgggtgaccgcagaagagctttccatgcagatagccgaaaatgcgggaaaaatcttttttcagcgataagagttgtttcttcagataaagagtcgtacttttgtggcattaaagtataaatcaaacaattaaatagattaatcattcgatgaattttgtagaagaattaacatggcgtggaatggtgcacacaatgatgccgggcaccgaggagttattggctaaagaacaagttacagcatatctgggcatcgaccctactgctgactctttgcatatcggccacttgtgtggtgtgatgatgctgcgtcatttccagcgttgcggccataagccgttggctcttgtaggtggtgcaaccggtatgatcggcgacccttccggtaaatcgcaggaacgtaatctgctgacagaagagactttgcgtcacaacgtagcttgcatcaagaagcagctggccaagttcttggactttgagagcgatgctcccaacaaagccgaattggtgaataactatgattggatgaaggattttactttccttgattttgcccgtgaggtaggtaagcatatcacagtgaactatatgatggctaaggattctgtacagaaacgtttgaacggtgaagcccgtgacggtttgtcatttacagaatttacttaccagctgttgcagggttatgacttcctgcacttatacgaaacaaaaggctgtaaacttcagatgggtggctcagaccagtggggtaacattactaccggtgccgagttgatccgccgtaccaacggtggcgaagtatttgctttgacttgtccgttgattacaaaggccgatggtggcaagttcggtaagactgaatcaggtaacatctggttggatccccgttatacttctccttacaaattctaccagttctggttgaatgtaagtgatgaggacgctgcccgctacatcaaaatctttacttcactgagtcaggaagaagtggaagcattgacggcagaacatgccgaagctccacatttgcgtgtattgcagaagcgtctggccaaggaagtgactgttatggttcactcggaagaagactacaatgcggctgtcgaggcatcaggcattctgtttggtaatgctacttcggaggcattgaagaaactggatgaagacacgttgctggccgtattcgaaggtgttccccagtttgaggtatcacgtgatgcattggcagaaggtgtgaaagcggtagatttattcgtcgataacgctgctgtcttcgcttcaaaaggtgagatgcgtaagctggttcaaggtggaggcgtttcgctgaataaagagaaattaaatgcctttgaccaagtaatcactactgccgacctgctggatgaaaaatacctgttggttcaacgcggaaagaagaattattatctggtgattgccaaataaggaaagagagattctttgtgatagatataagaacggaaggagagaacatacacattctctccttccacttttttataacttcatattcgcactttatttcccgtctatctccttcagcagttcatccacagccactttcaactgggtatcttcgccctgaacaactgtctccggtgcattggctaccttgatatccggttccaactgtgtattctccagataacttccgtccggcaattgataaccgatgatagggataccgaataccaatgaagggtcttgaagcgtttcccacgatacactcgtcatggtgcccggtacaggcatacccaccagtttgcccagtttttgatgactgtaaacccacggagtaccgtgtgcattactataattggcttcgcattgcagcatgatggacggtttgttccaacgacgactcggcatatcacatgcttcacgtccacgtaccacctgagtgaaatacttcttaccgctgaatagtatctctatatcctcgtgcaagcggcctccgccattgaagcgagtgtcgatgacaattccttcgcgatcattgtatttacccaagatgtccgagtaaacagaacggaaactgtcatcacccatcgactggatatgtacataacctaaacgtccgccggaccatttatccacatcggcggcacgctgtttcacccagcgtgtgtagagcagttcgttgaatgcaccgttgctgataggcatcactacttcttcccagcgttctttggtctgaggattatagagagataccagcgtcttcttccggcttaaattattgaagagtgccgcatagtctgcttcggcagtaatttcttttccgtttattttctctacaatatctccggcttttactttggagcgggcatggtcgaacggtcctttttccaccacttcggaaatgagcaaccccttgccgtcatagctccagtcgtacagcagtcccaggttggctgtggcatctccctttagattggaataataacgtcctccggtgtgtgacacattgagttcgcccaaccattcgctcagcatctcggcaaaatcatagttattgctgatatgcggcaggaatttgcgataagcggcactcatggcatcccagtctattccatgcatattgagattgtagaaacgcttctgatgctgtttatagacatgattgaacatatattcgcgttcggctgccaagtccatcgtcatatctgccttatagcttatgggctttaatgtttcggaagcggcattcatcttctgcatggtgcttccgcccaaaacaaagatttcttttccttccttatccatttccatgtttgtccagccggtattcatcttgtggagcaacttggtatccttttttctgaggtccagtttccaaaggtcgaatccgccttcaaaagcagaaagataataaagcttctcaccgtctttggagatgatggcgctgcttaagttcgatgagttgggagtgaggcgcacaatgcggtcttccatattcttcagttcgaccacaatgtcctttactttctcttctttggtatcttcctttttatccttatctttttgcttatctttcttcgattcgtcttctttggtcttatcctgttccttttccagttctttctgcaactcgtagtcttctttgctcaagcggaacttgtcgtatgcatcctgattgaggaataccagcatgacatcgttcaatgacccccatgaagcgtgattgcgcatgccatagcgttcggtgatgaacagaatcgcattgccgtcgagcacccaacggggcgaaccgctggtgtaaccgctgttagtgatattaatgatatctcctccctgtgcattgactaagccgatatccgaatatgggtcatgcttgtttccgataaactctaatgtaaaccatttgccatcgggcgaccaggcataatcaaagcctcctccggtgctataccatgtggaaccgtctgtcacctggcgtactttttttgtatcgagattcatcaccatcaagcggttacggtcttcgataaaggcaagttccttgccgtccggtgaaaaccggggataggcgcgttccaccttggcggatggcagcaatacttcctcttcgataagagtggcattcgggaagttggcttcttccttgcgtgctattttagccagatacaattcccaattaccgtttctctcgctggcgtatgccagtgtgcggttatcgggtgcaaaggttacccctgcttcgcgtgccggggtgtgggtaatctgtttggtagtagtgtaatcagccgaagtgacaaagacttctccgcgtacaatgaatgcaacctgttttccatcgggtgacaccgtggccgaagtagcgcccttggtaaaacttaagtcggctactttgtcctgatcgtcacgtatcaggtttatttttactttttgcggggcggcatttccttgttgggtatagatttcgccatcataagtatagcacaaagttccgttgctgcccatagaaaggaaacgaaccggatgggtcttgaaacttgtcacgggattgacggattgtggggcattgagcgggaacgaatatacattgaaacttcccccgtcacgttcgctcaggaaatagacagtctgattgtccggtgagagaaccggattccggtcttcacctgcatgccgggtaaggttggtatgtttcttgctttgcgtgtcatacatccacacatctctggtgatggaagaggtatgatgtttgcgccattcatcttcaaaaccttttctgtcttgataaagcaaggtttttccggttttatcaaaacatacagcctcggcaggagttcccaacacctgttcggttcgtcctcccttggtcgacactttatatagctcggtcatggccgatgtgggaaacaaggcactgttggcagggtcttgaatagcagcggagaaaagtatgtatttcccgtccggggtaaaagcggaaggcaattccgttgccgaatgagtggtgagccgttttgccggtccgccgtcggcaggcattacaaatacatcgaaatttccgttccggtcactggcgaaagctatctcttttccatcgtgcgaccatataggtgtacattcgtaagaactctgtgtggtgagttgggtggcagtgcctcctttggcgggcaccttataaatatcccctttataacaaaaaacgatttccttcccatccggggaaatctgcacgtcacgcatccagagtggagttcctgcgtaactgttcgctgttgctatgcagcccagcgcaatgcaagctagaagttttttcatcgtatcgaaatcttttaattaggtttacaaagataagcatttgcatattgtagcaaaaaaaagtgcgaaaatatttggactatatagatagaaaaacgtatctttgcaccgctttccaaggaaagcacataatgattggactatggtgtaatggtagcacaacaggttttggttctgtttgtccaggttcgaatcctggtagtccaacaaactacttattaaagataaaagcccatcaaattgcatgtttgacgggcttttgttattccggcccttatcacccatacttagcgagtccgatatgacggagcctgacactatgacatatatacgtgcaggttcatgcgtacgtacgtgtagttcgatacgtatatacgtgtggcctgatgccaccgtatgtgtagcccgatgcgtacgtacacactttacaaaggctcagtttgaaaacttgggggaattagttaaa

SEQ ID NO: 6717 - DNA, 1350 bp, Unknown
  gut microbiota DNA sequence
aaaacaaatagttcaaacatgtttatcatttaacaacatccaattaatatgaaaacaacattaatatctatcttattattctcattttctatttctgtaactgcgcaaacagctgaatatacagaaaaagattctatttccgatttacaatggcaaaatgaattacactgtacattggatggagttcccaagcctttctcatacctgcgtactctatttgaaaataacaaagaggggtatataggaaatctatggatgacttcaaggcgaaatatacaattattaggtgagaaaaacaggaagggcaattggattgtcacgactataaataagattccaaatacttctctcaagccgggagaatttgaaattaaaggcactatatcagataactatgaaggacgagctgtcatgctattaagattcagcaacagtaatcctgacaaagtatgcaaagcagacacggccattgtaacaaatggagagttctactttaaaggtctcccggaagataatttcctttccatcgtgacaataggtaattacccggagaaggtattggcagcagatgtcttcttggaagaaggaacgataaacctgaatttggattcaatctcacatagaagtggaacacttcacaatgattcgctacaggcatatacagcatttaaaacttttgatgaacagaaatcatatatcaaacgcaatatgaacaatgcgataggccgtacttactttatagacctgctaaataattggagtttagaagaattaaaagaatacgtcgcattgtcaaacaacaatgaatatgccaacattccacaaataaaagaagctatgataagccaacaaaccatacaaaatacatttaaggtatgggagtcattcaatggtaagaaatataaagacaatacattcataactctagaagggaataaaacaaagctatctgattacataggaaaacacaaaatactttttatcaatgtctggtattccggttgtggtccatgtattgaagaaacgcccgaattaaaagaaatatatagaaagtacaaaaagaaaggattggaaatcatctctgtatctactgatacttctattagcgcatggaaagaagctgttaagaaattggatgttccttggatacatgttatcatagagagaggttctatgttcccccaagattatgctgttatgggagttcctcatggcattttaataggagaagatggcacaattttagctttaggcaattacttgagaccttcaatacctgtactcgaaaatatattaatgaaaatattagataaataaataatccgactgccgctgtaaaactaaagaaaa

SEQ ID NO: 6718 - DNA, 17416 bp, Unknown
  gut microbiota DNA sequence
tcttccttgtggctctaccatatttttgataacttgccactgtttttcagtctggttagttggatagtagctcataacttattcgagcagagattttcaagttacaaaacaccattaactaactgattgacaaatggatattgattatttcataaaaacagtttcttattaaatctatgaagaaaaacctgcttgctattgcagcatttgctttgttactgacctcgtgtgaaaccaaattggtagaaaaggtagaccttattccgctggcggaaaatgtagaaatccataaaggtgcttttccattaagtaatttacaaagcatacaagtacccgatgagtggaaactcaccgcagacaattttgtgaaagacttgcaaaaaacagcctcgttaaccgtatcgttaactgattcggagggtagtttggtaatcgttaaagacgagtcactttctgccgaagcttatcggctgaatatagagaaaaaccggattaaaatagaagccggcgatatacaaggtgtcaatcatggtttggccagtttactccaactgattatgactgcaaaagatgctcaattaccggtgctcaccatacaggacaagcctgcattcggttacagaggattgatgctggattgtgcccgtcacttctggacggtagatgaattgaaggaaacacttgaccacatggcctttttcaaactcaacacccttcatatgcatctcactgataatcaagcctggcgattatctatggataaatatcccgatttagtaaaagaaggtacctattattatgactttcccgaattgtccggaaaatattatagcaaagaggacttgaaggaaatcgtaacctatgccggaacacggggaattgagattatcccggaagtggatttgcccgggcatagcattgcattgcttgccgcattgcctgagctatcttgtcggggaggaaaattcgaagctactcccgaggaacgtgactggaacaaacgcaaacgtggcaatgaaaatatgatttgtatcggcaatcctcagtcattcgcttttgcggaagatgtaatagatgcacttatcgaaattttcccttcgcaatatatacatttcggaggggatgaagttcctactgatatttgggaaaaatgtcccaaatgtatggcactttacaaacgcgaaggaatgaaatctccgggggaaattcaggattacttcactcgtaaaatgagtgacttgattcgttctaagggtaaaataatgataggctggggtgaaatcaatgacagacatgcagccggtccgaatgatgtattgactatttggagggataatggtgtggaaaagcagaagattgccttggaacatggcatatctgttatcatgtgtcctcaacacggttgctatttcgactgggggtatgccggaaactctacccgtaaagtctatgagtggaatcccgtatcagaaggagtcactgctgaacaacaagcgttgataaaaggaggacaggctgccttgtggactgaacgcatcactactatggaccgtgtggaatggatgctttatccgcgtatctgtgccttgtcggaggtgctatggagtgaaccttctgccagaaattgggatgatttttatcaacgtattactacgttttatcctgttatgaagaaactgggtatcaattattatgaagatgatgccatgaatgaaaaggagtttgttccgtcaaacgaaaagcctgctttggttcgtaatgcacatatcgacaccaatattccgggaaatcctccttaccatgcagaatatgcttttgatggtaaatcgaatactttcttctggggtggaacgtccgtgggaccggagcattattttacaatcgttttaggtgaaccgatgaaagtaaatgaagtgaaagtcataacaggcgattccaaagattatatcaccatggccgatcttttgattagtgaagatggtgagaagtttgtgaaagtaggtaaatttgatgatctgggacaagcatcggctacaccggatgctgccaaaacaataaaagcagtcaagattcaaataaccggccaacatacttgctggccaatcatcaaagaaattatcttgaaatagaagtgctgttactgctaccacccatcctttcaaaaccgacgataaaccgaacgttttgtgaggtggtggtagcacaagcactaccaaaagtactatttgtatatcaaaaatatgcaaggaatcttagacaagtcgggcagttttccctgccactcttttactgtcttggtcttgatatattctccttcacaagtgatattggcagcaatgcacaacttggtttgaggacgacagtttttcagaatatcttccgccatcttattgtttcggtaaggagtttcaataaagagctgcgtttggtcttctgagtaaacgcgctgttccaataccttaatccgcttggctctttcgcccggttcaataggaaggtaaccatggaaagcaaagctctgaccgttaaagcccgaacccatgacagacataataatggaagaaggccctaccaacggaaccactttcagattcttgcgctgggcaatggctaccacatcggcccccgggtcggcaacggcaggacagccggcttcagaaataactcccatagactcgcccgacattaacggtttcaaatagccggaaatgtcttcgggtgaagtatgcttgtttaatggatagaatgtaagtgaatcaatatcaatgctacgctccactttcttcagaaaacgacgggcagaacgcacgtcctcgactataaaatgcttgataccaaggattatttccttgttgtataccggtaatacgttctcaacgggagtgtcgcccaaggtaacgggcaacaggtataatgctgtttccataattctgttcttatcagggcttgaaatcaacttcactcaatatgcggcgataatcggtatcgttcaataaatcatttatggttacgtcgtcatgagtcttcatatattcgtctatcagcaaaatgcccatccatacaccgatacttgccggggttcgctcacctgtcataatcggtataaagggatctttacgaatatagctgcgcacaatcaacggatcggtagcatccagatgtccgttgtccagcataccttgccataaggctgatttgttcttcctgcaccattccgcctctttctcgtcatatcccatctctttctcaaatgattcataacccaatatacgggctactacccaattgatttttcccctgtgcaagatcatatcgagcaaggtacgtccgggtccccaaggcatgggatattcactcaataaataaaaggtgaaacaatccggaacaatgcggtcgggctccatgctgcggcattggtaatcgtagtaaaaacgtttatagaggggatagtcggcccccatatatttatctatgctgaaccctacgatactgtctcctaccactaccgactggttgagagcagaaagttgggcatagaaatgaggaacgggcaaagagggaacttctttcttcaactgcttgaagcctttggtgagtttcttctctatccagcccatatccttgaatttttcttcggcatcctgtatcaataccaataaagtggtatcggcataatactccatcagacggtcgtttatcttattgtcatccacttcgccaatggccagcacatcttctatcaggagcttggtggcttgcggaaaatcagtattcatcttttgcagtgccgaaaggttgttcatagtcacatactcaaacaacaaacggtcataacgggctacttttatattcaattcggcagaatcgctactctttcctccgttccaatggcaagaagaaagagcaacgagacatactaatatgaatataactttgcgtatcatcggtgattatccgtaaatgatatttccgttttcgtctttatattcatccaatcccttttcgtaagttgccatggcacgaaggctcatacccacactggagaaacctccgtcgtggaaaaggttctgcatggtcactttgcgggtgaggtcggagaacattacgatacaataatccgcgcattcatcggcagaagcattgcccagcggagacatacgattggcaaaatcgaacagtttgtccatgcctttcacgcccgaaccggcagtggtcatggtcggtgactgagaaatagtgttcacacgcacatgatgttcacgtccgtagatatatccgaagctgcgtgcaatagattccaataatgcttttgcatcagccatgtcattgtatccgtagaatgtacgctgtgcagctacgtagctcaaagccaagatagaaccgtattctgcaatagcatccagtttcttggctgcctgaatcattttgtggaatgatatggcagaaatatctaaagtcttgcccagcatatcataatcgaggtcatcgtaagtacgttttttacgaacattgggagacataccgatagaatgcaaaacaaaatctatcttgccacccagcacttccattgaacgcttgaatacattttccaaatcttctacactcgtagcatcagcaggaatcacttcgcaatgcagcttgtccgccaaagccgaaacttcacccatacgaactgccaccggagtattggataatgtaatgacagcaccttcctcaacagctttttctgctactttccatgcaatggactgttcatttaatgcaccaaaaataatacctctttttcctttcaacaaattgtaactcatacctatattagtgttaaattagtttgcaaagatacaaacaataaatgaattatgcctcatttttgcacacaaatgcaaaaagaatgcagttttaaaacagtttttcgcctccaaatgttttaaaatagtgaatatacaaaaaagatacggattatgcagacttcattgttcttttacccctaaagaaccgatattctctacacatccgtatctttatatttctatatataccgtttatcccaagaacgaaatcaatacaccggcagctactgccgaaccgattactccagagatattactagccatacaatactgaagtacatgattcttcgggtcatacttcaatgctatttcattggccacacggcttgccatcggcacagcactcaggccacatgcaccaatcaacggatttatctttttcttggtaaacagattgaatatcttcacaaaaagaataccaccggaaatagacagggcaaatgccaggaaaccgccaatcacgatgccgatggttgtccagttgaggaatgcttcggtagtcatagtagcgcccaccgaaagtcccagaaaaatggtggcggcattcatgatgctgtttgatgccgcatcgaacaaacgcgaggtatcgctgccaatctctttcaccaaattaccaaacatcagcataccaatcaaaggcactgcactcggtacgaacaaggccacgactgtagtaacgacaatcgggaaaagaatcttcagcacacgcaggtttttgatttctgtctttgaaggatatttcttttcttgctctttcatattgatactcaattccttcttggtacaccacagtttgaccaccaaaggaatgataaccggaaccaaagccatataagaataagctgcaatggcaatgggacctaacagatgaggagccagcttgatggtggtaaagatagctgtcggaccgtcagcaccaccgataatacccagtgaagcagcttccttcggtgtaaagcccatcaaaatggctaccagcaatacggtgaaaatgcccaactgtgcagctgcaccgaaaatagagagccgcaggttacgaagcatcggaccaaaatccgtcagagcacccacacccataaaaataataggaggcaggaagcctgtctttatcaacatatagtagatgaagttcatcaaaccgagatcatgggcaatttcatgcaacggcatctcccaaatattcttcatcacgccattcaccattaccatgccgttttcatcggcttggactacgcccatttcacctccggggaagttggccagcaatactccgaaagcaatcggaatcagcaataacggctcatactttttcttaatacccagataaagcaagatgaacgcaatggcatacattatcaggaactgcggttcggcaataatattgctgaaagcagtcatttcatatagtcttgcaaatatatcttccattataatatcttcattaatacgtcatcttccgacacagaatcacccgaatttacacaaatggcagtgatggttccgtcatattcggcacgaatcgcattatatgtcttcatagcctctacataacagataacttcgccttttgccactttatcacctaccttcttcggggtttcctgtgcattctttaccaagaagaattttccttccaacggagaaaggatatcttttccttcgcccaccggagcaacagtttgagccgccggagtacctcctgcagcagcattgagggtagcagggtctacggcaccgtaagctactgtgacacgataaggttgaccgtttacatctaccgtcaatacctttgttttgttctctgcttcgacaggagccgttgcattggctttttcttcccggcgtttcttcacatccgccaagaagtcttcctttgcctttccactcttataagcctcatactgagccggatgcatggcatattcaaagagttcttcatcgtcctgacccttatcccattgcttttcgagcatcatcttacgatatttatccaattggtcgggataattatcctgtggattaccatcaaagaacttacgaccttcgcgttctgccttttctataatttcaggagccaatttgcccggcagacggccggctttgcccaaaatcatatcccaaatatcatcggcaatcatgccccagcgttctttacccttttccatggccattacgttcatcatggcaaggtttttcacatactggctgaacggagtcaccaaaggaggataaccgacacgtggccatacatatgccacttcattgaagagttttatcaataactcgtcctgagtcataaacggcaaattgcgtttcgccttatacttgttgatagattcaagatttgtttcgagatcggccatcaagcttcccatcatacctcccggaagtcccggagcaatcagcaaggagttcatcagacggttcttcgggctgatatatagtccgaggaagtcatccataaattcctgaataagagaacgcactttcatgtacgcctccatattgatttcgggcactttgaaaccggcatccttcagcatggcctgcacactgataagatcggcatgtcccgtgccccatgacaacggctccatgccaacatcgatatagtcgcaacccgcctgacatacttccaatatagaagccatgttgaaaccgggtcctgcgtgagagtgatattggatggggatattttttattttctttattcctgctactattttacccagtgaaacaggacgtccgatacctgccatatccttgatacagatttcatccgctccggcctcgataagctgttgggccatgtttacataatattccacggtatgtaccggagaaaaagtgatgcatagggagcattgtgaaatcatgccggcatcatgggcataaccgatagaggggataatattgcgaacatcattcaaaccgcaaaaagtacgggtaatatctgttccttgcgcgtgttttactttatagaataacttgcggacatctgccggaacgggactcattcgaagaccattcaaagcacggtccaacatgtgtgtctgaatacctgcctcgtggaagggtttggtccactcgcgcactgctttattcggattctcgccaaacaataaatttacctgttcaaaaccaccgccatttgtttctacacgtgcaaaacaacccatttcaataatggccggggcaacttttaccaactggtctacgcggggcacatacttgcctgcgctctgccacatatcgcggaagaccagactaaatttcacttctctttccattttccttaaatgtgtttttcttttggattatagcttctcaatttttatcacctgacctttacctgctgtcaaaatctctactgccgccttaatagcatccatagctcctgcatcggttgtaggagctacagtaggcacttttctgggagcttcttcgggagctaccttgttgacaatagtaatgaggtacttgctcagatagataacaatgagtagtatgacaaagacagtagccattccaactaccatcagcatcaatccgactcctatgttctccataaatctagtgttattaatagtacttactgcacttataggttattcaaagcctaaaaagtgctcaaatttaggcatttcggttttatttttataataaaggggttgaaaaatatgcaaaattagtagaaaagaagaagatacacgaagaaagaaagcgttccaaaaacctaaaacagccatcaactcaggaaaaaacagcactttggtctgctgtaagggcagattgaatctgcccgatgacattacgaagtccttaaaaaagaatttcattcagcatcttgcgctttttttcaacaggttcgtcttcagcgtatcctacaggaatcaacacagccagctctatatattcgggcaatcccaaaacagtgctgcactgagaagcatcgaaattacaaacccagcaagtacccaaaccctgctcggtagcagccagacagagatgttccaccgcaatagctatatcaatatctgcatgatctttattgtcggcacgacgatgccaagactcttcatggtttgtgcaagccacaatgatacagggagctgtggcaagccactcacgcttatagcattgctgcaacgcctttaatgtaggttcatctgtgactattttaaaccgccacggttggaaattaactgccgagggagccaagcgtacacactccatgatatactccaatttttctatctcaaccgaacgaccggcatatttgcgggcagaatagcgcgcttttactaattctagaaagttcataagcattattattagtttgcagacaaaaatactaactttgcaccgataaaagaaatacaaatatgaagaaacttgtgatatttgatttagacggcacattgctgaatacaatagctgatttggctgccgctaccaaccaagctttacagtactatggctatcccattcatgacacggatgcctaccgtttctttgtaggaaacggaatcaacaaactgtttgaacgagcattgcccgaaaacgaaagaagcgaagaaaatattttaaaaatccgttctcagtttgtcccttattacgataaacataacgcggattttagtcgtccctatccgggtatagcagcactattgctggctttacaaaaagacggaagaaaaatagctgtggcgtccaacaaatatcaagctgctacacggaaactgattgcacactatttccccgaaataaattttgtggaagtattgggacaaagggaaggaatacctgccaagccggacccttctattgtaaatgatatcattgccacagccggagtcaccaaagaagaagtgctgtatgtaggagattccaatgtcgatatgcaaacggcacacaatgccggagtcactgccgtgggagtggcttggggattcagaccgcgaacagaacttgaagctcttcatcccgcacacatcatcgaaaaagcagaggaactgattccattgcttgattgattaggacggaaatatatacaaacagcagatatagtgaaaacatttcatcaaagaaccatcaggtatgtgataaaaggtttgcgttatctggcaacggagattgactctgagagactgaaaataaacggtttctactccgactggaccatgccgactttccataatacggttcttgctctacgcttttatgatagtcatgatttatccatacctgccgggggctgattccggtgtgttccaagggatttccgtatttgtcggcctgattatctcactcggttcgagtactgtcatcggtaatttcattgaaggctttatcactacttatataaggccttcaaactgggagaccgtatcaagttgaacgagacaacaggaaatgtggtgaaaaaaaacggctttcgtaacccgaatccgtacatcgaaatcggcaagaacatacggactaatcattcattcggaagtaaccatcggctatgatgcaccttggaggaaagtacatcagttacttattgatgctactttggccactccggaaatacaggccgatccggaaccatttgtactgaaaacatcattaagtgattggtatccggtttatcaggttaatgcctatataaaagatgcagacaaaatggccgccatttattctgttctacaccaaaacatacaggattacttcaataaggcaggcattgagattatgtctcctcactatattgccacaagagacggcaatgaaataaccatccctaaagagacagccgaagaataaaatgaacaattattcgttttttacgtttttatagataaatagtataaactttaaaagcctaatttatgcctgttatttataaattcttatttccctcaaaaccggacagcacagccatgtcattactattattggcattacgcattttattcggtatattattaatgtctcacggagtacaaaaatgggcaaacttcgatgccatgagtgaaagtttcccggatcctttgggagtaggaagccaaatgtctctcattttggccatttttggcgaactggcctgttcactggcttttatcttcggattcctttaccgtcttgctatgattcctatgattttcacaatgggcatggcattttttgtaattcacggcaatgacccgttctctgtcaaagaactggcatttatctatcttgtggtatttgttctgatgtacatagccgggcccggaaagtattctatcgatcactttatcgctaaagctatatcgaaaaccaacagataagtattaatcaatatgctttaaaaagcgtctgatatcactttccaaccttttataaagcggagattctttataactagtatgcttgcggagtactatatcaactcctagctgacgacgctgatagcttgtcagctcattatggaactgcatatcgtgctctgcaagttctttaatttccgcctcacgctcacgacgaagaacattacaaacaggcgtcaacagtttcatcactacactatccataatatgatgcccctgaataaacatataagtattatccggatatactcccaattgagcgaactcctctttcattgcctctatctctcctatcgctttgggatgacgatgctccaactcctgcaatttccgccttacacgacggctcatattttccaaactgcgctcgggccggtaaacacttacctgatccaacttgacaaacgaacaaaaatcaagcaatgaaaactcggataatatgtgtttccgataaaaccacaccgaccaaataaaaagcggataggcaatctgtgaatacatcttcataaaggcaacaaaatctaccaacggatggtcattcaaagtagccatgacacacacttcatgcaaagctcccgaataacattgatagttttcgatggcgtatgcatacgtatgaaaaacatacttattattgataatatagcgggaagtatgggtagcaccctgaagtaaataatcataatcactgtctacacaggcaatcatattctgccccaactgtgaacccagttcattcattaatacagatttcttgcctttcgccaaagtggtcttggaagggagcattacttcaaaataacgagtatcatcttcaaactctcccaatagggtacgccaaaaagagacatcgtcgtaactttcaacataagccacaatttttcgtcttgcctttttgggctttaacctattcgccgcaccgatatataaagaagaaaggttgtcggataatctctttcccatagccgtgtcgtttagttaaattcattgtgttatatcgctcacttcggtaacggcatcaagccatccatccatgaccaaagccggcgaatgagtcgtgagtacaatctgtacattcggattcaattcacgaattaatgaaataagacgttgttgccactccacatgaagagaaatctcaggctcatccataaacagcactccatgcctcttgtcctgtaccaagacagtaagcaaaataaccaatatctgtttttcacccgaagaaagttggtaagggtataaagtatcaccgtcttgttcaaacaaaatctcattgctctgacgaataatcttctttcccgtttctccgaaaagatcatccattaaatcctggaatttcttcttaggataagacatttgggcagcacgcatctggtcttcgggattaccggaagtaagacactcgataatacgattaccgatattcacctgataatccaaataacggcgctgcaattgataaagctgccagtccagctctgtcttcacattcttatccgccattttttcaagcaactcggaatgaatcaatggtcggtcaaaacttctgataacatcaaaatgaatttgcgtagcatcttcaggagaaaaaacaaaatgtacccccggtgcagagccattacttaaagcccccccttccaaagcactcaaactatttacagacctgttcagaatagtacttttacctattccattcaccccactcagaatattaacatcagggcgaagttcccacgagatatctttacgtccccacagccgctttatctcgatacgcttaatataatcagcctgctttttcattttatataaatttactataaagcaaagatagaaaatataaaaagaaacacctacatttgtactgttatttaaggtaaaaaagatatggctattcagaagtataaaggacatttggcattgctgggcgctgccataatgtggggattaatgtctcctatcggcaaaacagctttagagaacggaatttcaggactttcactggcaacttttcgaatgacgggaggagcagtctgtttttggattgcatctattttcgcacccaaagaacaagtaaagcctcatgacttgatgatgttgttctttgccggactattgggtatcgtatttaatcaaggttgttttacgttcgggttatcactgacctctcccatcgatgcttccatcgtaacaaccaccgcaccgattgcaaccatgattgttgcagccatttatttgaaggaaccggtaaccggaaagaaagtaatcggcatcttcttaggctccattggggctttaactttgattatgagtagtcaaggttccacagatgataaggccggaagcattccgggagacttgttgtgcttggctgctcagataagtttttctttttatctggctatctttaaaggattaatcagcagatataatatcttcacattaatgaaatggatgttcacatatgccgccatctgctttattccattctcctatcacgaagtttcggctattcaatttaacgagatatccaccaccacgtggggctgcgtcctttttgttatcttgggaggcacattctttgcctatattttaatgatgataggacaaaagacattgcgtccgaccgttatcagtatgtataactatgtacaaccgattgtcggtacttctgtctctattttattaggcatgggtactttcggaccggcaaaaggactggccgtcgtattggtattcttaggagtgtacatcgtcactcaaagcaagagccgcgaacagatgctggctgaacaaacggttcaaaaagacaggcactaaccatagttgttgcaatcccccaactcggagatttatataattgactcttccaaacgaagctgctctatatatttctccgtgtcctcccaaagttgtttggcctgcggatgattcataaatttatcttttacttttttcggtttgcaagaagcaaacatttgtccggtcacctccgacacttcttcatcaagcaataagtgaatagctgttgccgcaccttctttaggagtacggatgcaaggacgaaaaaaccaatctgtcagtttatcaaaccacatatccatacggatgatattggtagaaacaattcccggatcggcggcattgactgtaattccgctgtctttcaccctttccgacaactcacgcgtaaacagccacaaagccaacttggtattgctataaataggaatacgccaaaagctacctgactttccgtgggaaaaaaaatcggacgtgatatgcccaagtgaataagtacacgaaaccatattgacaatacggcttccttttcccatcaaaggcaataatctcatagtcaaaagaaaaggagcaacataattcaccgccactgttctttccagcccgtcttcagtctgcatcaaatgagtactcattgttccggcattattcatcaaaaggtcaatatgttttccacgccccaacagtccgtctgcaacattgataacagacgccatagaagacagatcgacctgacgtacttctatctccttgtttcctgtttccaatatcatctgattcttacgttcttctcctttaaaaagagtataacacaacataatgacatgataccctgcctcggctacggcacgagttatttcctttcccattcctccgtcggcaccggttataacagctaatttactcatttttccactcttgcttttatatataaacacttatttcttctccaatttttcaatttcttttttcaaacttgccggcagctcttcccgcaagtgctggtggcaagccatttcaatagtgtacattcgtgctatacaatagttactatgcttacagttacaccgcgctttttcttcttcacgcatacgattgacaaaaccgggttcattaagcaaagcacgcgccatctgcacaaattcaaaaccatgattcaatacctcatcaattttttcacgcgaaaccaacccaccgacatatactaacggaatatcctttatttcggttctgaatttcagagcatcttccaagaaataggcctctttgaaaggtacggccggaatcatccatttgcctgccattcttactccatatttcagccaccagcaattcatataatgagtcatcgttttgataggcatttcaccgcgcatgacatacattggagctttacttacaaaacctccactcaagaccaacgcctgtgcaccatcttgcaccaaccgcttggctacctgcatggtctcgtctatttccatacctcccttaaagccatcacgcatattcattttcaccaatactgccatatcgctacctgcagcctgcatcacctcttccattaccatatccataaaacgcatacgattctccaacgaaccgccatactcgtctttacggtgattggtataaggagagagaaactgactgatgagatatccatgtccggcatgaatttccactgcatcaaagccggcctcacgtgctaaattgacagaacgaccataagcttttgccatcgccggaagttcgtccttacgcaagccacgcacgaaagtaggcgaataaagattaaaaccggaagaagctcctacgggtgttaccccacaaatacttttgtgcgacatatttccacaatgtcccaactgaataccggctgccgcaccctccttatggatggcatcggttatgtctttcaaccccggcactatctcagggcgcatccacagctgtcggtcaaaagacaaaccgctttgagctacagcagcataagcgattgtagtcattcctactcccccggccgctaccgaacgatgatagtccaataactgttgtgaaggtacattgcccggacacatgctttcaaaagccgccgaacgaatcgtacgatttctcaaagtaagcggcccgatggatgccggagtaaatagtttagaatctatcatgacttttataattttatagtctaatcggttaataaacaaaaggaatcattcgttttctgccacccacagcctgtactccaaactcttctcgataacgattgcgaatcgaattggcacgcggagccaaattagcaaatgtccacagaacaaatacccaagcagccggtgagcaagtcagtacggcaaaacctacccattccaataattctccgaaataattacctgacgtgacataccgatacattcctttctgtggcaaataatgacgagtatcgcccggtttacgtaaatgacggatcacactgtccgaatgaatattaattcccatacctgcaaaaaacagaaccagtcctgcccaaaaagaagaagtattaagccatgcatccgaataaagtccttcgggagcaagatagaaaagccactcgccctgcataaaaccattcaacacattgaataccactcccatcaacataatggcaataggcatccggctctttcctttcatcaagaaagggaatataaaggcacgctggaaataatgcagttcaaagagtaggaaaaagacaagaggcacagcgctacaacgcacactgctattccaccataaatagagcatgacgaaaaacaccggcgcttccatcaatatccaacctagtttattgtttaacgaaattccccatttggaagtttggaacataccatagccggcacgtacataataaagggctgcaaaaacaacaaccgctaatgcagacattgtcagaagtaataagtcaaaagtctgttgttccatactcggtcctccttttattagatttagttagtcactaacaaatttaaagaaaattcgagagaggagaaatattttagatagtttttgtggaaaaagactataaaatgcgagaaagtgacagtaaaaccatcgatgatattattcttcagacacggataacatgaatttcacagaaaaatccgtgtaaacccatgttatccgtgcttgccaattacctctgcttcaaaggcacatattccagttcttccaacacattcttgtatgccggacgaataatacgttttccttcaaaattcagttcctcattgcggtgtgcgcaccaccccacgatacgagccatcgcaaacaaaggtgtaaatatttcctgtggcaaaccaatcatttcataaacaaatcccgaatagaaatcgatattgctggacaccgtcttgccgttattcttaatct

SEQ ID NO: 6719 - DNA, 18696 bp, Unknown
  gut microbiota DNA sequence
tatacttttatgtatagtagtctaccggatcgaatgaacaagacctatcccatacataaaccaatttagactgctatgttatttttgaggaagaagatggaatgagaccagataccctctttaaggctgactgtaagtcgattaaatgtagaaaaagattgcttttgtcacaagtaaagtgtatatttgcattgaaagaatcgttctttgacagaggcaaaagaaaacagaatattgtaattcgctcgtttctaaatcgttacctgatattaattaaacagaaataactgtttaattttcaattagatagagattgtatgatgtttcgctgtgtaggaactgacgttgaacttgatgctgcaataaacagccagctgcttcaggtcgtagttcagtttccgcagggcatgttggtattcgatgtattcttctttgttttctcggtttccactgaggatggggaacaggtaaggagagtcggcatccatgcttttatattgttgaataagcttcatggctgtgggaggtacttctacggtgagcagggtccccgttttgtgccggcgataggagataacggaatcttgcaggtcttttttgtgcagatatgccaagtccacaaagggcattccgcgtagcaggaacattaaggtgagccatgcccggcttttttccaggctttgcgataaggattgtggaagaggtgctttcagtaacttattcatgtctccggcatcgagggcgcgtttggtgttggcttttactccggtatatacgtggcggaagaggcggggcttttcttctgccaggccttcgtctacagctttgttgtacgtgctccgcaaagtacgcatgtaagtggaaacggtattccaggcacatcccttgttgcgcagatggctttcaaattgtttcagtctggaacggtccatttggttgaaccggatgacatcggccttacagaagagcctgagggcattcagtgtactttggtaaatgtgggcggtgctgaagcgttcttcttcttttaatgcccgaatgagctgttccataaattgggttaggttaggtttttctttcatcgttctttctttattaattaaataatgtatattctctgtttagatgtgcattctttaagttaatcttaaaagttcggatgaagtttatttgtttaccggtttgtttctttttgggatagcttgtgctttttcttcgttttttgacgattggcggagttgaaagacggtggttgccttggttatgttgaaacataaaaaaaagttgtgccagtatttttgacacaaccttattcattctttttcttgtatactttaatcgactatgcgcttgttcattatgatataaacaaccagtccaacaatgataagagcagctgaaccacctaaaactgcgttatcattaatagcagaacttcctgcgcagaagataccaaccaaaatagcggcaccaatgatcataagtatcagacctaaattcttaagtaagcttttcatgtgtgtattttattaatagattatttttcttgtgcacaaattaaagcataattctgttatgaaggaaattattttaggaaaaaaagatgaaatagcagaaattctttaatctttggtgttcgtaaatatcttccttagtacatcctgactaactttcagctcttctaatgttaatccttgcaaagcttcttttaatgttttattggcgataaaccgtgctttttcttccagttcacgtcctgttttggttaaatgaaccagattcgtgcgacggtctttcttgtccgagatacggactaccaagtgctgacgctccatgttgtctatcagacgagtcatgctgggcttgtctttgaaagtggcattacacagttcttgctgggttactccgtcccgttcccacagaaacaaaagcactgtccattgttcaggagtaatgtctactccgttctgacggaagttgcggctcagtttcctattgatggctgccgacactttaccgttcaaaatagcgaatatcagctggatatcaaaactaaattgttctatcatataattattgtttaaacaactttgcaaagatacgattcttgtgggaataacgcagattttaaggatgaaaaaatactaaaaggcaagattaattgcaaaatgaaactatatttttgaaagaaaatgcctgtaagtctttgtagattaagagaaaatatctacctttgcgctcgcaatttaaaattttaatttaataatttaattaacgtagtatgaatcaatacgaaaccgttttcattttgactcccgttttgtctgatgttcagatgaaggaagcggtagagaaattcaaaggtattctgactgcagagggtgcagagattatcaatgaagaaaactggggcttgaagaaattggcttaccccatccagaaaaaatcaactggtttctatcagctgattgagtttaaagcagaaccgaaggtaattgaaaaattggaaataaactaccgtcgtgacgaacgtgttatccgtttcctgactttcagaatggataaatacgctgctgaatacgctgctaagagaagaaatgttaaatcaactaaaaaggaggattaatcatggcacagcaacaatcagaaatcagatatttaactccgccctcagtagacgttaaaaagaaaaaatattgccgtttcaaaaaaagcggtattaagtacattgattacaaagatcctgaattcttgaagaaattcttgaacgaacagggcaaaatccttcctcgccgtattacaggtacttctttgaagttccaacgtcgtatcgcgcaggctgttaagagagcacgtcacttggcgttacttccatttgtaactgatatgatgaaataataaggaggaataagtatggaaataattttgaaagaagacgtagtaaacttaggctacaagaatgatattgtaactgtaaagtctggttacggtcgtaactatcttattccgaccggtaaagctgtgattgcttcaccttctgcaaagaaaatgttggcagaagaattgaaacaacgcgctcacaaactggaaaaaattaagaaggatgctgaagctatggcagaacagttgaagggtgtaactttgactatcgctaccaaagtgagtgctacaggtactatctttggttctgttaccaacatccagattgctgaagaattggaaaaattaggccacaaggttgacagaaagattatcgttgtgaaggatactgtgaaagaagttggttcttacaaggctatcgttaaactgcacaaggaagtttctgtagaaattccgttcgaagtagttgctgaataatctgtaaatactttaaagtatatgctgaagaagcccggttcgctagagccgggcttcttctttttcttgagattcctcttttttgtggaaagggactatattaaatcgtttttggcttgccggtatataaattttgtctatctttagcatgataatttttcatacacgaatgaactactatgaaaacaaacctgatagagaaagtgaagcgcatgagcacagagtatagattcggtgacttctttcgcaacttcattgctgtggtgctgggtattgttattacctttgccggcagtgacctgatagaagaacgtaagataagaaatgaagtgaaagatgctctgtcattggtcaaagatgaaatattactcaacagggagactatagaagaattgatggagcaggagctgtttgaacagcggggggcgtgttatctgcttcaatataaagactccatagataaggcatcgccggattcaattgagaaatatggctattcgccattccagtcattcaatcctatttatattgatgatgcaatggagatgctcaaaagttcatcgcttatctctgctattgaaaataaaaaacttgctacccggattattcaaacatacaacacgataaaaaccgcttatggcagttttggggcttttatggatataaagctgaaatgtattgagaaattgactgataaggcggaagtgcgagaagcattggcaaagaataagctcaggactaaaatgcaggagtgggacttttatttcactatcccggaaggggtgcaggctgtgcagcaaatttcttatatacatagttatccaagaaaaatgtatggacggtatatggaacagatagacgagacgttggctgccattgacgaggtgtataaataaaaaaaagtctgttgtgctttcgcacggcagactttcaattctctctaatgttcgttctgaatattattcagctacggctgcagagtcagcagctgtgctatcaacagcagctacagtgtcaactgtttcaacaacagctgcttcaactgtttcaactgtagtagaatctgcgttttcagctccgttgttagcagctttgtttccgcaagatgcgaaagaaacagctgcaaatgctacgaacaaaaatactaattttttcattttctttgctttttaaatctgtaatactaaatagttgctttattaaaacgttgcaaaggtatacactttttcaatatgttgtactcctgaaaccgactttttttccacatttttatgttgtgcaacctaatttactgatttatagtatgttttaaaacatattgttattcctctgcaatgctgttgtagaggaagcgttttatactctttttgggagtcttttcaaattcggtaggataaagctgaatagtacttacttgttcgtaattgcctaccagtttattcagatttttcaggttctcgtccattaccgtttttatattgtcgggggtgttcaatcccagagagtcaagactgtcgtaatcgggataaaccaaagccacaagttttttattgcgctctataatcagactttccagaacgaagggcatattatttaacttcgcttcaatttcctccggaaagatattttgtccgttggagcttaacaacatggttttgctgcggccgcggatatatatgaagccgtttgcgtcaatggttcccaggtcaccggtcttcagccaaccgtcttcggtaaatacttcgcgggttgcttcttcgtttttataatatcctttcattacgttttctccgcgcacctgaatttcgcctgtcgtattgtaggggtcatccgagtcgatacgcacttccatgatgtcgagaatttttcctgcagaaccggggatgaaggtattccagggggcataactgatgagcgggccgcattctgtcataccgtatccgatggtaaaggggaattttattttgtagaagaaatctgttacttccgggttcatggctgcaccgccaataatgacttccttgaaccgtccgcccagagcgtcaatcagttttttacggatttgcgcatatatctgattgtccagcaaagggatattcaatgcccatttcatgctgcgcttattgataagtggctgaatgacattcttgtatatcttttctattaccagggggactgtgataatcaggttgggcttcacttcttcgaaggctttcatcagaatttttggagaaggtgtcttgcctaacagcgtgacatgggttcccacggctgttgcggtcagaaaatcgaaagcacaaccataagcatgggccaagggtaggaaagaaagtactttttctccttttttcaacagtcctgttcggataccgaaggtgacattgcctgccagattgttgcctgtcagcatcactcctttgctgaagccggtggtgcccgaggtatagttaaacaacatcactttatcattagataattcggtatagatgatgttctccttttggaaacctttgggataggcttttttcatggccgtatctatgttgcgcatgaatttctgaatagtctctccatcacgctggtgcagacaacggtaatctgtcaaagaaaagacagcacgtaagttgcccaatgcttcttcttccaggttttcccagatattatcgctgacaaacaggaatgtggattcggaatgattgacgatatgatgaacgtcattcggcttaaagtcttgaagaataggtacaacgatggcgccataggtaattgttgccatatatgctatgcaccagcgagaagtattcttacctatgattgaaattttatcaccgcgtcggagactgcaatgttgaaacagcaggtgtaacttggctatttcttctgccacttgtccatacgtaaaagcgttgtcttcaccataatctgtgtaacacggtaaatcccagttctccttaaagctattctcgtatagcttaataaagttctcttttatcattgcacaatttttgatgtaatgtgcaaaaataagcataattattggtattctaaaagaattaaggagaattatgtgtaactttgttgcctaatatagataaataggtatgattgatacgacaatattccaaaataaaacggccgtttattatacattgggctgtaaattgaatttctcagaaacctcaacaattggcagaattctgaaagaagccggtatccgtactgcgcgtaaaggagagaaagccgatatttgtgttgtaaatacttgttcggttactgaggttgccgataaaaagtgcaggcaggccatccatcggttgactaaacagcatccgggtgcctttgttgttgtcaccggatgttatgctcagctgaagccggaacaggtagcgaatattgaaggggtagaccttgttctcggtgcggagcagaaaggggagctgatgaattaccttggaaatctggagaagcatgagaagggagaagccattacgacggctaccaaagatattcgcagtttttctccttcgtgttcgcggggtgaccgtacccgttatttcttgaaggtgcaggatgggtgtgactatttttgctcttattgtacgattccgtttgcccgtggacgcagccgtaacggacggattgaggacatagtggcgcaagctcgccgggcagccggggaaggcggaaaggaaatagttattaccggggtgaatatcggagatttcggaaagacgacaggcgaaacattttttgatttggtgaaggaactggataaagtggagggtatcgaacgttatcgtatctcttccatcgagcccaatttgctgacggatgagattattgaatatgtttctcgttcgcgtgcttttatgcctcatttccatattcctttgcagagtggcagtgacgatgtgttgaagttgatgcgccgtcgttatgatacggcattgttcgcttctaagattcgcaagataaaagaaatgatgcccgatgcttttatcggtgtggatgtgattgtgggaaccaggggggagacagaactgtattttgaagatgcatatcgttttatcgaagggcttgaggtgactcaacttcatgtgttcagttattctgaacgtcccggtactcaggcgttgaaaatagatcatgtggtttctcccgaggagaaacatcggcggagccagcgtttgttggcgctttcggacgaaaagacaaaggctttttatgccagacatattggcaaagaggctatcgtgcttgccgaaaaatcgaaggcgggaatgccgatgcatggctttacggataattatatccgggtggaactggaacatgatgatgcgcttgacaataagttggtgcgcgtaaaattgggtgattttaatgaagacggtactgccttgaaaggtacaattatatgaaaaagatatcagttgtcatattgaattggaatggggaagctatgttgcggcaatttcttccttcggtgatagcatattctgaggcggaaggagtggaggtatgtgtggctgacaatgcttcttcggatgcatcgtgtgacgtggtgaggaaagagtttcctgctgtgcgccttattgaactggaggaaaattatggctttgccgaagggtataaccgtgccttgcagcaggtggatgcggaatatgtggttcttttgaacagtgatatcgaggtgacacctcattggttggagcctttgcgggattttatggaagttcatcccgaagtggctgcttgtcaacccaaacttctgagtcagcgcaataaggagttttttgaatatgcgggtgctgcgggggggtatatcgaccgttatgggtatcctttttgccgcgggcggatttttgaaacggtagagaaggatgatggtcagtatgatacggtgatgcctgttttttgggttagtggagctgccttttttgtccgcttgaaagattatcgtgaggcaggaggtctggatgggcgtttctttgctcacatggaggaaattgatctttgctggcgttttcgcagtcgcggaagaggattggtatgtattccgcaaagtgtggtgtatcatgtaggtgcggctacattgaaaaaagaaagtccgcggaaaacatatctgaactttcggaataatttattgatgctttataagaatttgcctgaaaaggaactgaataaggtgctttgtgtgcgtggttttttggataggattgctgctatggttttctatcttaagaaggataaggagagtgccaaagctgtctttcaggcaaggagagattttgagcgtacccgttatagctttgcttctgcccgcgtggagaatatgatgaaagctaccgatgagcctattcccgaaagagtggagtatagtattttgtggaaatatcatgcgttgggcaagaaaaggttttcacaattgcgtaattttgtgaaagggctgactgcctgatgtgggtaaactaaatttagtatattaaaaaaaaacgactatgagcaaattggttagaaaaattggcttggtggcacatgatgccatgaagaaggacttgatagaatgggttctttggaactcggaacggttgataggtcacaagttttattgcacgggaactacaggaacacttatccgggaagctttgaaagagaaacatcctgatgtggaatgggatattactattctgaaatcaggtccgctgggtggtgaccagcagattggttcgcgcattgtggaaggagaaatcgattatctttttttctttaccgacccgatgactctccagccgcatgatacggatgtaaaagcattgactcgtttggcgggtgttgagaatattgttttttgctgtaaccgctctacggctgatcatatcataaccagccctctgtttgttgacccggaatatgagcgcactcatccggattataccggatatacacagcgctttgccaataagccggtagtatctgaggcagtggaacgggtcaataaacgtaaaggcagaaagaataaataattattttattccaatggcgtaaagtgtattttatcggtcgtagtgtactgcgactcctactttctgacaatccgcccccataggcggattttctttatatagacgaatatctatttcttcgatgacagggaaatcatggaacagccgttccgctatgcgttcacatacgtgttccaataacctggaaggcgttttcataacttcttttaccgcggtatgtacgtcggcatagcttacggttccctccagtctgtctgtttgggctgcatggataaaatttgtttttaatttcaggtcaatggtaaagttggctcccacaaccgtttcttgtggagctactccatgacgggcaaagaatttaagaccttccaggcatatatacattgatgttgctttcatgtttttgtttttattggacggacaaatataaggtactttttccttatgggaaagagaagcagaaaaaatgctaaaagaaagaggaattgccattcgatacaggcagttcctcttttcttctcttttgtgattacattatataataaaccattatccgcatcttgacgctccacaggtcttgcagataaggcatccctcctgataaacgagagtttcatgtccgcaattcggacacttctgaccgtcggctttcgttccgtcggtaacatattttttcagagcacgttctacaccatttttccatgtgttgatgctttcgctgtccaattgcagtgagtccaccaacttaatgacgcggtcgataggcatgcgccagcggaggacgcccgaaatcagtttggcatagttccagtattctttattaaacttctcggacagaccttcgatggtggtcttgtatccgcgcttgttttcaaactggaagtcgtagtgtttgttgccgtcttcgtctacatttttaatgattcgtccgctagtgacagacttcggcaataagatgccctcttcatcatcttgcagaccggtaaatatctcgtatgggtgaccgtccagcagaccgacaaaggctacccatttttccttgttgttctggaaacggatgacatcggcttctaatactttcgggcggacttcgactaccgtaggcggtttgcaaggtggcatttcttctttcttatccttcttcttgttggaaatcaatacaccggaacgtgacccgtcacgatatacggtacaacctttgcagcccgaacgccatgcttctacgtaaagacggtttacgaggtcttcatccacatcatttggcaagttgatggtgacactgatggaatggtcaacccatttttggatacgtccttgcatctttactttcatcagccagtctacatcatttgatgttgctttataataaggtgatttttttaccaattcgtctatttcttcctgtgtataacgcttggcggggtcgtagccgtttatttccatccatgttacaaacttatggtggaataccacatattcttcgaaggcgtcacctgtttcatccacaaagtcaacatgtacttgcggatcattcgggttgacttttcttctgcgcttgtaaaccggcataaatacgggttcaatgcccgaagtggtctgagtcatcaaactggtggttcccgtcggagcaattgtcagacaggcaatgttacggcgtccgtatttgagcatgtcttcatacaatttcggatcagcttctttcaagcggttgatgaaggggttgtctttttctctttcgctgtcatagatagcgaatgcaccgcgttcttttgccatttctacagaagaacgatatgcttccaaggcaatcgttttatgcactttttccgagaattcggttgcttcctcagttccgtagcgtagtcccatggcggcgagcatatctccttcggcagtgatacctacaccggtacggcgtccctgaccgcttttcttgtatattttttcccacagatgtctttctgccccttttacttcttcactttcagggtcggagtcaatcttggtcataattctttcgattttctccagctccaagtcgataatgtcatccatgatgcgttgagctaaagcaacatgttttttgaacagctcgaaatcgaaataggcatccttggtgaagggattgactacataagaatatagattgatagccagcaaacggcaggagtcgtaaggacataagggaatctcaccgcaagggttggtagacactgtgcggtaacctaaatctgcataacagtcgggtacggattcgcgtatgatggtatcccagaacagaacacccggttctgccgacttccacgcattgtgtacaatcttcttccataaagccgaagcgtctatttctttggttgtcgaaggtgtggcagcatcgatgggatattgttgtgtatatggagtaccgtcaacagctgcctgcatgaatgcatcgtcaagttttacagagacattggctcctgtaactttgccttctgtcattttagcatcgataaatgcttcagaatcggggtgcttgatagatacgctcagcatcaatgcaccacgacggccgtcttgagctacttcacgggtggaatttgaataacgctccataaaaggaaccaatcctgtagaagtcagtgctgagttcttgacaggtgaacctttcggacggatatgagacaaatcatgtcctactcctccacgacgtttcatcagctgaacctgttcttcatcaatgcggataatggcaccataggaatcggctgcaccttccattccgataacaaaacagttggacaatgatgctacttggtaatcattgccgatgcctgtcatcggacttccttgtggaacgatgtacttaaaatggtccaataactcgtaaagttgttgtgcgtccagcccgttttggtatttgctttcaatgcgggccacctcattggcaatacgccaatgcatgtcttccggtgacttttcgtaaatattgccgaaagagtcctttactgcgtatttgtttacccaaaccctggcagcaagttcatcgcccttaaagtattgtaaagatgcttcaaaggcttcgtcgtaggagtaaattcgtttttccacttttctgttcagatttactataattattaataagcttaagatgtagaagtcctaactcatttataacaaaagcgtcggcaaagctatatatgttttctgaataaacaaaataaatatcgaataagttttcaacaatttaaaagttatccaaaacggtctgttaattatttgattttcaatataggttgttgatgcgtgagctgctaaagttttctatttggaaaatttgagtaaaatgtgaagtaatgaaataattgaaaactccaaatgtttggggtggattattttgcaaaaaaggttattgaatacgcttttcttttcttatctttgcaagaaaaagaatatggattcaataaagaacagacggtctatccgtaaatacaagcaggatgaaattcccgcttctttgttaaatgatttgcttgaagaggcttttcgtgcttctactatggggaatatgcaactatatagtgtggtagtcactcgtgataaacagatgaaggaaaaattggcaccggctcattttaatcagcctatggtaacgggtgcaccggtggtgcttactttttgtgccgactttaaccgctttagtaaatggtgtcgggcacgcaaagcggaaccgggatatgataatcctatctcttttttgaatgcggcgacagatgcattgctggttacacaaaatttttgcacattggcggaagaacatgggttgggtatttgctatttgggtactactatctataacccggaccagatagttgagattctccagttgccggaactggtgatgccggtagctaccataacggtaggatatcctgacgaatgtccttcacaggtcgaccgtcttcctgttcaggggctgttgcacgatgaggtttatcatgattattcggttgaagacatcgaccgtatttatgcttataaagaatcattgccggagaatcatcgatttatagaggagaatcagaaggagacattggctcaggtgtttactgacgtacgttataagaaggctgataacgagtatatgtcgggtatcctgaaggcgacattaaagaaacaggggtttgaaaaataatccgtttgtatttatttttaggcatgaataacacacgatttacggaaaagatgaaaaatccgtgtttatctgtgttatttgtgcctaaaaagcagtctctacagaatgagactttttattttcttcttagtaatgcttcaatttcttctatatcagctttgaatgatttatctacctctacctgatctttcactattttgcaagcatgcaatacggtagcgtggtctttatttccaattaactgaccaatcttggaagaggaggcgtctgtatgcttttttgcaaggaacatggcaacctgacgtacctgcacgacttctcttttgcgcgttttagtgtggattgccgattcttctatctcataatgactgcatactttggcgataatgtcctcgatggtaatcggtttgctttcgcaacgaaccgctttgcgaacaatccgttctgccaaatcgatgtccacgtcacgcttaaagataatggactgtgccaacagagagttgatgataccttccagttcacgtacgctttcgttgacgttttcggcaatgtagtttattacagattcaggaatattcagtccgtcacggcgaatcttgttgcggagaatattctttctcagttccacatcaggcttttccagttcggctaccaaaccccatttaaaacgggtcaggaggcgttcttccataccttgcagcatcaccggtgcgcggtcggaagtcaggataagttgcttaccgttttggtgcaggtggttaaagatatggaagaaggtattctgagttttggtaacaccggcaaattcctggatatcatcgataatcagcacatctattgtctggtagaaactgatgaaatcattgaaatggtttgtacgtacagagtcggtatattgtacctgaaacaaatgtgccgatacatataatactcgtttttccggataaagttccttgatgcgtgtacctatggcattgattaagtgggtttttcccacacctgacggtccgtataaaaacaacggattaaatgtccgggcagggttctttgccacggtttctcctacagtacgcgaaaactcgttactgtttcctttgataaagttctcgaaattgtagttcgggttcaagtgcggatccaaatcctgcggagccggagcctgcatcgggttgggagccttattgccatcttttataactgtttgtgcgggtaatgccgaagaacgcttggtaccctctatatttacagttatatgattggtcttgtctgttaatatgcaatacatcaactgcgtaccttccccgatttctttataaagggctgcacgcaataaatccacgaacttttcttccaaaaattcatagaagaaaggactcgggactccaatggtcaaggcgtggtcttcgtacttcagaggtacgataggctcaaaccaagttttataagtcgtatcaggaacattgtctctaatgatattgagacatcgattccataaaacgacgtgatcgttttcaatcatataagacatttattataaaaagcgaaacttctacaatgcaaatttcgaaatgaaaatctgaaaaaacaaatcgcttttttcttgctttttatattttaaaagtaatctctttagtttcagtgacttataaaaagcactctgaggtcagtccggaatgaaagttgcatatttgtaagctcttgattcttagctttctattgagcttttcttgtgtcgctatattggtgattaactccgcttctttaagcctttcttccctgttgacagccttttactagccaacagggaaaaaaaggaaatatggctttatttagaatatttctattttaagcggaagccttacttatctttcttgccgaacagcgagaagtgtacataccgtttgggatgtgccttcaggtcttccagcagggaagctgcattggctgttgttgtactcaagttctggtagaatgtcgggtcgttgaacaataagccaatggtattatctttgcgggtgagtttttcggtcagcaattgtacattatataatgtagagtctactttgctgaaagtgcttgcatagtcaatgccttttaagttttcactgatgacagagaagttatcggtaatggtcaccaatcggccggtgatctgcggtaattcattattcattaatgaattcagttggcgtgtagtaacgtccaagttggctgtcagtctctcagcattgtgtatggttgccgtcagtgccgggtctgccaggagtttgttcaatgattgaagaatggaatccattttgggaagaagctgttccacttggggaaccaacttttcttcggctacccccatcaaaccattgttggttattccgggcaaagtatctcccggctggaaaaattcgttggttttatcattcaagagtaagttcatttttaccgttcccagcatttcggtaaccaattctcctttacttcctttggggatgcgcatttctttgtctacctctacctctaccgtcacatgccccggtttcttgtaattatagttgatacttctcacagtacccactttaaaaccattggcaaatacggggctggagccggccagaccgtttatgttggtatattctacataataatagtttgctgattggaacatgttgattcctttcaggtaattgataccataaattagcatggctaaagcagcgatgcctattaatcctatttttacctctttcgtcatttctgttatttcttttatataattatctgtttttcttaaattctttgatggcttcgtttacattcatcttttctccgtttttaaaggcaatgatgaatgcatctttaaatttagcggtaacttcgcgcttcatgcgtaataccttattatagtcggtgctttctccataggtatatttatatagccctttttctttataataacttaccggagaaagtccttttaattgtctgctgtttttgggcaatatcctatcggatgccaatatttgtattttgaatatcggtttatgtacaacttcagggttgctcttatttgtcttgatgttaggtgtatccggctttctgttgcttcttaccggttcgggtgcactgtcgggttcatcggtcggtgtttccgctacagattcctccggttcgggcatttccggttgctgcactttgctacggtctattggtgcgtcgtgttcgcgtttatagtttaagaaagctttgtaaatactgtttgccaatgcttcactgcctgtgtcggacagaagatactgttcttcatcgggagtagagatatagccgagctctaccaatacaccgggcatggatgtttcacgaagtacgagaaatcctgcctgatgcacgcctttgtctatgcggcgtgccgaagtcttgaattgtttttgtatcagagttgccagtttgacactcttctccatgtttttgtcctgcaggaattcaaagatgatgtaactttccgaagagttcggattgaaaccggcataacgttgctgataattgtcctctattaaaataacagagttttcctttttggcgacttccaggttttcttctgtccgatggagaccgagggtgtaagtttccgtacctctgacattgcgtccgcgggctaccgaattggtatggatggagatgaataagtctgctttggcgttattggctatttgtgcccggcggtccaaaggaataaacacatcgctgcggcgtgtgaatatgacttttacgtctttacagttgttctgtatcaggcgtcctactttcaatgccacattcagattgatattcttttcttttccgcgtctgccgatggcaccggggtcatggcctccgtgaccggggtcaatgacaacagtgaagtcctttccttcggctgtaagacaaagaaagggcaagactagcgcaaggctacacaacagaattattattttaagtctatcggttctcatattaattaaggtgcaaatgtagcgatttttaatgaaaactcggcttttaccttcaagttttgtgttttttagtagaaagatgccataaaacccgaaaaacagacgagtatttggttgattttctattactttgcatccccaaaaaatctataatatgcttaaatttctgaagaattggacgctgcctttggcaatgtttgccggagctatcggatatttcctgttggccaacgtcactattttggagccggcaaaaccttttgtgaattggctgattgccgttttgactccttttcttatcttcgcacagttgctgcttactttttgtaagattgagcccaaggaattactacccaaggcatggcacgtatggctattgtccattcaggctgtatcaagcggcattattgctttgttgctgattttctgccccatggaggaggcttacagggatatttttgaaggggcgatggtttgcctgatttgtcccacggccacggcagcggctgtcattacaggaaaattgggaggaagtgcttccacgcttactacttataccttgctttcgaatgtattggcggcaatagcggtgccgcttgtgtttccgcttgtggagcctcatgccgacatcacctttgtggtggcttttcttaaaatactgagtaaagtgtttcctctgttactggctcctttttttattgcattgttgtttcgttattatatcccgtctgtacatcgactgttgtcgaaatatcatggggtcgctttttatttgtgggcggttgcactgactattgtgacaggacaaaccgtgcgctcactggttaccgctgctgccgatgtttccatcgagataatgattgctttggcaggacttgccacttgctgtctgcaattttattttggtaaaagaattggcagtgcttatcatgaccgaatcagcgcggggcaggctttgggacagaagaatacggtgcttgccatttggatggcagtgacttatctcaatcctttatcgtctgtcggtcccggtagctatgtggtgtggcagaacatcatcaatagttatcagttgtggaagaaaagaaaaaatgagataaaatattaactataagacgttgatatttagcattttatctttgttatatgtaatttcctt

SEQ ID NO: 6720 - DNA, 221 bp, Unknown
  gut microbiota DNA sequence
tacgcactctttaaatgaatggctgcttccaagccaacatcctagctgtcttagcaatctgacttcgttagtttaacttagctgttatttcgggaccttagcaggtggtctggattcttctcctctcgggcacggaccttagcacccatgccctcactcctgacctcaaactaatgcgcattcggagtttatcaagacttgataggcggtgaagccctcgc

SEQ ID NO: 6721 - DNA, 7325 bp, Unknown
  gut microbiota DNA sequence
aaaggaatagtttgggaaaaaagtgaaccatccggagaatcgcttattcttccagatggttctataataaaaaatgatatgaaggggctttgtttatctaaaagaaatacttcgtttatttcttcgttgcaaaggtaggaataaaaaatagaaaaacaaattttttagagaaaaaatgaacgatataccgatatttttgattgaaatgccaatattattatgaaaataccactgtaatcatgctaaaacaacaaaaacaggcagagacaaaacgacattgaactcttatgtctatacattaaaataaaaaataaattgctttaattcattgtggtataaaagataatgtctatctttgcacccgcgaaacgaataaattatatatcaacaaatctaaaaattatgtatttagacgcagctaaaaaacaagaaatctttgaaaagtacggaaagtctaacactgatactggctcagcagaagcgcagattgctttgttttcataccgtatttctcacctgactgagcacctgaagctcaacagaaaagattatagcactgaaagagctttgacaactttggtaggtaagcgccgtgcgttgctgaactacttgaaggatcgcgatatcgaaagataccgtgctatcattaaagcactcggattgcgtaagtaatccattctttaggaaaggacttaagaaaagccgctactctgaaaagagaagcggcttttcttatgaggctattttacttagaacaggtcgtactcaatggcgtccttggttatcttttcattggcttctatgcgtatgtaacgcgcttttgccggcttcttgaagtagtgataacggcaagtggggtcattcttcagatttccgaattcaaatgtttctgcaagaatccagtcttttccattctcactgaacttgacgcttcctttgacactcatcggcattgcatcatttatctgtggagtatacatcagtccggatatggaataaggacggtctgtctgcagagtcaccacagtaggtctttcctgtttgatcttccattcctttttaaggtatcccaattgctgctgacacacttctcccttttcgttgttcagcagtgcaacagctttcaccattccgctttccaaagcaaacggttgggtgtattcttttgattctgctgtaggagtacttccgtctgtagtataatgaatcttgaatccggcgttcaaatttcgggcaatgtcctgtgtatatgttttccatccgaatttttgttgcatggtgctgatggttacgttaccttctgtatttcgttttacctccaggcggggcggacgggctgcatagtgataggctgctacttggcaaatggccggcttcatgcgagattccaaaatacgcagtctgaatttattgctggttacatcggggaaacggaggatgcgtttgtagccgatgttggtgccggttgccacttcttgccaggcattgtctatccatgcgtccagggcatgcttttctactcgttcactgctcacggtgatggcttcctgaataaggaaacggttgatagtgacaggatcgggggtctcaataacaatttctttcttgtccggtccgactacgatataggtgtctgtattgttgtccagcagttcttccggtccctcggctccttgcaggtaatcggtagtataggtttggttgatccgttttcctacttctttcagcacactgacatcttgtgccgagaagcgtccttcacggttgggaggaatattgagcagaaaagtggaattgcctcctactgcacgttcgtatatgtcaaatacatcatcgacagagcggacacgctgacggtcatcatcgcggtagaaccagccttcacggatggaggtgttggtttcggcttgctggtagtgcagatacttggccttgcagagttgtgtgcggctgcctaaatcttcgtcagtcatatccgggaaatgagaagtggtgtcgggattttccggataggggatgacattccattcggtatcgcgggtttttcccgattcgtttccgcaccagcggatgtcctcgcggccgaaaatgacagcttgaggggccagtttgtgaatcagttctttccaggccgggtagttatatctctgtccgcctttgcgcttgggatgtgcaccgtcaaaccatacttcgtgaatgggaccatactcggtgagcagctcgaacagttggttcatgaaatattcattatagtcatcaagcatgaaccggaaagtggttttgttggcgaacggacgtccgggtacttcccgaggaatggtgcgctcggtgtatggactcaggttgccatagagaccttgaggatgttctatctggtataaatcggcaggagaaaggtatacgcctaattttaatccgtatttttggcaggatgcggagaggtctttcagtatatcccccttgccttcgcggaaatctgtggacatgataccgtgacgggtatagcggctttgccataatacgaatccgtcatggtgcttagctgtgaatatgaccattttcatgcctgccgctttcatggcttcgcaccattggtcggtatccagttgtttcaaatcaaagacgcggggatcttccatgccgtttccccactccatgcgggtaaaggtattgggaccgaaatggatgaaagcgatgaattcatttttcaaagcttccatttgcatcgggctgggaacaatatgtgcggctttctccataatgctttccggggtgtctgtactttctatcgctatcgtgttttggcacggcagggtcagatccgggcgactcttctcggcacaggctgcaaagagcatgcctacgccgaaaagactgctgtataaaaaggttcttttcatcttttgtaaatgattgatgttatggttcatattattttcgagtaaaaacatagacattgccgccgaaatcagtagcgaccaaggcgtttccggatgcagctaccgaaccgaataccggtgagcctgtggcatgtttccaagtgatttttccggttgctttatctactccatagatggttccgtctgatgcgcctactgctatcatcttacctgccaggacaggggtggtctctatggtgcccgatacggggcggctgtagggcgaggtataaatcagggcatctcctacggggcatttccatttttcttccagtgtctggttgtccaaagccaccagtccttctttggctgtaccgaaaataatctctttatcggttagaagaggagtggaggtgacatctacactataaggtaaggtcttgcggacaatgattcttccggtccgggcttccataataaagaaggctttattggaaatcaaatagagcagtccgttgtgaatcgctgccgacgcaccccggttgcgcagtccgtggttgcttgcactccaaagcttcttgcctgttttcaggtcgttggcatacaaggcactccattgaacagaacctatcacgactccactgcctacagacagggtcgttgtggttccttcacgctggttccagtcgttatttctccatatcagttttccggtccgtgcttcaaaggccgacaatgcttttccggttccggcatacacgattcccttgtcggtagccagtccttcaatcagtccgggcaggccgtttaccggcagttgggttttccagcggagtgttccgctctcgcaatctacggcatacaggttacccaaaacatcttgggcaaatacgatatcatcagtaatggctattgtatttttgatggagcttgctaccggatatttccatactatttttccgcttgctccgtccatggcataaataaaagcttttccttttaaatcttcatctatggaagcggtaaagattttgccgttatgtattaacggagaggacatatagaggttggcgcctacatttctgacccatgccagcgaaagtgtgctgtccagttgggcggtagagattccggtatgggcggcatttcctgccaggttgtcccaattaccatccagttttactgtggtctctccgggaaggtaaacaaagtttgtttctgtttttgtcgtttctccgtttttgaattctgccactacctgtaaggtcagtttctttcctttatactgttctttcagtggcatatcggcactccatgtccagtccgatacttgggtcagcggtttgtttttcaagattgtccttgttccgtctgtgcaggtatagctggctttgcgtacgggcgataccgaggagtaaacattggctgtaacaacgcgtgacgccgactctccgacgggtgaggcgatacataatttcttgtccaggtaagtatagcgtaactcgctggtaaagtctcccttgccgtctacatgcatgacccggtaggcactggtggaatggtcaatcccccctttgtcgaggctggaagtgcagatggtatatacgttgccctgtttctttttgtggttgatgtgccaatggccatatatccaggctttcaggttgtattcgttcaggttgatactttcagtctttcctttataagtgaagtcgtttccgtaagtcaatatatcatggttgaatatatagatgggggtttccggcgagacatgtgccaagtcattctttaaccaacggcatacatcgtctttggtatatcccgggcggtaatctcctcccggcatgggagtgacgatatagtgtacacctgccacatcgaatgaataatataccggaccatagtatttttcgaaacactcttctccatatttcccttttaccaggtcgtggttaccgatgcaatagaacatgggtatgttcatattttgggtattcatcagttcgatatgttcctttaatcccttttcgtagcagatgtcgccggtatgtatgataaaagccggtttttcattggcggcatattggcggatgttttcggcccatgcttcgttgccggtagtattgaatatttcggtatccgatacctgtataaaacggtgtgctcctttcttatcaatgcctgcctgataggggatgaggccgaaatcgtaattcccggcagccgccgtgatggggtggtagtgcttgtcgccggctttgtatccggaggggagggtgatgaaaacaaatcgctcacgttcgtgtccgggcagggtgtacataccgtttgcatcggtttttaccacgttcagcccgtcggatactttgacgtctttcagcactttttctcctttatcgaaacttccgttgtggttcttatccacaaaaacacgcccgtggtgggcggcagcagccggaagcgaagctgccaataacattgaaaatataaattcttttttcatacctttctttccagatgatttcttatttatgagcttgtttccagctcttttttagtttcttagaatctgattttggcatcctcaatactcgaaaccaacgggaatacaccgattgaatcgttcatgttcagttcctcgggtgtgggaggaaggaaacctgcttttgttcccttgatatctgcttcgtcttcggtcagagtgacaatagcataaagcggtttgtcataggtcatggaatagttcaggataggataacgcttgttgatttccgccggataacgtttctctgtttgcgagggtttgtctatccatacatacatacgatgcactgtttatctgcacataggtgataccgtctattttctttgtatagttgctgtgattgtgtccgctgaaggccaataccacctttttgaatccggcacgcttgttttctccggcaaggagtgcatgtacttctttaccgttgttcataaaggtatcgatactttggtgagagaagatgatacacttcttatcggtcgattccaggtcttttttcagccattccatttgctccgggtctacgaaggctctcatcttgggattcacataatagttggctttggaatagtgagtgtatttttttccatcatacaagttgtttccatccagcacgataaagtggaagtctcctttgtcgaatgagtaatagcgtccgggcattttcattcctgctacgtactcatcgggagtataagcatccatgtcgtgattgccgatggtgtgatatttgtctctcggaaaactgttccagatgtcatgaaacacttgattggcactgtccagacgacagaagtcacccaactctatgatgaagtctgcattggcgtcttgggcggcacgtacaaaactgcttaatcgttcttttccgtccgggacatcttgtgcgtggaagtcggatgcgatggcgaatgtgactgttttctcttgctgactgcaactgcaaaagcaggcagtgcataacattaaaaagagtgcgatgaggttgttctttttcattgtgatatatttagctatttgttatacaatcaaagccgtccgccaacaggttttggtttctatacctgttgtgcggatatcggctcatttattttcttaatttttccaccacttgttttgaaccaggttgttatttggcgtaaataggatgatgcaaagtaattgaaaatgatgggatgcatcaataaacgattcagataaaggatagtcttaaatcgatataggtcttaaattgtagttggcaggaactgctttgggagggatttctgcaagaaaataaatattatagagatccaatatctggattcacagcttcattttacttggctacaagtgctatggaaataaatgcggaattcagtaattatttatttgtgggttaggctggtataacataatggtatagagtaactaatgtttccggttagactctttgtaggtttgtggggtgagtccggtctgctttttgaataacttaatgaaatacgagtaattgtcatatcccagtgtgtaggctatttccttgatggcaaggtctttggtgatgagcagtagttgtgctttctctattttctttttgacgatatactgtaagggggttgttttcatttcgcttttgaacaggcggatgaagtggtctttcgaaaggcaggaaagtccggccaaagtatcaatgtcaatgtttttgtctatattcttacgtataaagttgactacattaatgatacggttgtcgctgctggagtctttgggttgtgcgtcttttaagaagcgggagattagcatgtagatgatgcctttggaggctactttattatgaaaagctttctgtttgttttttatgatattttgtatcagggtaggggtattgtcggtaagcattcgataaactccccctttca

SEQ ID NO: 6722 - DNA, 492 bp, Unknown
  gut microbiota DNA sequence
ctacatttgcttttccatacgctccagaatggctcacgccacgccttcgacgcggaatggaatgctcccctaccgatcattgctgatcccacggcttcggtagacaacttaatacccgattattatccacgcccgattcctcgactagtgagctgttacgcactctttaaatgaatggctgcttccaagccaacatcctagctgtcttagcaatcagacttcgttagtttaacttagctgtcatttcgggaccttagccggtggtccggattcttctcctctcgggcacggaccttagcacccatgccctcactcctgcggtagaactgatgcgcattcggagtttgtcaggacttgataggcggtgaagccctcgcatccaatcagtcgctctacctcacatcagtaacccgcaaggctgcacctaaatgcatttcggggagtacgagctatctccaagtttgattagcctttcacccctaccctcagctc

SEQ ID NO: 6723 - DNA, 2280 bp, Unknown
  gut microbiota DNA sequence
taggccaggggttggaactggaatcccagcaccaggcccggggccaggctgtattcgataccggctacaccggcagccttgatgccgaacatctgaccggcacggctgccactgccataaagctggacaggaacttcctcgccgctgtcggggtcggttgttgtttcacctgtataaggttctgttgtctcaatacgtgccatctggaaacccaaagagctgcccagatagggatggatacgtggattgttcaccttgaaataacggttggaaccgactgaaacataccagttgttcgttgcctgcgcattaatatatttctgtgcaggaatgaccatatcgggtacgctgccgtctccttccacatagtccttcttgggggtaagattgatattcattgcgaactggaaattgatatcccagcagtcggaaatgaaatatttaccttcaacacccagaatattggtcagactattgttattcagaccgtcaatgttcagatatctgttcaggtcgcccgaattggcatcgccgccgttgggaagtccgacttctcctccggtatgcgtgttttggggaagcaggtaagaggtattttcattgtagaaattgttacctccgcccagcaggacagacacttgccactggcctttcttgggagcaaacaacacgccatcactctcactgcccacagtctgcgccaataaaggcgcagagaggatagtgagcatcagtaatgtgcatagtttcttgatcatcgtataattacgtttttacttaattattctgcggaagctttgctataaagagctttcatcatttcttccagtttaccgttccagtaattgaatacttcaaccttgttttcgtatgcagctttagcacgttccaattcagcttgtgcccattcgattacatattgttctttcaaattgccggcattaaagagctcaagcatcttttcagcttttagaacagcttctgaagcatcttctacatctttattcaatcctgtaaactctgttgcaccatcaacacccttcttatcaccgatttcttgttttaagctcttgatgatagcttcatattcttttaattcatcaccatcaatagcatcgataaccagttgaatatcatctttcatagctttagttgcatcaatcttcaattcattaattggattagcaactttttctgttacgacattttgtgctgttgatacggcgtcaatatcttcttgatatttagcaacataagcattcttagctgcagataaagaagacttccatttagttaactgagcaattgctttgtcaaattgttcagccttctctacattttctgttgctgtattatactcatcgacttttgctaagtataagccttgagcgccacattcacttccaaagttttcgatctttttaatttcatcgtccttcggttgtacaagaacaccacggtcttcctttccatcattatatatacctgctttaccaaatgcagtttttgctgcctctaataaattggctttcaagtctacttctgtatactcggtcggaagaagagtagttacatcgttagatttcaaatattcttttaatgtcttaccatctttaattgcttttggcatttcaggaagttctttctgaccattagctgtcattacggctctgaaagaaacatatttgttatatacattttggatttgttcgtctgatgtatatcctgtagtttcattctttactgcctccaacaaaatttgaatagctccataggcttcatcatattcttgctttgaataagatgttcctgaattataagcagtgacggcatcattccaaaccttaatagctgcatcagcaactttcttctgctcatccatggctttctttgcagctgcctgaacttctttagcataagctacttcatttgcattgatagcagcttttgcatcattcacggtttttattgccttattaatatcatcaacagcaactttgtatgcgcttccatttccatctgcaaagccataggtgttatccattaaagttgcatatgctgtagcatcactaagttcatctgatttatcattgccgtttgtttttgtcaaagcaagaacattctgtgttgatttaaagttagcagtaaatactccgcctttgtatgtgataaatccttgatcatcggcacttaaatccccattaatagcttctgatacagtaaatgtagaatcggctgttcctgcagcactttttttattctgaataatattatccattg

SEQ ID NO: 6724 - DNA, 61245 bp, Unknown
  gut microbiota DNA sequence
cgtcaatcacataaagcggactggtggcactcaatgaactgataccacggacattaatattcaagccttcccccggctgaccgttggcagccgacacagtaacaccggcaactcttccttgcaaagcagctgaagcactacgtgcaacatttgcctgtaactctttaccggaaacagaagcgaccgcacctgtcaaatggcttttcttcactgtaccgtaaccgataaccaccacctcgtccaacaattcaccttccgacaatttcacattaatcacactgcggccatcaaccttaacagtttgctcctgataacctacataagagaatttcaaagactgaccggaatttactttaatggtatatttaccatcaagatcggtaataacaccatcggtagttccaagaactaaaacagcagcaccaatcaacggattattttccgcatccgtcactgttccactaacggtgatttgttgtgcatatgtgcatatactaaatatgcacagcattagagttaatgtaatttgtttcataaaatatgtattagaatttgattaaaataacactctttgtctgtcggtttgaaaacatattgaatcaaaaccgttaagaatgaatcatctataggttaaaggcactatattaatttctattttgcttcgtatgagtagaaaacaagaaattatacaaaggatactcctgttccactctgtcatattatggcttgtacagccaacaaacgccaacgaaagaataatcaatagaaataaagatttcatcgtttttgtcataaatttgattttaaggttaatttttcacattgcaaatatcccgtttcttttatcaacctacaaatacaattcaagcattatataatgaaatcttatcaatagtaaaaaacatccagttattcaagaggtgaccgattggcaacagagaaaaccatatttttcatccacaaaatatgctgtgacatgatagataacgtaaaataaggttcattttataagcgtgtgtataaactcctttcactccatcgctggtagagagaaaagagatatccaaacggacataatacaaggaacgcatcgtatcttttcaactttatggttagaaactcttttggtataaatgcaaataacgtaattaaaatggaatatcaagatgggaatgacagattgagtgaatagtatcaaaagttgataatataatattaattgactttttcgtttttctctacttttgcagagacaagggaaaagtgaatgtaacttgctaaaaagaatgaaaagacaaagaattatgcagcatgatacccgatatctatttttaagtatgacgataagtggagtagcttgttttctgtttttccgcttcgcctatccttatcatcttcttcaccgagagcaaatgctattgttcacttatacagtcgatcaatttatcgattatttcaatcatcccgcccccttatcatgtctgggtggtgactttttgactcaattcttccataatatcaatatgggggcagctgtcgttgccttaactatggcagcattagggacattgacttatttcacttgccgtaaatggaccaaccgatggatagccataggtatttcaatagtggtttttatttgggaaagcctgcgcttctgccaaattcagtatccattttcggcgaccctttcactcatcggtgctttgtccctgtttttgctgacagacaaattaaaaggaaaatgggatttctttatcggaagcatttgcggaaccatgttatgctatagcctgttcggttatggtatgtttgctttcacattatttactatcctttccgccttgaagcggaagcagaattatgtggttatttacggaatgataccggtcgctttggcactgcctcccttagctgcccgcaaatatctggtcattccttcgcaagcatactctttcccggctacgctttggtatggaacacctgattttgagaacgagcgcatattaggcctgaataccgaagactattttgagaattgggacaagataaatgaattggtacacgacggtgttccgggaaatgccatatccgtgtgctataatctggccaatgccatgcaaaacaagcttccggaaaagcttatggattattaccaaccggcaggattgggtctgttcatgcctgtgaacgaaaaatcgacatatctttccacccaattgtctggagaggtctggttccgcttgggcgatatgaccatggcagaacacgcttccctcttaagcatgatattttctcctcagaacaagagtgtacgcatggtacagcgactggcggaaatcaatttgataaacggagataacgaagcggcacgaaaatatctgcgtatcctctcgaacacactcttttacaaggaatgggcgaaaaaacgcacaccggggaaggaaagtccggaagtgaaggaatggctgaagtacaaacgctcgtacctgccccaaaaagataccctgaggctttcgtctactgatgtcgtaaaatcgcttcacctgttgatggaagccaatcccgccaaccaaatggcacgggattatttactttgtttcgatttgctgatgaaggatctctccgcttttctgaaagattataagcgataccataccggagcacctaaccgtctgtacgcagaagctttattgattcatctttatcaaaagcgggcaaccggtagtgaaatcaaatccacaggcataaaccctgtcatcgtacaggattttaatgaatacaaccggttgcatacacaaggcaattcatctgcactggaaagcagattcggaagaacgtattggtactattatcagtttgcacaatttcaataatgttgatcatgaataagatgcagttgtttttcatattttggctggcgggactggcggcatgtactcccattcccgagaatgtgacgcgcgtaaaagaatgtgctcccatctatcccgactataccgacattactataccttataatatagctcctatgaattttatgatagaaggagctgaaggattgcaggtcactgcctacggagatacggacagtctgcggatatcgggtaaagacaaagcccgttttcccatcggcaaatggaagaaactgttgctgcaacaaaaagggaaatcggtgcaagtacgtgtaacggccttgatgaagggcaaatggctggagtatccctcctttcaatggcaggtagctgccgaggcaatagacggctatctgagctaccgcctcatagagccgggatatgaagtctggaataacctgcaactatgtgaaaggagtttggaagatttcagcgaaaaggtcatagcggacaataaactgacaggtggtaattgtatgaattgtcatacttacggaaagcaaagcggtcggctttccatgtttcatctgcgtgggaaaaacggaggaaccatcctcaaccgcgatggaaagttacgtaagctcagcctcaaaaatgattccatgatttcagcggcggtttatggagacttccatccgtccggacgttatgcagtgttctcgtctaatatcatcatacctgcttttcatgcccaaggcagcaaacgtctggaagtctatgataccgaatctgatttggcaattgccgactttgaacagaatcggatgattctttctccgcttacccgggataaaaaagtattggaaactttccctactttctcggcagacggaaaacatatttattattgctcggctccacaaaccacgttgccggacagtatctgccagttacgctattcgctttgccgcatcggttttgatcaggaaaacggttcttgggggaaacaggcagacaccttatggaatgcacgcgaacaacaaggctccgtctgttttcccaaagcgtctcccgatggtaaatacctgctgttcaccatagccgactatggaaccttccccatctggcatcgggaaacagacctatacatactgaatctgtctacagagaccatccatgagtgcagtgttgcaaactcggatcgctcggacacttatcacagctggtcgtcaaacagtcattggtttgtcttcgccagcaaacggggagacggacaatatggcaagccttattttgcctatatagataaggaaggaaagatttacaagccatttgtcttgccgcaacaggacccggcacattatttccatacattcaagtcctacaacattcctgaactatcgaagagtccacttccttttgatgctgtagacattaaagagatttatctaaatagtcctgcagaaccatttaaataatcgttttatttttacggtagttgtcccgaaactcacttggcgtgactccctttttctttttaaagatgcggttgaaattggataaattattgaatccacagtcatatccaatttcagctatcgacaaagaagagtctatcaaggctcgtgaagcagcccccaaacggatatctgtaaggaagtcaataaaactcttggaagtatgttgcttaaagaaacggcagaacgaggattcgctcatatttaccatttccgccacttccgataggcggatgacttcggaataatgccggctgaggtaatccatcaccctacccaagctctcgtcggaagaatgctgatgcatgacatttgcggcaaactgtccggtggataattcacgcatacctttgtctatcgataactcatgcagaatgatgagcaacttaatcagggaataaaagctgtcgttctcgcaggtaagggttttcagcaacgggcgcaccttagctatggattcccggctgaatgcgacacccctttcggcatggcggaaaagttgtcgtatgctaatcatttggttcttattgaggaaagtgtcggtcaacaagtcgggatgaaactggatggtaatttcatggatgtttttcgatacattgcgatagtctttccaagcgtgctccaagtggggattggtcaccaataccaattcctcttcgtctatctcctcgatagagtcacccacaatgcgttgtgctcctttggcgttctcaatgaaattcagttcacactcgggatgtatatggataggaaaattaaagttcgttttctggcgctctatcaaaatgaaacaatccttggatgacaagggggatacttctttgaataattcagtgtttatcatattttcgattaataagattcaagtatttgcgtcaaaggtacaaggaaaagtgaaaacaaaaataaaaagcaggatgttttttcacaatactagtaaatttttaccgacactttaaaggttaaatatcgaaccatataaagcaggttcatagatatataagaaatcatttaaatattatcacaaacgaacatctcttttttgtgtggaatagggttaattatgaatatttatttggtaaatatgcgaataacggttatctttgcaccaaaatttatagataatatgaaccaattatgctctacatatagcacatatagcgttagatgggaacgagaaagcctgtgtaacagcttcattgtacacgtgcattggttcagtgggtttatttgagttttatccattctattttttcttcattccaacaggctgtggaaatgaaaagtatattagtggtgactttgtttttagtcatcagaatctatgtttcattctaaaagtagctattttatgtttactattatatctataatgtttacaggtatcggcattggatatctgttgcgtgatttacgatttttgcaaaaagtagagaaaagtatttctcttaccatattcctgttgctttttgttctggggctttcaataggttccaatagcttaattattaataatatagggaaattcggatggcaggccattgtacttgcaactttaagtattttaggtagtttactggcatctttcctggtgtttcatttattttttaagaaaggaggtaacgaatgaaaggtagtttgattgttgtggcgtttttctgtgtcggttgtttgataggagcagccaatgagttccggttttctacacacaatgtttccatgtatgtgttgtatgcattgatgttgcaagttggaattgggattggatgtaacagacaattaaaagagttgattaaaagtttgcgattcaaaatgctgctggtgcctgttgctactattacaggaacgttgcttttttcggcatttgccagtttgttattaacccagtggagtgtttttgactgcatggcggtgggaagtggctttgcctattattccctttcttctattttgattacacagttcaaagaaccttctatgggattacagttagccacagagttaggaacaattgctcttttggcaaatatttttcgtgaaatgatggcacttctcggtgctcctcttattcggaaatactttgggaggctggcacctatttctgctgccggagttaattcaatggatgtattattaccttctattacccggtattcgggaaaagacatgattccgattgctatttttcatggaatcttgattgacatgagtgttcctgtgtttgtttcattcttttgtaatttataaggaactgcatgtaaaaccgttgtttccacatgcaatcagccatgtctcagcaatataaattgtttttccttttctcctttcattaaccgttgaaaggtcctgctgatgggggttcggtagtgaatggacatcttgttttcaccctttcatcctcctttcatttacaaaacttcacactgctgaaggcagattttgaaagggccgggtaagacggctgaaacgaggatgaggggatatcctgtcattcttaataaactaattatcagtgtgtttttattaaaatgtaaggatgaacggacaaaaagaaataaccgacttggtgaggggaggtaatctgcccttacaggaaaaacataccgagctttttaaaaaagatggtgatgttttcaaaaaagaccttgatgtttaataataagctcggcatgtttttaagaaacatcaaggtctttttgcaacatgcagtgcgagctgtctatttgtaaagtgtgtgtacgtacgcatcgggttatacacatacggtgacacaagcctgcacgtacgtacgcacgagcctgtacatacggtggcataagcctacacatacgtacgtacaagtctacacgtatatatgttattttttatttttttttggctgcaacggccaacaacactcccagtacgatgcccaatatggcggcaaacagtactctcatattcggagggagcaggaaagtgatggtatgtgccggataccagaacaaaggaatggttttcttgaatacgaatccccacaacactgcccagttcagttccgtcataatccgtttcatggggatgggagtgagcagtgcctttaccgaaccgccgcagtgacctatgtgggtgtcggttatcttgtgaagagtcataaagacgggggcaaaaatgctgttcatggctaccgatatgactaatgctatcattattttctcaaaacacatttctccgttgatggtggaggaagcatttgccatacccatatattccataaacatcggcactccttttgagaagataatcattgccatattgatgcccatgccaagcagtccccataccaccatccggggaatgattccgaaagtccggttgatataaacaccggtactgatgcgcagtccgatcatttcgcccatggtagaaaggatggcaaacttcaggaaactcatgaccatgccatgggtggcgttaaaggttttgtaccattcataagcatcatcgcttataaagaaggggagaaaaatggctgtagccaccaaaagaaagataaaatcgctctttttcattgtttaagttgtgtttttcaataatataatggacaaacatacaaaaaaacttctaggttcctatcaaaagactttctttattttattgtttcttatacctggaatgagaaaaataatcggaaaaaaatgaagtgtttgataggaaaggttgctgttgtgattataatatgtatttttgtaatagagtaataatgaaattctttgtatagtatgaagacacctcttctctcgtttttgttttttctggtgatatttggagcatgtatatccgataggaagccggcgtcggctgttgattatagtttattggtaaacccgtttatcggaacagattttaccgggaatacctatcccggtgctcaggcaccgtttggcatggttcagttgagtccggataacggcttgcccggttgggaccgtatttcgggttattattatcccgacagtaccattgccggtttcagtcacacgcatttgtcgggaacaggggccggtgatttgtacgacatctcctacatgcctgtcacccttccttatcgtgaagctgaagcgcctttgggcattcattccaagttccggcattcggatgaagaggcttctgcaggatattaccgtgtattgctgaaagattataatataaatgtggagttgactgccacggagcgttgtggcattcagcgttacactttcccaaaagcgcagtctgccgtattcctgaatttgaagaaggcgatgaactgggatttcacacaagactcccatatcgaggtggtggattcatgcaccatacagggatatcggttctctgacggttgggcacgtggacagcgtgttttcttccgtacccgtttttccaaaccgttccggtcttccgaaatagatactaccgccatcatacaggatggcaagaccataggtactgcatacgtggcacgtttcaactttgatacgaccgatggggaagagatagtgttgtgtacggctctttcgggagtaagcatggaaggggcagctggaaacctggcggctgaggctcctcataatgactttgataagtatgtggcggagaccaaagagaattggaaccgtcagcttgggaagatagaggtcaggggcatctgtgacttggatgacaaggtgaatttctatacggctttgtatcgcaccatgatagcgcccactgtctttagtgatgtggacggttcgtattatggacctgataagaaaatacataaagccgatggctgggtgaactatggcactttttctttatgggatacttatcgtgccgcccatccgcttcttacttataccgagcctgtccgcaccaatgacatgataaagtcttttcttgctttttatgaccaaaacggccggcttccggtttggaacttttggggtagtgagactgatatgatgattggctatcatgctgttcccgtcattgtggatgcttatttgaaaggaataggtgactttgatgcagagaaagcattgaaggcctgtgtcgccactgccaacttggacaattatcggggaatcgggctttataagaagctcggttatattccttataatataaaagatgagtataatgccgacaattggtcgctttccaaaacactggagtatgcttttgatgattattgcattgcagagatggcgcgcaagatgggaaagacggaactggcggaagagttttacaagcgttctcaaaactacaagaatgtattcaatcccgctacaggatttatgcagcccgttgatgacaagggtgtttttatccggcctttctgtcccgatgactatacagcccatatttgcgagagtaacggatggcagtatttatggtctgtgcctcaggatattcgcggactgataactttggtcggaggaaaagaccgctttgcagagaagctcgatagtatgtttacgtatatccctgccgggaaagaggatttgcctattttcagcaccggtatgattgggcagtatgctcatggcaatgagccgagtcatcatgtcatttatttgtataataaagtacgtcagccgtggaagactcagaagtatgtggcacaggtgatgcatcatctttatttcaatgcacctgccggactgtgcggcaatgaagattgcggtcagatgtctgcctggtatgtattcagtgccatgggcttttatccggtcaatccggtaagtggtgagtatgaaatagggactccgttatttcccgaaatgcgtatgcatcttgataacgggaagacttttacagtgctggcaccggctgtcaaccgtgagaatatctatattcggtcggtcaagttgaacggaaagccatacgataagagttatatcacccatcaacagataatggacggggctactgtggaattcgagatgagttccgaaccgggagagatttggtatcgataattcgtttcatcggaaataaaataacatcaaatagaaaacaatgaaattcaatagactcgtaagcggttgtttggtaggattattatgtttgagtgcatgttctacccaaacaacggaaatgaaagaatacaccggttatgtcaatcctttcatcggaacgggaggacacggacatacgcatccgggtgccatgttgcctcacggaatgattcaaccgggtcctgatacgcgtatcgatggctgggactcctgttcgggctactattacgaagattccaccatcaatggttttgcccacacacgccttagcggtacgggctgtgccgatttcggtgattttcttttgatgcctaccgtaggtgagcagaaggtggaatatcttgggaaagagagtcagcagcgtcctttcgcttctgctttttcgcacaggaacgagtatgccgaaccgggatattattcggttttcttggatacttacggtgtgaaagccgagctgacggccactgagcgtgccgccatgcaccgttatacgtttcctgaaagcaaggaatcgggtttcattctggatatggactataatattcagcagcaaaccaatcaggtcatggaggtggaggctgtcaatgataccgtgctttgcggatacaagcgcagtgcttattgggcttggcaacaagatctttatttttatgctgttttctcaaagccttttacccatactctttataccgataccatcgaggaaggcggacagcagattcccgtctgcaaaatgttgctccgttttgatacggctgaagatgaacaggtaatggttcgtttctccatctcgtctgtcgatggtgaaggagccaggcagaatctgttggctgagttgcccgactgggatttcgacaaggtgcgtgccgatgcccgaaagacttggaatgattgtctttcaaagatagaggtgaaaacggaagaccccgaccaacttgccattttctatactgccatgtatcatgcattcttgagtccgaacttgtttaccgatgtagacgggcgttatttgggaatggatttaaaagtgcacaccaccgataaggaagatcctgtttacaccactttttctatttgggacacatttcgtgcgttgcatcctttgctcaccatcatagaccctcataccaacgaaagctatatccgttcattgttgaagaaacagcgtgagggaggtgttttcccgaaatgggattgtgctgccaactacacgggaacgatgattggctatcatgctgcctctatcatcaccgatgcatacgtgaagggctatcgcgatttcgatgttcgcgaagcctaccaagcctgtctccgcactgccgaatacgacacgaccggcattgtcggtccgaagtggctggttccttttgtgatgccccgtgcccgttattacaaggatgcgctgggctatattccttgcgacctcgaaaacgaatcggtggcaaaggcattggaatatgcatacgatgattggtgtatatccgtattggcagatagtttgggagatgtggaaacaagagataaatatgctcgttttgccggggcatataagtcttacttcgaccccgaaacccgttttatgcgcgggcgggacagtaaggggaaatggcgtactccgttcaatcctcgttcgtctacccatcgcagtgacgattattgcgaaggtacggcttggcagtggacttggtttgtgcctcacgatgtgcccggtctggttggcttgatgggaggagaggaggcttttgccggtaagctggattccctgtttactgtttcttccgagcttgaaggggagacggtttcggcagatatttccggtcttatcgggcaatatgctcacggcaacgagccgagccatcacatcatccatctgtataactatgtcaatcgtccgtggcggacacaggaattggtagacagcgtgctgcatagccagtaccgcaatgcccccgacggtctttcgggcaatgaggattgtggccagatgtcagcctggtatattctgaatgcgatgggcttctatcaggtgtgtcccggtgagccggtttactccattggccgtcctttgttcagggaagtgaccattcaccagcccggtcagagggagtttgtgattcgcacgaagaacaactcaaaagaaaacaaatatgttcagtccattctgttgaacgggaaaccgcttgaacggcctttctttacgcacagcgacctgacggcggggggagtgatggaaatcactatgggagctgaaccatttaaaccgtaaacgaatcaggcgatatgatgataaagaaacttttcctgtcagttgtactcctttgcctcactctatgggtgcaggcaaaggactatgccgattatgtgagcccgttggtgggaactcagtcctccttcgaactttccaccggcaacacttatcctgcgactgcccgcccgtggggaatgaatttttggacaccacaaaccggaaagatgggtgacggatggcaatatgtttatactgccaataagattcgtggctttaagcagactcaccagcccagtccgtggattaacgattacggtcagttttctctgatgcccgttaccgggaagccggagtttgatgaagacaagcgtgccagttggttttcccataaggccgaactgtcgcgtccttattattataaggtgtatctggcggaacatgatgtagtgaccgagcttacaccgaccgaacgtgcggtgatgtttcgcttcacttttcctgaaaatgattcatatattgtggtcgatgctttcgactgtgggtcgtctatcaggattattcccgaagagaataagattataggctataccacacgcaacagtggcggcgtgcccgataacttcaagaactattttgtcgttgagttcgacaagccgtttacttatcgggccaccttctccaatgatgagaagcctaaaaggaaaaaggatgaggtttccctttctttaaagagagacgtcatggagcagaatgcttttcacacaggagccgttatcggcttcaagacccgtaaaggggaagtggtgcatgcacgggtcgcctcttcgtttatcagtcccgaacaggcggaagcgaatctgtgtgaactgggtgccgatgatttcgatacgctggtgcgaaaaggcaaggatgcctggaaccgggtgttgggcaagatagaggtggaaggcggaacagacgaacaatatcgcaccttctattcctgtctctaccgttcgttgctttttccgcgtaagttttatgaaatggatgcgaaaggacagccgatacattacagtccttataatggcaaggtgctgtccggttatctatataccgataccggcttttgggatacattccgctgcctgtttccattgctcaacctgatgtatccgtccatcaacaaggaaattcaggaaggtctgataaatacttataaagaaagcggtttctttcccgaatgggcgagtccggggcatcgcggttgtatggtgggtaataactcggcctccgttttagtggatgcttatatgaaaggtgtgcgtgtggaagaggtggaaagtttgtataaagggttgctgcacggaaccgaaaatgtgcatcccgaagtatcctccaccgggcgattgggctataaatactataaccgtttgggttatatcccatacgatgtgaacatcaacgagaatgctgcccgcacactggagtatgcatacgatgactggtgcatttaccgtctggcaaaggaattgaaacggccgcaggaagaaattactctctttgccaaacgtgccttgaactataagaatcttttcgacaccgaaagtaagctgatgcgcggcaagaaccggaacggagaattccaaaaaccgttctctccgttgaagtggggagatgcatttaccgagggaaacagttggcattattcctggtcggtttttcatgacccgcaggggctgataaacctgatgggaggtaaagaaatgtttgtcacgatgcttgactcggtgtttgccgttcctcctgttttcgatgacagctattacgggcaggtgattcacgaaatacgtgagatgacggtaatgaacatggggaactatgcacatggcaaccaacccattcaacacatgatttacctttacgactatgccggacaaccctggaaagcgcaatattggttgcgtgaagtgatgaatcgtatgtatacttcggctcccgacggatattgcggagacgaggacaatggccagacttcggcttggtatgtgttctcggcattgggcttttatccggtatgtcccggaacggatgaatatgttctcggtgcaccgcttttccgcaaggcaacccttcactttgaaaacggcaacgactgggtactctctgctcccgaaaatagtgaagtaaaccgttatatcgaccaaatgctggtcaacggccgggtctatacggcaaactttctcaagcatggtgagatgttgaagggcggtaaggcagagtttcgtatgtctgcccaccccaacttgcagcgcggaatacaggaggtggatttgccttattctttttcaatagatggagtgtgacagatatatgatggaaagtgttagtcgtcatcatcgtcatcatcccaatcgtcatcgtcacgatcatgccatttgggatgtttatggcgtttatgctttttatagtgtttgtgatgatgtttattgtgatgatcgcaataagaacaataatgttcatgccaacagttgctatgataatgaatcctgtcatagaacgggttataatatgttgaaccgggtttgatacctatttctaccagaatacgattccagccatatcggtgataacgtttatagtaatcacatacatcccgcatgtgcttgccggaagttctggctatttcaagagccaagccaacatttccccaatcgcttccacatcgcctataatagtcatccaatgaacggttggacacattatattctacacataaacgcttccggtaatcagataactctacagaagcgtatttatttgctctgcctataaacagcgacaacctatcctgtgcgaacatggaacaagatatggcaatgaataataacagaatttgaaatcgtctcataatgttataaaattattcgttgagtaaaatcattagagccacaaatatagatattaaatatacaacaagcaatcttttcttggaacttcagcgtaagatttaattattgcttgatagaagcttttaattatcagtaggatacgaaatattttgtgtcttgaggtatggcgttttgaataatgggtatggtttttattgattatatatggtatctttgcaatttcaaaatgttcggttatttaaggatataaaagaatatatcagacaaattattgagacaagacaatatgcgcagttggaatgtgtttacacatttataattcgacagagataagttgattgatttttatttgtaaaacgaagaaaaatatgaattggttgttattgaatgcagctccgggcagtaagcttgagcaagcgttggaaaagttggtagattttggaatggatgcaggtaaggatatatttgttgccattctgatatattccattggtcgttttatcatcaggcagataagtatattaattgccaaagttcttgaaaaaaggaagatagaggttagtgtgcagacttttttgaagagtctggtgaaaattttactgaatatggtacttgcttttgccataattagcaagttgggagttgaaactaccagttttgctgcacttttggcatcagccggtgtagctgtaggtatggcgctttccggcaatctttctaattttgcaggtggtttgattatacttgtttttaaaccgtttaaagtgggcgattatatagatggtcccggggtgagcggtaccataaaggaaatacagatttttcacaccatactttctactcttgacaatcgaatgatctatgttcccaatggaatgcttagcggaaacgctgtgactaattatagtaaacaggaaatgcgtcgtgttgaatgggtatttggggtagaatatggagaagatgtgaaaagggtcagagctgtattgcaacgtattatcaatgcggatagccgtattttggatactcccgctcccataatcgttttggggtcgttaagtgcaagcagtgtggatattaccgttcgtgtctgggtaaaaagtgctgattattggagtgttttgtatgatatcaatgaaattgtttatacgacatttaatgaagaaggcatcgggttccctttcccacaactcactgtacatcaggcaaaagattaataaggtataaatttaacttcttaaataagtgataatgaaaaaactaatttgtttatttactattttggcatttcttggagtagccaacagtatggctcaaggattgcattttggtttaaaagccggtgtgcttggtaataaagcaaatgtcagcggtatgcgtaatcagtttaaggaagagagtttgaccggattccaagtaggacctatgttgcaatatcaaacagggtttcatggcattgctttggatttttctttgttgtatgtacaacgcggagtgaagcttaccaatacttctaatgggcgtagcactgatatcagaacacaaagtattgatattcctatagagctgaaatgggaaatggggatatcagatgattttgatttatttttgggagcaggtccttctttctcttttttggtggatgaggataattggggacgtaaacttgctcatattgctgtagatgcgatagataaggatctttcatctatggggtggcgctctactgaagttggattgaacttgggaggcggtgtgaagattgtgaagcatctgatggtaagctgttactataatataggattgactcagtctgccaaacataatataggaggtaataagcatgacgtcatagatcagatatttgatggtgatgtatttgaaagtaaaaataggtactggcagttatcacttgcttatgtattttaatttaggcaggtataaacgatagcggtttggtatgtttcttatgggagtgtatcaaaaactcaaccggtctatcccatcgtcggctgtaggggtagggcttgcctgcccgaatacacgaagcaaactgttttcgggcgagcgaacctcgcccctacgaactaaacgacagtattatccacgttttgacaaccccaattttgtttatggaaagatatttaataaacaagtatgataaaaaatgaaactatatattctgatacaacgtttgttgaaaaggcaatgggttcgatgttttgttcttttctttattttgatttcaattatagcagttattgcaagttcatttgaggaaatgtctgaatacaaagtaccattattcggaataacctatatatcttcttttgtttttctggttgaatatacagcccgcattttatctgctcccgcgctctatcctgatatgaaagcagcaaaagcacgtctgaaatatacattttccttctatggttttgttgattttgtagcagtgattccttgtattcttacttatgtatattggaatacagaagtggtgcatattattattttgccctatatttttattatttttaaattgatacggtattcgcgttctttccgggttatcggcaaagctcttgcttccgttaaggaggagcttgagacagcctacactgccagctttattacgatttgtttttctgccattcttatgtattatattgaaaggagtgctcaacccgaggtttttgaaaacattggcgacgggatttggtgggctatcattacatttgcaacggtagggtatggcgatatttatccaattacgcctttgggaaaattattggggtgcatcatttgtttggtgggagtagcaatggtggctattccgaccggtatcatcagttcttcttttatcaatatcgtacaaaaaaaagagaagaaacaaggagaagactgcaataacgaaagtgataagcagtaaattgctgtgatacagtggtgtgcgtggttaaagtttgtttgtggcgacaacgaacttatttcttgtttttggcagaatagaagaaggcagtacacttcgagaaaaggtcatggcttttttgagaaaattttaagttcatcgttgaactaattggaactttccggcaagcattgggtatttcgcattaagactattttatgtttgttagtaattgacagtcagaataaaaagaaatcccatttaatgcttaattgcttcataatgtggaaagtatatttggaagaataagaagaaaaaaagtgtatctcttagtaagagatacacttttcgctgcaaatttacacaaagttttgataattaaaactttttgagaagaaaaatcacgagccaagtgcaaaaatatctttagtcttaagttttaggacacttttttataggtttaaacaactcataataaagtaattatgtgcgttcggtgtatctcttactaagagatgcatcggacgcaactcttttttaagggtttgaaagatgtgtatttatttgaaatagagacgataaaaagagagtacaatggactatctattcctacaccgcgacaagcgtacctttacttccgaaaggcagaagaacctgcttttccgggctgcccggatttattgggagcagaagttcgcaaactgtgagccggagaaagcaagaaaagtcgattgtgagctatataaatatgtattgtattatttggaagtgcgccaagtgtttcttgacccgaagctctcactgaagaagctgagtgagatgattgaaacgaaccagacttacctgtcgaacgtcgtgaaccgctacttcggttgtcatctgaaagagttggtgaacacgtatcgggtggaatatgccaaggaactgctccgttcgggcaagtgtctgccggaggagctgccccaacgctgcgggtttctgtcgcgaagtgcgttttatgctgcttttaaaaaggtgacgggagcctctcccaaacgttatatgaaatatggacagagagaaaagctctcggaaccaacagaatatgtataaccaattttagttttttaaatttataaatttaaagtttttctattatgaacaaaaagtttttaagtgcaatcctgttcggagccttaatggtttcgtcgacaggaacatttgtgtcttgtaaagattacgacgatgatatcgacgaaatcaacaaggaattgactgacctgaaatcaaaactttcagatcttgaaagtaaagtaaatgccggtggcgcttacgttaccaagattgaatcggtagacggtggtttcaaagtatcggtaagcgacggtacttcttacaacctgactgttgccagcgctgctgccggtagcaaggttgtgattgatgacaagaccggtgaaatcagcattgatgacaaggctacaggctggtttgccactaccggtgaaggtgaagaagcagtggatatgactccgtatgtaaaagacggatactggtatctctatgacaaaacagcaaaagagtttgtgaagtctgaatacaaagctgccggtaacgcttatgctgtagtagctaacggtatctgtacattgaacattcctgatgctgatggtaagatgcagactatccagttgcctaccacttcggctgctatcactggtgtgcaatttattgatgtgactagcggagctgttgaaactgatcctgaatacgctttgaactatggtgtggcaacaaaggacaatgctaaatgggatggtcctaagggtgcgattactaaagaccaattgttggtaggtactatcgaacctcttactttgcaggtatatccttcttctgcagacttgtctaacgcagatattaagttggtgggtagcgatggcacagttgctccggttaaggtaacagctactccgtttgaaggtgttatcaccaaggctgcttctgccaatggtctgtggaatctgaatatccggccggatgaaacggtaacagacaagactattgcagatgcatttaaggctgaaactgacaactatgcttatgcattgcaaatcaatggcaatatcctgaccggatatgcttctgaagttactcctgcagataaagcatcttctgctactgctacatctttgacagctgatgatgttaaatacaatactgaagaacttagctcagctaaagtacctttcggtaaaacagtcactcttgaatttgacggagctaaagcatacgatgcttatttgactccgaaatcggccagtgcattagaattggctggtgttactatcgatggtaagacgatgtcattcacttctactgaaaaggctgccggtaagacggttgagtttactgtgaatttcgtaaactttaagggagaaaccggtactgcttttgatataacagttaacttcgaaggtgcaacagttgatcctgaagctcctgtagcagcagtgaaatatacagcaactgatggtgttaaacctatcattattgatttaggtactacatttacaagcttgagtgctcagactgctacagcgttggctgctgttactccgacttggaatgtgatttctattgacggtaaagcggtagctacagcagaccaatctactgctaacggtaagtttgcatttacaatggatcaggtaaaatactactcagacttgaatgctgatggtacaccgaaaacagaagttacttctatcaatactgctgataatcttaagaaggttaagtatgctgtatttgcacattctgattatcaagtaactgcagctccgggtgcttatgtattgaacatgacatttgttgatactaacaaaaatgaattgaagaaagtggttgctcctgtaacaatctctgttcctacattcactgacttgttcactaaggttacttctgtatggaatgcagataagactgtcttgaacgctttgttggttggctcttctgatgcaactgttgctaaacaatatgtaatgactaacgcattcaagagtgtagaaaactcaggtgcggactgggataacttgacccttactccgaaacaaatgagtattagcggaactccgactgaggttgctacatatgctaaagtcggctcaatcttggcaatggctgatgctttgcttgatgacaatggtgcagtaagaggcaatgtaacagttgatggtacatatctggttaaaggtaaaaaagacttgaaagttgaagttcctgcatttgcagtaaactttatgtctccgttcaatgatgcggtgcttaacttctacaaaggtggtaaagtggcagatttgaatgttgcaattgcatcagatggtaaaggtactatcgctaaatttgcaggtgctgccggaaaagaagcaggtttgcaattagttgccagcagtgaaaaggtggcagttagcaatgcaatgacattgtttggtgtaaaaaatacagatataaatacagatgataagttcacattcgtagttaagggtgaaggtgttcctgccggtgcaacagctaaattgtctgctgacggtatcgctttggaaggtatgacttatgctcctaactattcagcaactcttgaaatgacagttacagcattgaatggtatcaagactaccattacattgcctatgactatcaataagccctaatcgttatcctaagtatactgtttacttaagatagatgaatcattgaagagtgtgtccgccttgtgcagacacactcttttgctataaaacaggcaggtatttaaataaccttttcaaaaacaaacatattatcaaaactattactacttttgcaaaccctttaagtgaaactttagatagaagcagtatgaaacacattttattcctcgtaatagctcttttgtcgttgacaggctgtatgaaagaaaaaccgacagcccttcgttgggctacattcaacgttcgctatgataacccacaagatagtttgaacaactggcagtatcgtaaagtacgcgtatgcaagtttattcaagaacagaaaatagatatcctcggaatgcaggaagtgttgcacaatcagtttctcgatttgcgttccggtctgccggagtatgacggtatcggtgtcggtcgtgacgatggcaagacagcaggagagtatgctcctttattctaccggaaagataaatatgaagtattggactcaaacactttctggttggcagagaatcccgacagtgtgggcatgatgggctgggatgctgtttgtgtgcgcattgctacatgggccaagttcagagaaaagtctaccggaaagatatttatggcagtaaatacgcattttgaccacatcggtgaagaagcgcgccgccaaagtgcgttacttattatcaaaaagataaaggaaatagtgggtgagcgccctgccattgtgacgggcgatttcaatgtgacggatgcaagcagtgcttatgaaaccattaccacgaatgagtttgtcatgaaggatgcttataagatagccggtcatgtgaccggtgtggattatactttccatgattttgcccgcatcccgccacagaactgcgagaagattgatttcatctttgtcactccacagataaaggtaacaggatgcgatattccggcagaaataccgggcgctctgttgtccgaccataatccccagttggctgatttggaattctagccggattccccggagactccatgactcatgtcactcccgaagaacacagtctgttcagccccctgctgatattgttcctgtgccttttctatatattgattatgcttcccatacggctgaacaagatttacaggaaatccgtcgccgggcatacttgggttgaaatgactcctgaaggactggtatacgacagggcggagcagaagaaagagattgcctgggaggaggtggcaggtgtagccttttataaggattattgttttttatacgacaaaggcggcgagttcttgcttgtgacttcggacgagagagtgaaggaatccctcctttactatctgaatgcgagaaaagtaaagtaggagggtgaagtgttttccctcaaaacgttgttcctgttgttataatgtgtatttttgtactcattaaaaccaaatcaaaaaaatacgtttatgagcaacttatctaacatgccttgggaagaccgtccggtcggttctaaggaagtggtgtggcgctactctgccaatcccatcattccgcgcgatttgcttcctacttccaatagtattttcaacagtgccgtggtgcctttcggtgacagttatgccggagtgttccgttgcgacgacacgaatcgccgtatgcgcctgcacgtgggcttcagtaaagatgccgttcattgggatatccatcccgaacctttgacgtttgagtgtgacaatgccgaagtgggcgaatgggtgtatggctacgacccgcgtgtttgcttcatagaagaccgttattatgttacctggtgtaatggttacaaaggccagcctaccatcggtgtggcatggaccaaggacttcaagactttccatcagctggagaatgcttttcttccgttcaatcgcaacggagtgatgtttccgcgcaagataaacggacgttatgccatgctgagccgtccgagcgacaacgggcatactccgtttggagatatctattacagcgaatcacccgacatggagttctggggacggcatcggctggtgatgagtccggcaccctttgaagtgagtgcatggcagtgcctgaaaatcggtgcagggcctatccctatcgaaacaccggaaggctggctgctcatctatcacggcgtgctccgctcgtgcaacggttatgtatatgctttcggttcggcattgctcgatttggacgaaccgtggaaagtgaaataccgttcgggagcctacctgctttcgccacgcactccttacgaatgcatgggcgacgtgcccaatgtgtgcttcccctgcgccgcgctgcatgatgaagagacaggacgcatcgccatttattatggctgtgccgataccgtgacggggcttgccttcggttatgtgcctgaaatcatagaatttactaaacgtacttccatcatttaactcaaatgattatctttgcggcataaagaaacaagcaaagatttcatcatgatgaaccggaacgtacttcatttgacatgtcctcctatacctgtcctccgcattggctttgtggggctgggtaatagggggattttggctcttgaacgatatatgcatctggagggtgtggaggtaaaagccctatgtgatttgcgcccccggaatatagagcgtgccactgcattgctccaccgtttcaaccgtcctgcggctgttgcctatggcgaagaaggcggatggaggcaattgtgcggacgtgcggatattgacttggtttatatttgtaccgattggctgacacataccgatattgcggtatatgccatgcagcagggacgccatgccgcccttgaggtgcctgccgccatgagcgtggcggactgctggcgtttggtggataccgccgagcagacacgccggcactgcatgatgttggagaactgttgttatgatgcttttgccttgacgaccctgaatatggtgcggcaaggggcattgggagagataacccatgccgaaggagcatatatccatgacctccgccggcattactttgccgacgaaacggaaggcggctatcataataactggataaagctgtataggcagcagcataccggaaatccgtatcccactcacgggctgggtcctatctgtcaatggatggacattcatcgtggagaccgcatggagtatcttgtatccatgtcgtcgcgtgaagcggggctgtcggcttatgcccgcgggcagtttggcaagcattccgccgaggctgcacaaccttatctgatgggagatgtgaatacgacattgattcggacggtcaaagggcgtactatcgtattgcaatatgatgtgacgactccgcgcccatacagccggcatcagactgtgtgcggcacaaaaggcttcatgcagaaatatcccgtgccttgcatcctgctggacgagtatggtaaagaacccttggcaggagaggattttgagaaagtaatggaacgttataagcatccgttcactgctaccatcggtgaggaggcaaagcggaaagagatgccgaacgagatgaattatatcatggattatcgtctggtgcattgcttgcgcaatggtctgcctttagatcaggatgtgtatgatgcagccgaatggtcgtgcatcacggaactgagcgaactttcggtgcggcagggaagcattccggtggagataccggattttacacggggaaattgggaaggagacaagtgatgttcttgacagagggagcgttctcctttctccttacctttcgccttttatggtaaaagagtcaagaatccgttttatctcttcgattttccccggattctttttggcataattttctctcatccttatggttacacaatgtaccatgtcatcatcttgctgtaataaatagtaaacgcgatatatattccatgtcttatcatattcttgactcttttgcacaatgacaaacctttcttgattcttattggatttgattctcgttttgctgcagagccggataggaccggaaatctttttcatttccaattcttctacttcttttaaagtaataggggatgccttatctattttctgatagctttcaataaaacacaatacatgattcggtaagtcttcccggaaattaatcaatggagtttcccatatcagataatagagatgacaaccgatggaccgggcgtctcgctcttccggtataatgccattgcctttttcattctttgtgctccaatggcaaggcaaggtgatggagtagaacttattgctaatctctttccattcctcattatgttgcttggtgaaggagcaacataacaggaacagtaaggagtagaagatagcggattgcttgttcatgatatgataattatggttagttatatgctttaatgccaataacgttccggtgaatgaaagttatatttctattaaccacggctgtggttaactctaaccacctacgtgactaactctaaccacccgggtgattaggcttaaccacggtcgtggttaagcaatcacgatatgctttacaccaagatatgtatttactttataagtatgtattcagtcagcacttccttataaaataaataaggacagccgaaaggtaaatccggctgtccttattcaatgctttgagttctctttttattccatatctacactatgctttacgggagagaggatgaatgtaaattcatagtcaccgtaaggcaattgatatttaggcaatgctatggttccccaactgttgacgcaacccaatcccatttgtgccttgtcgatgcacaagttggtgaggttggccttcttcacttcgggtgagtgacgctggtctttctgtgcgccgtcatccagtgattcgatggtgtaatgcaatgcagaggcagagaaaggagcttcggctacaatcttcacgccattgccgccggcattcaactgtttccaccaacggatgtcggtcttgtttccggtttcctgcggacggatgtaggagtagaattgttcgtctacactctggcgatagatgcccaaatcggtgctatggttacggtcactgtagttttcaaccgggccgcgtccgtagaactcaatggtattgaagttcttcggcatttgcatctgcataccgaaacggaacatcggagataccttggcattcttatcggctgtcatcttttgggtgattttaacggcaccttggttgttgatgacatactccagataaagtttggcagaaacggctttcatgtcgtattcggctgttacctgtacttgattgtctacggtagtggaagccaggcggacaagtttcaatcccgggtttttccatactgcaaagcggtgttgcaggccggcacccatatcattatcggtcggagcacgccagaagttgggggtcagtgcagcgccttctttaatcatttccagcccattgacatcgtatttgctcaggtaaccgttggctttgttgaactcaacagtgaagttctcacctttcacaatcaggtagtttcgctggttgtcgatgatttggggagtaacgatagccacattggtggtctctacattcttcaactccatggccggagccttgtagggattcagagtgagctggtctttggcaactgtatgaccggcagccaataaaccttcgcggttcttcagtttgtaggatacgttcaacagccattctgtgcactggcaagtcttgcctaagtcaagtttaatcttggcggtctgctgcggagcgacattgagattatccacacgtcccgaacggattgcttttccgcctttcagcacttcccattccatatagtaggcagaaaggtcgcggaagaagttctcattgtaaacgtttacttctcccttgctcaggtcggcaggagtagtccagatgttctgatagaaatagcctacttcgtgcatgtggggattggggttacggtcggggctgatcagaccgttgtcgcagaagttgttgtcggatgcatcgaagcggttgaagtcgccgccgtaagcatagatttcaactccgttcttgcctttccagcgaacggactggtcgacgaagtcccaaatgaaaccgccttgcaggttcggatatttgcggatgatgtcccagtattctttgaatccgccttgagagttacccatggcgtgagcatattcacactggatgagcggtttggtggcatcggtacgctgaccgtatttttccatgccttcatagccgtaatacatcggacagaagatgtcggtgtgctctttcaagccggcttgttcgtactggcaggcacggctggggtcttctgcctttatccatttgtaacatgcttcgaagttggggccgtctccggcttcattacccaatgaccagaagatgatgctggggtgattgaaaccacgttgaacattacgctggttgcgttccagatgtgcttgcttgaatgacggattctttgccagagtagcttcaccgtagcccattccgtgagattccacatttgcttcggctattacataaataccgtatttgtcacaaaggtcgtaccacaggttgttgtccgggtagtggcaggtacgcacagcgttcagattgtattgtttcatgatttgaatgtcctgaagcatacgttcgggagatactacatatcctccgtccgggtcgagctcatgacggtcggctcccttgaaaagaacagcttttccgttgaccaggatttgacctcctttcagttcaattttgcggaaaccgacatttacggggataacttcattgcttccctgcatgctggcacgcaaagtatataaataaggagtctcggcactccatttattcggattttctacgttcatggtcacagtgccgcttcctttggcggtagccgtggctacttgcttgccggtggcatcgaccagttccaaatcgacggttccgcttcccttcaggtcgagcttcacagccaatgagccgtttttatattcagtatccaagtcgggagtgacgcggatatcctgaatgcgcttcttgttgcgtgcatacagatagcagtcacgtcctacaccgctgaaacggaagaagtcctggtcttccagataggtaccgtcgcaccagcggaatacctgaaaggcgattaagttcttttgtcccggtttcaggtaaggagtcaggtcgaactcggcttccagcttgctgtcttcgctataccccacataacgtccgtttacccatatatacatattggaagtgacggagccgaaatgagcgatgatatctttccctttccacgaagcgggaacaatgatttcgcggcgataagaaccgacgtggttgttttcggtcggaacttcgggaggattgttcttaaactggttgcgccatgcatagcctacattgacataaatagggtcgccgtagccgtttaattcccaaacgccgggaacctgcatatcgtcccaacctttatcattgaatgttgttttccagaagtccatggggcgtgcgtctgcatctttcacccaattgaacttccaggcgccgtttagcgtcatatagttggctgatgattctttcagtccttttttagctgcatcggcattttcgtaagcaaagtagttggtgtgcatcggggcgcggtttaccgcatttacctgcgggttgcgccactcattggactgtgcgcttgctgcgagtgcaaatacggtgaacagtccggtaagaagttgttttttcatgctataataattataaaggttttgtgcaaatatagtgaaaaactatagtacttatgggcatagaccgggcaatatttgttataattgtacttattttataacttattcttaaatataatggcatttttgaaaggtatatggggaaaatggcagcatttgctgcacgatgacaaatggaagcataaaatttatgtagtcatctttgagagcgatacttcggcagggaaatggtttgatgtggcgcttatcgggtttatcgtgcttagtattctggtggtgattgtcgaaagtattcaaggttggtcagcagtgatcgggccttatttgcggttttcggaatatgtctttactttcttctttaccgtggaatatctgttaaggctttattgttctccccggccgcgcaagtatgctttaagttttttcggtattattgacttgctggcgactttgcctctttatataggctggttcttcggcacggcgcggtatttgctggtaatccgtactttccggctgattcgggtgtttcgtatctttaaactgtttaattttctggacgaaggaaacttgttgttgcattcactgacctatagcagccgcaagattattgttttttttctctttgtgctgatattggtcatctctatcggaacattgatgtacatgattgaaggacagcgtcccggcacggctttcgacaatattcccaatagcatttattgggcgatagttaccatgaccactgtcggttatggcgatatcactcccgaaacccctttagggcgtttcctttcggcagtggtgatgctgataggctataccatcattgctgttcccacaggaattgtatctgcgtcaatgatgaaagaacacagacgcaggcaagtcctgaaatgtccgcactgtggaagagacggacacgaagagggagcagcctattgcaaatattgcggagggaagttggaataaaagaaactgtcattccactacccatcttttatcatgcgggacaaccgtttgggggttgtaatacatgccctctttggtgggtattttcagcttataagtccttttgctatgattggctaagctggtttccctcaaccacgggttcatattcttcaggatggccaatgtgattcctttgctgcgggcaaagcgggcaaggtttgctattccttctgttacggttatttcggtataagggatggcagggtataaatcagatgctctcagccggaaaccaaaagcagtcgggtcggagaacataattttggcagcgaggatacgatatacatagcgtgcggtttcttccaccaattgcaaatccagtgaatcatctacatcttgttttgccagttggctggcaattcttgcctgtccggcattataagaggcggccactgccacccagtctttgtatttggcataagcatctttcagatagcggcaggcagcacgggttgctttttccacatgatagcgttcatctatgttggaattgacttccagtccgtagtctcgtccggtcccttgcatgaactgccacagtccggcggctccggcagaggagcgtgcgatggggttgaggttgctttctattaccatcagatatttaaagtcatccgggattccgttttccttcagtatgggctctacgatagggaaatagcggttggctttctttatcatttgcagggatgtgctgtgcatataggtaaatgccagcagttcgcgatccatacgctcatgacggtcgtatcggctgaggtctatcgtttttccacagaaaatgacactggccggcacttcgggactgctgtatttcagtgcggtgataccaaaatctttttttatggctgtacttgctgtgtcttcctgttctcctttcggagcaacgcaactgctgcccacaagggcaggtgagattgtgaccaaagcaaaaagcatggctgcggttatgttcagtgtatatttcttcatcttttttctactttcttccggcggtggtaccatcaggttatttttatatcatggcaaagatagcttttttgccttataatacctatatttatttttgcaaaggtgtaatttatcgtttggtgctgtgcctgttgataatttacgatttgcagtgatgaagcggattaaacgggaaaagaggtagcagaagaaaggatactgactatgctcttattttgttccgcttatttttattgtagtaaatattcttcggatatgtcttatttatggaatatatttttctatctttacagccattaaaggactggagtctctaaaaagtctaatacatgtgaaggtagggtagcaggttttgacttttcagaaatggatactcagccatagtacgaaatcaatatcgaaaattatgataaagaataaagctcaaaaacaaaagctgctatccccggaagcatatattaaggagaaagcaagacagttgccgatagtagagtgctatataggaacgaaatgggattatatgggggaaaagacagttattgtcactcgtcaacatccgcaaggacactttacgatgggagtttatttggtggatatttattgtaaaggtttgcttcattccgaatatttcttcaatatgaatcatgacgattatgaaatgatggtgaaacgtatcgatatggatgaggacttgaaaaaagcagcgtatgccgatgcccataagttggtgtatggtgctatcgattttgccgaagctgtaggaatagattctgaggattctttcgatatcacgaaatatattctggatgaaaagaaggaggagataccgtttgctgaatttggcagaaatggtaaacattacctgcgtgccgatacagatgaggaagctgaactttatatacctattataatggaggcaatcggcactgattttacttacagtatagaaggagtgactgatggagaagtggatgcagcagaggtgccttttggtgattttgatttcagtgaattgaattatgatgaagaagaattcgacaaaatgtttgagaaactgaatagggaatctcaggattgatgttgtatagtctgttagattatcacctgtagggacaagcatatctcgtccctacaggtggcaatagcagcgttatcaacgttttgataccctttcttcttattcttatttaggtaaattgaaagcgacagacatttctttcatttgttcctggctcatgccgtcgggttcaaagcccatgttctttgccgcgatataaatcaatgctgatttattcaatacatcaatttggtcgaaggctgccattacatcgcggtccacagcaaagatgccatgcttttcccacatgacgacatcatagtctgccagttccttgatagtggcttctgccagttctactgagctgggaagcgcataaggaatcatgcctaggccgcgcggacagaatgcttttgtttcgggaatcatactccacagcaggttagtggctacatctttttccatgaatttcttgttgtgcgacaaggcaatcagttcgatgggatgcgtatgtacggatgctttataaggagaacctttactgatgaggtaattatgcacgctcagatgagaaggaacttcagaggtgggctgaaccggtttgtcggctataataacgtagcttgcgcagtcatccagaatgcggataacagaaccgttgtccatggggcggcgagctaaatcacgcatacgcatgttggttcctttgcaatagaaatagcatcctttcagatgaggcagtgtaacgccgatttgtttaacttcactgatggcaggcatattgcggatttcgtcgtctgcgtattctgtgatgttaacggtgatatttcctccgttgcgttctgcccatcctttttgccataaataaccggcaacttctgctactttatttacttcatgtgccagctcggggcgattgtctaaaattgatttcatatttctttttgatttgattgttctgtaatttacaaatatagcaaatattaaatatcctctctgtaacaggcaagatatttatgataagcttcttcccattgggttgtattctgcggctcgaaggagacggtctctacagaggtactgatgagacggcgcatggcggcaatgtcgtttaccagtccgtttgcttttgcctgcagcatgatattgccgattgctgttccctcactcggtcctgccatgacaggaacacccactgcattgcaggtgaattggctgagtaggttattgcgtgagcctccgccgattatgtgtaatttttcgatagggaatggcgcaatcttttgcagcacactgaatatctgtttgtagcgcatggataaactatcaaagatgcaacgggttatttctccgtatgtttcggggacaggttgaccggtctgtttgcaatatccggcgatagccttgatcatggatgccggattttggaaacatggggcatcgggattgataagactgcggaaagcgggtgctgccaaagcagcgtcaatcaattcggtataagaataactgttgttggttgtttcccattccttgcggcatcgttcgagtaaccacataccgcagatgtttttcaggaaccgggtagtaccttccactcctccttcattggtgaagttctgttcgtagctttctttgttgataatggcatcttttacttcgatacccatcaggctccatgtgcctgagcttagataggcgaaattctcgttctgagccggtactgctgccacagccgaggcggtgtcgtgtccggctaccgagatgacgggaacagctcccagaccggtcagtttctgtacctcttctgtcagtactccgatttgctctccggggaagacaaaccgaccgaattgttcttctctgactcccactacgtccagcagttctttttcaaaacgtttggtgcgcgggttcagtatttgtgaagtagaggcaattgtatattcggtgaccatttttccggtgagcatatagcccaatgcatcgggcataaagagaattttgtctgctgcttccaatgcggtgcaatgattgcggtgtagtgtcgataactggaataatgaattgaaattcattatctgaatgccggtaatatcatatactctttcgcgaggaatgtgcgtgaagtattcttcgggtgctcctactgtatgtgggtcacgatagcaatagggattgcggagcagttcgccatccttaccgataagtgcgaaatccaccccccatgtgtcgataccgatggaacggatgggaatgttgtctttggctattgttttgagcccgttgatgatttcgcggtaaagggcataaatgtcccagtaacaatgaccgcaggcctctattatatgattgggaaagcgggtaacctctttcaactctaatttgccgtctcccaggcaacctaaaatggttcgtccgctggtggctcccaggtctactgcaaagaaataagtgtgttccatgtttctgcaattgataatttaaggaattaatgatactgcaaaaataactcattcttttaaactgttcctctttttttgatataataactgttcgaatgcgtggtaaatgccctaaaacatattattcttacttttctggtaacttctttggtgaaatgacagaatatcaataccttcgctaaatgaaaaatgtatgaaggtttaattaagaatgaaaaaaatagtcggacatcttattgttctctctttattatgcttgataaatgttaatccggcaagagcgtgggatgctgatcgacggcagccccaatcttatgaattgcaacaaaaatatatccattcattcaggcaaaatgccggctttattcatacagagaggaatgatagtatcgctcttctgggggacagtctgaccactgtattggattctataggcaaatatgatgaatattttgaattgaagagggtcgtaatccgttcgcatattcttaggggggagagtcgcattgccgttgctcaaagtgatatgatgtactccaaagctcaggcaatgaaccacaaattcggaatggcaatgtcgctcagtgcaattggtgaagtgtatagtcacatgaaccggttggaggaagcgggaacatcacttgaagaggctttaaagcagttaaaagatccttcggataatcagattcttacaaaaatactgctgatgcaattggtggataatcttctgcatttgaagaatattgggaaggctaaattgtatatagagcgcataaatgagtatttgtcggaagatttatctccggtggaacaggcattgttttataattataatgcttactattgtattcaggcggggatgccggatgaagccgacaactacttaaaggaggcttggaagttagaaccgatgctgccggtggggattatccggcatctgttgataaccgaggcggcttattatgagagtaaggaagaatatgaaaaggcgttggatgtttacgaccgtttctttaaaggaaaggcaccgcagagcaatcgcggattgtatattgatgcaatgcgtaataaggcagaattgtatgttatgatggggaaagagcaggaggcttttaaacagtttgctaacgtatatgcttatgtgaagtctgtatttaataagaattatcctaaggagattgaccggctttgcactcgttttcaggcagatcggctgaagtttatgaatgaacaccggcgtactctgtccaaccgctattatgtgaccggaattgctgtttgtgtcttggtgctgttttatcttatttttctgagttggaagaaaatattcaaattgaaggaatcaaaaagaaagcaggaggagatgaggcggaaggcagagaatgccattcgcaaaaagaatatgttcctttctaatatgagccatgaagtgcgtacgccgttaaatgctattgtgggtttctccactttgttggcgtcggaagaggatatgggcatggatgacgattcccgtaagcaagcttgtgagattatccgtgtcaattcgcatcaactgctgaaactgataaatgatatacttgatttgtcggattttgaagaagacaatattcacttcaatatgaaggagcatgatgcggtaaagatatgcaatgaagtaatagaaaccatacgcgcctcttataaactgaatgtaaggttggaatttgagacagctcttgcttcgttgaagctcgaaacggatgattcgcgactgaggcaggtgttgataaatttgttggtgaatgctgttaagtttactaaagaaggttctgttgtgctcaaacttgaaaaggcaaatgacgggacagctctcttttcggtggcggatacaggttgcggcattccaaaggaaaagcagaaacttattttcgaacgttttgaaaaattgaatgagtttgtacaggggaccggtttgggattttctatctgccggctgatagtgacgttcgtaggtggtaagatatggattgacggagattatacccgaggggcacgtttttgtttcactcatccgttaaagtataaatcgacactattataagcagagtatcataatatgaagaaaattataacactggtatcttgtctgatttcgttttcatgtctcttttcccggggatggaaaggggatgatacgattgcttttcgtgacagtttgatgaggaaggtggaacatttaccagcagatacttctcgtttgtctgtgttgctggacgcggcatatttgcatcagaatcctccttataatgtgttttttgccaagtgcctttatgaagaagcacgtaagcagcagaatatctattatgagaatttgggtgcctattatctggctgtctgttatgataaaaaacatgatttggacagtatcaccctttgggtggatgagttacaggaacttgcttccaagataggcaagtatgattattatctggaacaaaaggctgctatcagtcgcgtgctggcttctaaaaaaatgaatgaaaaggcggcttttgtggcaaaagaagttttgaaagaggcacaagagagaaaaagtaataatggcatagtggctgcttataatagtttgggatgtacgtatgctgcttttaatcgttcggatgaagcacttgcagctcttctaaaagggtatcgggcttgcaagaaaacgactaaattgagtttgcgcattgatattctttctcgtttatcaagtagatatgctgatattgtttccggtttgccttctaaggaccccgatagagtgaagagagattctgttttgttttatttagagaaaatggagggcttgttgaaagaagtgttgtctaaagagcccaagactgtgaataattggagagatgtaatggtggattgccaaaccaggtatgttcgttattatatgcatcataaggattattctaaaacggctgaattccttgaaaaagccaaaaacttgcttactccggaagtggattcggtgtattggctgaatatacaattgatggaattgcagtattatgcccggatacaggaatatgataaaggaatcgcattgatagaccaggtcgctccgtttgtcgaaaggggacatatagatgtattcgaaactcttattttttataagtctttgatattgcgtgataagggtgactggaacgaaggcatccatacattgaagtttttgctgcataaacaggattctttgagtacagctacaaccaccagccagttggaacaagtaaaagagaattatcaaatcaatgaattgctgatggaaaagcaaaagattactaacctgaactatcttcgggctattatgattttgggtgtactattggttttgctgctgttgttttatctttataccggttacttatcaaagagaattgctttggcagaaaaggaggcgataaaggctgccgagctttcgcatgctgataatttggctaaagaacggttgaaacttgaaatcagtcatgatatacgtactcctttgaatgctgtggtgggttttgccgaaattttggctgatgcggataatttggatgaagaaagtaaatctgcttataataagattgttcaggagaatgctacacagttattggactatgtgaataatatccttgagctttctcgccttgaatcggggaaaataaaatatgtggaaggcagttgtgactttatcggtctgtttcgcgctgtgatagaggaggctgataaaaacgggcagaactgtgtgcatgcagagttgcataccgatttggagaaacagatggtcagaacagatcaggcacgtttactttctttgtttgaaagtttagccgtctctaccgtggacacagaattttatcattcggatataacagtaaaacgtgtggaagaaaaatcgcttttactggtgacggttgttaatacaccattggcaaaggagcgttttgagaataaaacggctatgattcgtaatgagataaatgctcactttattcattatttcggaggatattataaagtagacgaacaggcaaaacaaggaccttctgtgacttttacatatccgtatgatgttgccggtctgcatattcattgaaaagtttcacgaaaggattgagttacgtcgaaagtagacaaaggcagttgtttttctgtcttacttccttattgggtatggcttttttcgattaaaatataactttaacactacttttttgcatatatgcgcaaaaatattctgctttttgtatctatattcccaaacaatgcgtaattttgcaatcgaatcagaataattatgcagtatgaagagcaagaatagcagactggatgccatcaaaattataatttcctgcaaggaaataggaagtcaggaagaactgttacaggaattggctaaagaggggttccgcctgacacaggctacactgtcacgtgatttgaagcaattgaaagttgcaaaggctgccagcatgaatgggaactatgtatacgtattacctaataatacaatgtataagcgtatgaccgaacagcattcggccggcgaattattaatgcataatggctttatttccattgagttctcggcaaatctggctgtgataaaaactcgtcccggttatgccagcagtttggcttatgatattgatagtaaagattttgatgaaattctgggaactattgccggagatgataccattatgcttgtggtgcgcgaaggttgcacagagaccggggtgaagaacgcactttcactcattataccgaatatacaataaaaataatatagaataagaaatggatgctaaacaagttgatgtgatggtggctgatgcctcacatgaagtttacgttgataaaattttagataccatcagggaagcagctaaggtacgcggaacgggcatcgcagaacgcacacatgaatacgtggcgactaaaatgagagaaggaaaagcgattatcgctttatgtggcgaagagtttgcaggctttacttatattgagtcgtggggaaacaagcaatatgtggccacttcagggttgattgttcatcctgattatcgtggcttgggattggcaaaacgcattaaggcggcgtctttccgattggcgcgtttacgatggccgaaagctaagattttcagtctgacaagtggtgcagctgtaatgaaaatgaatacggaattgggctacgttcctgttacattcaatgagttgacggacgatgaagctttttggaaaggttgtgaaggatgtgtcaatcatgatatattgatggcaaaaaaccgtaagttctgtatttgtactgcgatgctttacgatccgtctttacacgaggaagacacgatttaaagaagaaataatagaaaaaacacatattattatggaagaaaaaaagaaaaaagtagtagttgcgttcagtggcggtcttgatacttcgttcactgtaatgtatctggctaaggaaaaagggtatgaagtgtatgcagcttgtgcaaacaccggtggtttcagtgaagaacagctgaagcagaacgaagaaaatgcttataagctgggagcggtgaaatatgtaactttggacgttactcgggagtattatgaaaagagcttgaaatacatggtattcggtaatgttcttcgcaacggaacttatcctatttctgtaagttcggaacgtatcttccaaggattggctattgcccgttatgccaatgaaataggtgctgatgctatcgcccacggctcaaccggtgcgggtaacgaccaaatccgttttgatatgactttcctggtattggctccgggggtagaaattattacccttacccgcgatatggcgttgagccgtcagcaggaaatcgattacttgaacgaacatggttttgctgctgatttcacaaagttgaaatattcatataatgtaggtctttggggaacttctatctgtggcggtgagattttggactctgcacagggattgcccgaaagtgcatacttaaaacaagtgactaaagaaggcagcgaacaacttcgtcttacttttgaaaaaggtgagttgaaagctgtgaatgatgaaaaattcgacgatccgattaaggctatccaaaaagtggaagaaatcggtgctgcatacggtatcggtcgcgatatgcacgtgggagataccattatcggtatcaaagggcgtgtaggtttcgaagctgctgccccgatgctgattatcggtgcacaccgtttccttgaaaaatatactttgagtaaatggcagcaatactggaaagaccaggttgccaactggtatggcatgttcttgcatgaaagccagtatctggaaccggtgatgcgcgatatcgaagctatgcttcaggaatcgcagcgcaatgtcaacggtacggctatccttgagctccgtccgctttcgttctctacggtaggcgttgaatctaaagacgatttggtgaagactaagtttggtgaatatggtgaaatgcagaaaggctggacggcagaagatgcgaaaggctttatcaaagtaacttcaacaccattgcgtgtttattataataaccacaaggacgaagaaatctgattatgattaaagtaggaattatcggtggggcaggttatacggcaggcgaattgattcgtctgctgattaatcatcccgaagtagagataaagtttataaacagtagcagcaacgccggcaataagattaccgacgtacatgaagggctttacggtgaaaccgatttggtatttaccgaccggcttcctttggacgagatagatgtattgttcttctgtaccgcccatggtgacacgaagaagtttatggatagtcataatgtgcccgaggatttgaaaatcatcgacctcagtatggactatcgtatcaagagtgatgaccacgactttatttatggcttgcccgagctgaatcgtcgtgccatctgtcatagcaagcatgtggcaaacccggggtgttttgctacttgtatccagttggggttattacctctggcaaaacacttgttgctgaacgaagatgtgatggtgaatgctattacgggaagcaccggtgccggtgtcaaaccgggtgcgacaagccacttcagctggcgcaacaataacatgagcatctataaaccgttttctcaccagcatgtgcccgaaatcaaacagtcattgaagcagttgcagaacagttttgattctgaaatagattttattccttaccgtggagactttccgcgtggtatctttgccacattggttgtgaaatgcaaagtagaactggaagagctggtgaagatgtatacggactactatgccgaggattcctttgttcatatcatagataaaaacatagacttaaagcaggtggtgaacaccaacaagtgtttgattcatttggagaaacatggcgataaactgttgataatctcttgtatcgataacttgttgaaaggcgccagcggtcaggctgtccataacatgaacctgatgttcaatctggaagaaaccgtaggcttgaaactgaagccggctgctttctaaaaaagaagagttatgaaattattcgatgtatatcctcttttcgatattaatatcgtaaaaggaaaaggttgccatgtatgggatgataaaggtacagaatacctcgacctgtatggcggtcatgctgtcatttctatcggtcatgcacatccgcattatgtagagatgataagcaatcaggtggcacggttgggcttctattccaattcggtgattaacaagttacagcaggaagtggcagaccgattaggcgagatttcgggatacgatgactatcagctgtttctcatcaacagtggggccgaagcaaacgaaaacgccttgaagctcgcctctttctataacggacggaaacgggtgctttctttcagcaaagcatttcacggacgtacttcattggcagtagaagcaactcataatccgaagattattgctccgattaatgcgaacggtcatgtgacgtatctgcctttgaatgatatagaagctgttaaaacagagctggcaaaaggcgatgtgtgtgctgtgattattgaaggaattcagggggttggaggtattcagatacccgatgctgaatttttgcaaaacctgagcaaggcatgtgaagcggcagacgcggtgcttgtgctggatgaaatccagtcgggttacggacgaagcggtaaattctttgcccatcagcatgcgggtatccgtcccgatatgataaccgtggcaaagggaatcggtaacggtttccccatggcaggtgtcttgattagtccgaagttcaagccggtatacggacagctcggtactactttcgggggaaatcatttggcttgttccgctgccattgccgtgctggatgtgatgaagcaggaaaatctggtggagaatgccgctaaggtcggtgcccacttattggccgaattgaagaaacttccacaaataaaagaagtccgcggtgaagggctgatgattggtatggaatttgatgaacctattaaggaattgcgtcagcgtttgttgtttgaacaaaaagtattcaccggtgtcagtggcacaaatgttatccgcttgttgcctcctctttgtttgagcatggctgaggctgatgaatttttagctcgctttcgtaaaatattgccataaacactatatgctggaataataattagcgaaagaaaaaacttgccgggattagagtaaatcctaataaccggatatgttgatctaagcaggtttgcaatgaaaaggggacgtatcaagacatggagaatgctgttcttttgtcggtaggggagaggcttgctcgcccgaaaacagtttgcccggtgtattacttcctgggttatgactgttggttcgggcaggtatcccccctgtctttgcagttgatgatttgatacgtctcctttacattttctctttcacacggtttggagtattttcctgacaggaagattaaaaacgtacttgcaagcgtgcctgtaacacgccaaaagaccttttcacctcctccatgtctttagtccatactacagaaccgttcaatttcaatatcagaaacttgttcatgtaataattcagtcccaccgtgatgtcttgttgcattcctcctttaaccggtccgtcattcagattggtaacattaatccggccggacaataacagagacttactttctttcggagtcaagggtaaagcatcccattcatcataattaaagaaatttccttttatcaggaatcctccttgtatatatgccccccaaggccggtagcaggcagcctgcgcacgctgtacattcatgtttaaatattctccttgaagaaaaaagcggcgggatagatacaatgcctccaaattccattggaatgtatgctttacgttgtttatttctatgtccaataccgaagggacagacaagccggtaacaccattggagctgaaagttaccaatctgtctttttgttctttctctctgtccggtctgcggaataaaccaccgactcccagatggagcaatttcccggcttcatttaacggacgaaacactccacgcaaggttgcattgtaaccgggtagtaccttatcatcatattccgctccatctccgcaaaagagtccggccgaacaataatatttattctgcgaaaaagtataagatactcccacccttcgtcccaaatagaaagtttcggcagcattggcaccggtcatgaagacatagtcattggtactggcagactgctctatacagcacatccccaacatataaccgattcgaaaattattatttccccatttcttctgaacaaaagcatctttcaacgaaactttgttgccggcaaagcccacatctatttttgtataccattcatcgggcaaagtaatttttccggttaaccggacatccgttatttcagctttggcatgagctgaataagaattctttgtaaaaagacctccatcaataaataatcgaccgcccaattttacaggtccatctgtactggccgacacaataatagggaacaaaaaagcaagcaaaaatccccgccacttataatacataggctatttatctgtttaaaaagtgattgaaacattctctatgaccggtaagtaaacacacaatgctatttcaaaatcacttttcggtaacatccggtttatcatttcttacctcgcttaaaaattgaaaatggtacttcacccacccatggaagcggcttctttaccttaaacaaatataagatggtggcagccgtatttactgtattgttaggttcctccagttttatccctttttttatatcaggaccggtgattccccaaggcacaatcatttcatcaacagagaaacctccatgtccatgcccgatacctccatgatccgacagaaacataaaataggtatcttcatataaaccttcttttttcattttatcaataaacgtgcctatttgtatatccgcctcttctatggatttgatatattccgccgacatccatttatgagcatgtccggcgtggtctgtatgcactgaatataaaaagacaagtgtgggcaaatcctgattccggactataaaatcaaatgccttttcataattgggaacataagcatcattttccaaataactcacttcatctaaatatttcttgttatatggataaaaaagattgatccaattataataaaaagcagttttacactccggaatttcttctttcattaccttaaatactgagggataatatccttctttatcaatttccactgcaggaaatccttttttatctatttgccatccattatcaaccactccatgctgctcgggaccgctgccggtcagatgactggtccaattgggcaaagtcacggaaggcattactacacgagtcgttaatgacaaggcgccttgggctaataaattgtcaagattaggagtgtgggcagtagtaaatcccggaacagaaatgccatcaagggcaatcattacaacccgttttgcccgtggacgggcagatatcggcataacgcctacaatccataaagccaataggactgacatgatacttcttaagtttttcatcatattaatttttaaaaaaggttttcagacagatataccactttagagttgggcataatatcttttctatggcaataatttgccggatagtttccaattcgacaaatacactttataaattttgcaaagtaactaatttactattatctaaaacatagatattctttttaatttcatggataatcttacggttgcttatgcggttggttcgggcaggcaagccctgctcctacggttgacggtttgatatctctatactaaaatatgtggtaatatgtcagacacaccgaaatctcatcatgtctcagaaaattccataagtatgccattggtcatcccaaataaattgatacctttgtcaaatcccaattgttctaaacatacacaggaagccgattacacataaacaatatataactttataatcaacaatcatgaacaaaaactatcttatcatcgtcctcctattcttttgctctatcctgaatgcgcaaaaccttaatattgtttacataggcaatagcattacagaaggagctttactgaaaaatccgaaaaccgaggctgcacccatacgtgccagccaataccttgataaacatttgaatggtaaagtaacctttcggaattgcggagtaagtggtatgacaacactcaatttccttcccattagcgggcaacagtttcccaatgtaaaaacagcagcttcggaactggcgcaacgggaagggcaattattgttttccatttcgctgggaaccaacgacagtgcctgcactatggctttcggtgccccggtattaccggaagaatattacacaaacatgaaagccattattgatgaattgttggcattatacccacaaagcaaaattgtagtacaatatcccatctggtacagccccaatacgtacaacggtgctatgtacttgaaagccggtttggagcgcctgaaaagttactatcctatgatagaaaaactaatggcacattactccatcactcatccgaaacaagtttttcccggttcaacagaagctttcgacttttttaaagaaaactattcaacgcattttactcccgaagaagggaatgccggcacattttacttgcatcccaataagaaaggcgcagaggtcctaggaaattattggggagaggctattttaaaagccattggcaatgaataaataaaagacttcaatacttgcctgcagtttatctgctgatttaagtacaaagcctggaattcccgggctttgtgcgaataaataccccgcaaaatctttttccctgtcaagccaaaccgattataatctggagtttatatgtttcctctccctaaattcaccaatgctctgtgtttttttgattccgtctgcaaggacacttctttcaacttttttatactgatagtcattctttttgtttctgctttttagaagtaattttatttttaactcttcatcatatgtccttctctttttttccttttatctttgcgtttgtagacttaatcattataatcgtatgaaagtagcaattataggtgcgggaaatatgggaggagccattgcccgcggccttgcccaaggcacaattattccggcaagtgatgtaaccgtagccgatccgttcagtggtaatctggaaaccttgcaggccgactatccggagattcgtgtaacgacggaaaatccgaaagcgatagaggatgccgatattgtgattttggctgtaaagccatggctgatagaccagatattgagcgtaattcgtttggagccccggcaagtgttggtttctatcgcagggggtgtgacttttgaacagttggtgaatagtgtaggtccggaacagactattttccgtctgattcccaatacagctatttccgaacgccaaagcatgactttgatagccagtcgcaatgccagcaaggagcaggagcaattaatgctggatattttcaatgagcttggaatggctatgttgatacccgagagtcagatgggagctaccactgcattgacttcttgcggcatagcatacgtgttgaaatatatacaggcagctatgcaggcaggcattgagatgggggtttgcccgaaagatgctcagaagatggtggcgcagtcggtaaaaggtgctgccgaactgatattgaataatgatacccatccttcggtggagattgataaggtaacgactcccggaggaataactatcaagggtatcaatgaattagaccatgccggatttacttcagccgttatcaaggcgataaaggccggtaacgtagaatgacatagcctttctctaagtattgaatttcagtatgtaaagacaatcggctcttgctgtattcataaatctctgccactgatttataaaccggaagcggtaatttataaatcagtggcagtgacttataaatcggtggtgctgattaatgaatatatagggaggttacgaagaatatctctctttccatttgttttttgtattgtaaataaacagtaattccaatgtggcttttccatttcacgaaacactgcaccggggggcatttggtcagagccggagcttatggaaaagaatagaaagcggttatacagggagatgtaaaggaagttccacaacaaatcttgcacctccggtgtattgtgtgtccagatagattttacctcccaacagggtagtgaggctccggcaaatactcagaccgagtccgaaaccgggattcatgctgttcagcttctcaaaacgttggaaaatcaattcgcctttttccttatcaatgccgcagccggtatcggtgacagagaaaatgatagaggtgcctgctatctcataagccaagacgatactgccttgagaagtgtatttgcaggcattgaccagcaggttggtcaatatctgttgcaggcgttgcgcgtctgtgttcaggatgatttccgtatcgggttgtttcagctccagtctgacgccttcggccactctgtgtgccacgcctgctaaagtggattggcatagttcgggcaagacgacattggatagcgagatgctatagttgccgctttccagtttgctgaggtcgagtacatcatttaccaatgtgagcaataaataggtattggtgtgcagatgaccgagtaattcgctccgctcttcttcgctgaattctgcatcggcatcgttcagcaaatcattaaaaccgatgatggcattgagtggcgtacggatttcatgactgaggttctgtaggaaagccgatttcagcttgtccgctttttcggcttgctgccgtgctttttcggcagcgtctttttctatctttaaatgcctggcatgctgccggcgtgtaaaagcatatatgctggagaagccggaaataagtatcaagatggagaacaccacccaaatcttgcgctgattggtctcttgctccattttgatgcgttgcagctgttcttgtttgtgtatgacttccaattgttgtttttgtgtttcggctttttccagttcgatggctgtttgttgttgcttcagttgcaagtcctggttttccagctccatgcgcgtctgttctttttccatcagtatcatttgttcccgattttgcatttgtgccagtttcatttctgtgttttggagagacaggcggttcttttccaattccagcctttggttattgaaacgggcgttgtatgccgccattacttccgcattgtttgcttggttgatagagtcttgcaggcggtattttttgtatagttcggcaaaggcggaatagaaatcccctgccatttcaaatgctttgtatctgaccgcaagactcaatcctttgtcactgatggaatcactgtatgcaagggctttgtcaaggtttcccaatgctgcataataataaccgttcagagtgaaatagttttcaaggatggtccctttcatcactccctgagctctgtactgcgctaattctttttgaagttcgtcggctttttttgaatccattttgctgcatgtcacttgaaacaagagtagtttggattgtatcaatgcagattgggtgacggaagcatctaaacatcttagggcatattcttcggcttcttcgtatcgctgcagatttatatagcatgagcttatggagcgatacgaataaaagttctctttttcattgccggtctgtatgtagtaatccacagcctgtttgtattgttggagggcaagccggaacatgcgctgctggtaatacacatctcccatgcgcacgtagcttttccctatgccgtaaggattgtccaaacgaatggcttcgtcctgatattttttcagttcttggatggcggaatcatattccctgtttctcaaatagtaagtgataatgcggttccatgctccgaatatgtattgcttataaggagtattgcgtgcaaagtcggctaccttttctttctcgatgagcaatgtattgatatcgttgataaagtaataatggtcggatttcaggttcagggcaaggcattgcgcttttacgtctccttttttctttgccatgtggaagagtgtatccgccatgagcaatacttcgggcttcctgatggcgctgttgcacttttggtaataggaatagagttggtcgtttattttataaggattgttttgactcatcgttatcgggcagaaaagaaatatttccgccaatagtattaggatagtatgtccgatgaacctcttcatatcattctgtgtgtctttggcaaaaatagtgattcttttataattcatgctatcatttatcataagttttatggagtatggattttttctatgtttcttcatggatatagggaggtatctgctccgggcttgtgggttaatccaaactgttactattcttacggtgcagaagaaaacgtggttgcaacgctctatggtagtgcagcttccgttccttgtggcgcatgatggttggactacattatccggcttttttcacacgttgggaatgtttttgcagtcctgttgcccgaatactttcatttgaaactatccgaaaggcaaccacttccttaaacccgtgtccttgctcatatagaatgatattgtgcagttttgttgtctgtcagatagttttcatagaaacttcttgaaactttgctaggattaattaaatcttcattatctttgaaccctaaatctaaagattatgagtgaccagataaagcaaatagccgaacgtctccggggattgagagacgttttggaactgacttcacaagaagtggccgaaagttgccaacttacagtggaagagtatttgggtatggaaagcggtgagaaagatatatcggtcagcgctttgcagaagattgcccgcaaatatggtatcgcactggatgtgctgatgtttggcgaagagcctaaaatgagtgcttacttcctgactcgttgtggcacaggggtatcggtggaacgtaccaaagcatacaaatatgaatcattggcatcgggattccgcggacgtaaggtagatccgttcatcgttaccgtggagccgaagcccgaagatacgcctatttatttcaattcacacgaaggacaagagttcaacctggtgatagaaggacgtatgttgcttaatattaacggaaaagaacttattttgaatccgggtgacagcctttactttgattctgcccagcctcacggcatgatggcactggacggcaagactgtgaagttcctggcagtaattatgtaaattgtaagagtatggtagaaagattcttagaacaaaccacttttgcctcacaagaggattttataaagaacctgaagattaaggtacccgaaaattttaatttcggttatgatgtagtagatgcgtgggctgccgaggaacccgacaagaaagcgctgttgtggactaatgataaaggggaatccagacagtatacttatgccgacctgaagaaatataccgatatgacggcgtcttatttccaaagtctgggtatcggtcgcggtgatatggtgatgttgatattgaaacgtcgttatgagttctggtattccattatcgctctgcacaagttgggtgcggtggtgattcccgccactcatttactgaccaagaaagatattgtgtaccgttgtaacgctgccgatattaagatgattgttgcggcaggcgaagatgtgattaccaagcatatcatagaagcgatgcccgattcgccttctgtaaagaagttggtcagtgtcggtcccgaagttcccgaaggtttcgaagactttcatcagggaatggaaaatgcggctccgtttgtaaagcctgagcatccgaataccaatgaggatacctcgctgatgtattttacatcgggaactaccggtgagccgaagatggtggcgcatgactttacttatccgctggggcatatcgtaactgcctgtttctggcataatctgcatcgcgacagtttgcatctgacgattgccgataccggttggggaaaagcggtgtggggaaaactttacggacagatgattgcgggggcgaatatctttgtgtatgaccatgagaagtttactcctgccgatattctcggaaagattcaggactatcatatcacttcactgtgtgctcctcctaccatttatcgtttcttgataaaggaagatatcggtaagtatgacttgtcgtctttggaatattgtaccactgccggagaagcattgaactattctgtatatgagacgtttaaaaaaataaccggtattcgtttgatggaaggtttcggacagacggaaaccactttgacgttgggtacttttccctggatggagccgaaaccgggcagcatgggtgtccccaatccgcaatatgatatcgacttgctgactcccgatgggcgttcggcagaagacggtgaacagggacagattgtcatccgtacgtctgaaggcaagccgctgggtttgttcaaagagtattatcgggcggccgaactgaccgaagatgcttggcacgatggcatttattataccggtgatgtggcttggcgtgatgaagacggatacttttggtttgtgggacgtgcggatgatgttatcaagagctccggctaccgtatcggcccgtttgaagtggaaagtgcattgatgactcatcctgccgtggtggaatgtgccattacgggtgttcccgatgaagtgcgcggacaagtggtaaaggcgaccatcgttctttccaggaactacaaaggacaggaaagcccggaactgattagagaattgcaagaccatgtgaagcgtgtgactgccccttataagtatccgcgtgtgatagagtttgtagaagagcttccgaagactatcagcggtaagattcgtcgcgtggagatacgtgataaagataaatgaccggggcgtgcgttgagcgaagtctttattcgtaaataaagtaaaagatgaaaagaattttgttttttgcctttttatgcctgtgtgtctgcttgtcggcaggtgcacaggcattgtctcctgttacatggactgcctacggattgacttttaaggttccgaagggtattgttgtggaagaggatacagaagaaacgtttttgttgaacgatagtaagttttatatcactgttcaggcgttggactctgacggcatcacgaagggtgacctggaaggtatgttgaaagactatgccgacgatgatggggtggagaagcagactgctgtcaaagcctttgacttggagcaattttatggtgtttcgatggatgggcaatgtgagggtgaaccttgttgctatgcctgtctgatgaccaaggcggccgggagtgcatttcatgtttccatcatttattcggcggggaaaaaagctgaggcggaagctattctgaaaagttttgtgatggaagagtaagcgaatgcagtcagttctgtgcattcggggagtcaaagcattattaaagttaactgtaggggcggggattgcccgcccgaatgcatcaagtaaagtgtattcgggcgagtgtccccgcccctacaggcaaagtgataggttgattgggtcttgataaaacctcctattttgctcttaccttgaattgcaaagcaataggttcattctttattcctttgggaagaaatacttttaccttatcaccatcacaagtatatttcacactcttgtttcctttcagcattttcattttgcctttcggaagatttcctgtccattctatgacttccggcagtgtttctccttcgggcaatgcatagatggcatagagtgtctgtccgtccttgtcggcagtgaaccatgtgtgtccgtcctgataaacaggagtgattcgggtattgtagatggctttgccgtttgcccgcaaccattctcccacttcgtgcagacgcttggccacttcttcttcgatgacaccgtccggggttggtcctacgcccagcagcagacaaccacctttggcagtgatttcactcaatatgttgataaccttttgagacgatttgaatggagcattcggcacccatccccagtcattgctcagcgtgatgcaactttcccacggatagttgagctgtgtctcggggatgccgcgttcgggagtctggtagttttcgtttttgcctctgatgctgcggtctaccgaaatcaatcccggatgcttccggcgtgcttgtgccagaatatcgtccagaccaatgtcatcgcctttcacccaaccgccgtccagccaaaggatatcaaagcttccgtagtcggacatcagctcattcagctggttacgggtaaaggtctgatagtttttccaccagtcgggatggcggtctttcttataattgatgttacggtcgggggtagcgaaataaggattccaaaaccattcgcaatgccagtcgggtttggagaaatagcatcccgtcatgaaacctcttttgcggaaagcatcgaatacatggtaggctacattcttgcgcggattgtccttgaaggctccgtgggcaatggagaagtccgtgtatttggaatcgtaagtacaaaatccgtcgtgatgtttggtggtgaatatcatgtatttgatacctgcatcctgcattacatctgcccattgttcgggattgaagtttaccggattgagcgagtctttcaagccccagtaccactctttgtattcatcgtatggcaaaggttttttgcgtgaaatccaatcgacatcttccgagcagatggaccatgactctacaatgccgggaacggaataaagtccccagtgaaacaagactccgaacttctggtcttgccatttatccagtttatccaatacttgttggtcggtaggccatacataatccgttgcttctgattgcttgtggacaaagccttgtacttgttgggcgtggaggttcaaagcgaacgctgcaccggccatgcatacgattagttttttaaggttatacataactgttatgagttagtgtttattgttttgtttgcatttaattttcctttaagggatgataaaggtaaggttttcttatttggcgagcaaaaaaagaggaaagaaatttaataattggtcagaaaacaaaaaaagaatgtccggaaagcatcattcgcttcccggacattctctaatagattataatgtatcaattaccatcccgtgttctgtgtcagattcgggttgatagagatttcattggtcggaatagcaaacaggtagttcttcggatcttcaaatctggcttgtgtatctacacgcttgctgtaaatgtcgagttcacctttgctgtttgtgcctaatacgttctgcatagcagtgatgttttcgggagaataaagctttgcatcaggaatcatacccatgcggggtgcaacagaagcatccagacgtttgccacatgcccaacggcgcaagtcatcaaagcggtaaccttctccgaataattctacgcggcgttcgcggcggatttcacgaatcagtgttgcgttgttggcgcttacgtttggatattcggcttccagtttggggtcaacggccgggctcattgtcaacttgtggttgaatcctacacgttcacgcaacttattaactgtagcatccaaatctgtttgagaaatggttcccagttctgctgctgcttctgcacggattaacaggatttcaccgaaacggaataccggagcatctaatgttccctgatggtgagctgccagatgttcggctgcattatagaatttggcaatgctataaccggtagaagaagaaccgcctgcaccggtattgacaatgttggcaatatttgccggatgtccttttaaataataggtgtgttcacctgcttcgggagaacatacagtctgtaacaaacgcgggtcgcggttgttcaattctgccaataatccggtgtgtgtggtatgtccggggcaattgcagagagtgacaggcaatcctgtttcggcacacagatagtcgtcaatacagtctttgctgacgcccaagggagtttcgccgacaccgatctgacggctcaggttgttacctttgcctaagctgggatcataagctttggacaagatgatttcagggttgttggcataatcggactgaatgaataattcatgataagcctgtgaaggagtactaccctggaataatgagtaaccatattccgatttcatcaattctccggctgcattgtatgcttcctgcaagaattttgtatctccttcaatcttgtggtagcgacgccatgtaccttcaaacaagcagaagcgtgctttcaacgccaatgcagcatctttggagatacgggtaacatccactttcgatttcatgggcagccattcaatagcctggtcaatgtctctcagcatattgtctgctaccaaagtgcggggatcacgtgctttgtataagtcttcgtctcccgggtttacaactttgtcataccaaggtacatcgccgtaagttttcactttgttgaagtagtcaagcgttttgaggaataagatttctcctgcaaaacgatgcttttctgcttcggaagcctgtgactgttcataattagccaagaagtcattacaagcacggatgttttcccagttccattctgtatcttttgcaccggtaggagctacgtgtaaaccaaagctgatagaattgtattcccatgtatagatgttgtccgatttgaaatcttcttccatcataccgaaattgtaagattgagggtctccatgtcctttaatcaatttaggatagagattgttacaatattgctgtaatccatcagcgccggctgttgaaaagaatttgtctttagagatggagtccagcggttcgcgatccaaataatcgcagctttgcaatgctaaagctactaaacctatatataatatattttttttcataatcgttcctgaatttagaatgttacgttgataccaaatgaataagtacggcagaatgggtatttggtcatacgatcttccatttcaccatctttctttctgttacctgttgcatccgggtctaggtatttgtacaaacctgtagcttcccataagttttgtccgcttgcaaagattctcaattgagcgataccgaatttagagatccaggcttgtggcaggttgtagccgatagttacatctttcagacggatgtaagaggcatcctgcaaatatttagtctgagtctgacggctgcgagttgtgttggtcggagttggatagtaagcattcggattttcgggtgtccaatagtccaaatgagtatcgttcaatgtactccaccattgtccgtagtatccccagaaaatacctgtgctacctgtgccgagccataagtcgcgtttcattgtaccttcgaacagagcgcggatatcaaagcctttccatgatgcacccaagttgatattgaaacgataacgcggagtattgttaccgataattttcttgtcaccgtggtcacttaatgtgttctttccgtagtcaacagcaccgtttccatccaagtctgcgtaacggatatcacccggtaaccaagtagtggcaattactttctgacgaactgcttgttgttctgcttctgctttatcctgaatgaatccgtcggttacgtaaccccagatttcacctaattccataccttcgtagtaatcacccagataaccggttgggttatcatatttagtaatctttgagtagctgtctgaaataccgataccaacattataatccaatgggctgcctcctacgttagcaatttggtctttccaactcaaagaaagttcccaaccgtttgttctcatgttggcaagattttccttaccaccggtagaccccattgttgcaggataggtctttgatacgaccatatcattggtataacggataaagtagtcgaatgaagcagtcaagcggttattcaacagccccaggtcaataccgaagttggcggtagttactttttcccaacttacattgttataagccaatgaagcaggagtaatacctgttgccaatttaccgttcaataaatagttgagctgagcaaaacccatagaacttaaataatcgaagttgcctgtagtaacctgattgcctaatgaaccgacagatgcacgaagtttgacgttttcgaatatattacgtgcagaatcaaagaatttttcttcagataatctccaaccaatagaagctgacgggaagaatccccagcggtcgtcttcgccatattttgaagaaccgtcataacgaccgtttacctccaataagtatttgcctttatagtcatagttcaaacggaagaaagcaccctgtactgcccagattgttgcttcttcttccaggttttgcttggttccggctaagtcgataacagggatgtcatttacaaacaaaccggttgtcttaccatacatattgctggtttctttggattcttggttataaccaaccattgcagtgagagagtggtcaccgaaagattttttatattcagcccataagttcaatgcttcataagtatcgtcatacttcttcagtgaaacaccgttcgggtctccttttgacattgaagtgccatcgggctgcttctggtaaatagtcttttcgtgtgcacgagtcgttctgaagtaacggttaccggtatagtcacctcttacggtaagtcctttgaacggagttaatttgaaagaacctgtataccaaacatcatcataaacattctttgtacgtccggcttgtgccaacatacctgcaatgttgaagttgaagttagaacctgctacacctgcaaagtctccatccggcaagtaaacgggaataaacggcatggagcgatatacttcataataggggtcttccgaagtatagaagttagagttaggttcgttagcttcgctacgattgtattttacgttcaatccgatttccaaccaattagttaattgagtgttgaaattgaatgacatattaatacgtttgaaatggtctgttccataagccagcaaaccgtcttgtcctttataacctactgaaccatagtaagaggtcttttcagaaccgccacgaacactggcgttgtgctgttgcatgaaggctgcatcattaaacaatacatccagccagtctgtgttaccggcataagcccattctccattggcggtgaatttatttccctgcgtgttttcccaagcagtaggaaggctgggatctttcatgcgttcttctacggcagcaataagttcgtcactccaatactgagtaccgctggtattgttggactctacattcatggcgcgcaaccattggtctgccggtaatcccttggccatgcgtgaaggtgccgaccatgagaagttattgttatagttgaaagtaactttctctccctttttaccttttttagttgtaatcaatacaacgccgaatgctgcacgtgcaccatatacggctgcagaagaagcatctttcaacactgagatactttcaatatcctgcgggttaagcagagaaatatcattggtttctacaccatctactaagattaatgcagaaccaccgttcaatgatgtaagaccgcggacgttgatacttgtacttgagttagggttaccattggcaaacgaaatgttcaagttgggaattgcaccttgcaaaccttgagccaagttagcgatagggcggtcttccaaaacatcgctttctgccattgctactgcaccggtcagatttactttcttctgtgtaccgtaacctactaccactacttcttccaaagtctgagtatcatcttttaagatgatgttcagaggagtaccgttccatttcacttcctgagtaatataacccacgaaagagatttgcagaatatctcccttcttcacattagacaaagagaagtcaccatcaattccggtgattgttccgttagtagtaccttttactactactgaagctccaatgacggtctcaccggttgcatcctttacgataccggtacaagctccgtcttgctgtgcaattttcacatcggttatgccgggattgctaaccgcatacgctgctccggtagaggctcccattaggaacagcat

SEQ ID NO: 6725 - DNA, 254 bp, Unknown
  gut microbiota DNA sequence
gttatttgcacctccccgaagcttatcgcagcttatcacgtccttcatcgcctccgagagccaaggcatccgccatgcgcccttgcttactttctttattatcgcacactattactagtgcgggatgatatatacttttagctttttactactaaaattactgttttgcttgtacaatatgtcatagatcgtttctcttttcagagagagtggagaataacggattcgaaccgttgaccctctgcgtgcaaggc

SEQ ID NO: 6726 - DNA, 326 bp, Unknown
  gut microbiota DNA sequence
tgaggtttttgtccttgtactacgcgctttgtttattcattataaagagaaagaagaagccgagtctaaacagaggtagactaggttgaacctgacagtcctatagctcagttggttagagcgctacactgataatgtagaggtcggcagttcaactctgcctgggactacgaactcagtaagttcgggggattagctcagctggctagagcatctgccttgcacgcagagggtcaacggttcgaatccgttattctccactctctctgaaaagagaaacgatctatgacatattgtacaagcaaaacagtaattttagtagtaaa

SEQ ID NO: 6727 - DNA, 1822 bp, Unknown
  gut microbiota DNA sequence
tggacaagtcacaggttcttccggctgaaaacggcaagggcaatttatcggaaagcaggaacgaagctcccggatgcccggcagtcttaattgaaaaaacggagaaggaatccgcacaatcgggaggtgctcgaaaggttatgaatatcgcacactcgaaagatattgaaaaggaagcaggattagaatcctcgaaagatgttgaaaagaaaatcggagtgatatcatcggaaggcactcgaaaggaagcaggattagaatcctcgaaagaggaagtcaagaaagcgaaatcatcctccctgatgcaggaagtgaccgctttcctcacctcccgctaccgcttccgcttcaacgtgctgaccgaggaaaccgaggtggcaaacatagcaaacaacattcccgacatccacctgcgttacgccaaggtggacgaacgatggatgaacacgctcagcatggaagccatcgaaacaggcatagactgctgggacagagacatccaacgctttgtgcgctcgcgccgcatcagcgaataccatccctttaccgcttactttgagcagctccccgaatgggacggcaaggaccgcgtatccgcacttgcccgccgggtgtccgacaatccggtatgggtaaacggtttccaccgctggatgctgggactctccgcccaatggatgcagttccggtcggatgccaacaacaccaactgcgctaacagtatcaaccgcgccaacagcgtggctcccctgctggtgagcagtcgccaaggattagggaaaagtacgttctgccgcctgctgatgcccgatgtgctgaaagcttattatacagaaagttacgacctcggctccccggcatccgccgaagccaaactcgctgcctgcgggctgatcaatctggatgaattcgacaaactcagcgcatccaaaatgcccctgctgaagaacctgatgcagacctccgcgttgaacatccgcaaggcctacaaacgcagcgcttcggcactgccccgcatcgcctcgtttatcggcaccagcaaccgggaggacctgctggtagaccgcaccggctcgcgccgcttcctctgtgtcagcttggagcacgccattgactgcgtcacgcctgtggagcatgaacagctgtacgcccagctcaaagcggaactcctgtccggtgaacgaagctggttcaacaaggaagaggaacaggccatacagcaacacaacgccctgttctacaaacacatacccgaagaggaggtattccgcctttgcttccgctttgccacggaagcggaccatccgcaggaagtgctgaccctttccgccacccaattattcgagcggatgaaatctgcccatccttcggtcatgaggggtatgaccgcctacagcctgagccgcatcctgccacagttgggcgagcgggtacataccgccaaggggaatgtgtatcgggtggtggcatgctaggcgtgtgcctttcttctcatttggtttgtgacaggatgttctttgagaacatttacgcttacagacttttgtgcatgagtctttattttagaggaaaaagttttttaaggggaaccggacaagaaggagggggattttatttagagagaccggattgtgcaggaatggaatcgtttttttagaaaagagccgcggataacgaacaaaagagcagtcctcccgccggagaaccactctttcttttcaccaaaatattataaaagcggctctcttattccgcaatcataatcactacacggttccagtcatttgttgtgaaaggctgcacctcggaacccttgctgtcc

SEQ ID NO: 6728 - DNA, 291 bp, Unknown
  gut microbiota DNA sequence
aagtcagattgctaagacagctaggatgttggcttggaagcagccattcatttaaagagtgcgtaacagctcactagtcgaggagtttggcgtggataataatcgggtatcaagctgtttaccgaagcagtgggatcatataatgatcggtaggggagcattccactctgcgtcgaaggtggggcgtgagccctgctggagcgtgtggaaaagcaaatgtaggtataagtaacgataaagggggtgagaaaccccctcgccgcaagactcaggtttcctgatcaacgctaa

SEQ ID NO: 6729 - DNA, 237 bp, Unknown
  gut microbiota DNA sequence
aggctcacagccaacatccccaggagtaagtgagcgatttgtcttttatagggcaacagatacctgaagaagaaggagaggctgttactgccgtccttctccttttcgtcttcccgttcatagaattcgggggccggctccagggcgagtgccgttcccttttcttccccttccgtccttgtcaccagccagcacttcttcatctcctgttcggtgtatatgacgttctgcgaggcg

SEQ ID NO: 6730 - DNA, 23412 bp, Unknown
  gut microbiota DNA sequence
ataattaggtagaataaaagtagatacaaaagccatattatacctatacatatactccatcaaatggtatacaggctttgtagcaatgttgcaaagttctgaaagaactttatttgaaaataatttcatgctataataaacactaataaaaaaaatcacagctatgttaaaaaggctaaagtcagtcagtacgttgctgttcttaatgggcgtctctacaggaacagcttacgcggttgccgaatccggtataaccgatgtgaaaatcacacaacaaaatggctcttgtaccggtattgtgaaagacacaacaggtgaaaccgttatcggtgcatctgtggtagtaaaaggtaccaccaacggaacaatcaccggtattgacggtgacttctctttaaacaatgtcaaacaaggagacattatccagatttctttcgttggatataaaacggtagaagtaaaatggaatggtcagcctctaaacgttacattaaaagacgacacggaaatgttgggagaggttgtagttaccggttacggtggtcaacagttacgtaccaaagtaaccaactctatttcgaaagtaaaacaggagagcttaaacgtaggtatgcactccaatcctgcacaagcattatccggtgccgtagccggcttgaaggttatccaatcatcaggtagccccggcgcaactcctaccattatcttgcgtggtggtaccaacttggatggaaccggttctccactcgttgtagtagacggacaacttagagactctatgagtgatatcaaccctgaagacattgagtctatggatgtattaaaggacgccggtgctactgcactttacggtgcacgtgccagtaacggtgtaatccttattaccaccaaaagaggtaaagcaggtttccgcgaaattaacttcaaggctaaattaggtttgagctatgcacgcactccttatgaatttttggaagcaggcgaatatatcaaagctatgcgtaaagcacactgggatgcaggacacttgtttcaagacaaagacggaaacacaaaaacttattggggtaattgggaaagttacctgaacggtaaacaacctttcggtaccggtaacaacctggatcaggacatttacagtactcagttcttaaacgaagacaacaaatatctgttgggcagaggatggcagacagtgacagaccctattaccggcaaagaaattttatacaagaatacggatgtagataaatataacctgaatgatcccgcattctcacaggactacaacatcaatatgtctggtggtaatgaccgtggcacctactacgccggtttgggatacaaccgtcaggaaggtgttcctgtcaatacattctacgaacgttattcattcattaccaacgccagctataaaattgcagactggctaacttccacttcgtcactaaactataatcgtgccaattggaaaaacatgcccggctccaacggttctgagttaaattatttcggacgagtacgttcacttcctcctactgttctttttgaggatgaagaaggcaacatgaaactaggtccgggcaccgctgatggtaaccaaatgtaccaacccgaccaatggtggaatgacaatcaaagcgataagttcacaatgagccaatcctttaagattgatattctgaaaaatctgtcattgacagccaacatgaactggtattactctgaaacatatcaggaaagtttcacaaaagattatgaaaatactcccggaaacttcgtgcgtacaagatcggctacagcttattataaccgcgatttccgccaaacatacaatgccgtattaaactataacgaaaccttcttccttgaccatcatgtagaagtgatgttaggtatggaatactacaacaaataccaacgcggatttgaggcacaaggccaaggtgcacctaccgacgacctccctgatttgtcactgaccgataagggcgaaggtaagcgtactatcaattcatggcatgagaaacaacgcatcctgtcattcttcggacgtttaaattatgattttaaggacaaatacctgttgtcattcgttttccgtcgcgacggttactcctctctgttaggtgacaaccgttggggattcttccccggagtatctgccggatggattttcggacgcgaagacttcattaaagaagccattcccgtaatgtcattcggtaagttgcgtgccagctacggtatcaatggtaatgcgtcaggtattggtgcctataccttacagggaagctacggttcaagcaacggttcattcaactataacggaaatatttcttatctcatcacagaacttcccaaccctaacctgagatgggaaaagaccgctacctttgaagtgggggcagacttgagcttctttgccaaccgactgaacactaacctgacatattataaccggctgacatcagacaaatatgcagcattgagtttcccgacctctactggtttctcatctgtaacaaacaataatggtgaattccgcaaccaaggtatcgaaatcgaactttcaggaaaaattatcgacagcaaagactggacatggagcgcctcaggaaatatcgcattcaacaagaataaaatcgtttcattaccggacaatggtatggaaagaaaccgtatcaatgcattccaagtatataccggaaacggagatgagaaaaaatgggtaggcggacaacaggaaggtcaagaaccgggcatactgtatttataccaagcagatggcatttaccgctcatacgatgaaattcccgccaatctggtgagaaaatatggctccagaacttactatggacctgaggcatggaacaaactgacagcagagcaacaaaatgccactacgaacttccctatccaaccgggtgacacgaaattccatgatgtaaatggcgatgatgtaatcgatgaattcgataaagtaaaagtgggagctacctctccacgctggaccggtggtttcaatactactctcagatggaaaaacttccaactatacggacgctttgactatgctctaggcttctggttgtatgaaaatagtgggacacaaagtactactccatggttcatgggatgttaccaaggaacatacaatacaccgacaatgtactatgatacttggtcagaaagcaatccgaacgctaaatacccacgctatctgtttgccgaccaaaacggaaaaaacaactacatagcatccaccatgtttgcatacagaggtgactatttagctatccgcgaaatctcgctgagctattcattgcctgaatctgtagctaaaatgttgaagatgcaacgtgccgaagtctctattacaggacagaacctgggttacatcaccggtgcgaaaaatgtaggctctcctgaagccaacccaaaagacaacggtgcagtcggacaaggctattcattaccacgtactattctgtttggggttaacttaacattctaatttaataactaaaaaagactacaattatgagaaataaaatattaaaattagcatttcgcttcagtgcatttgcttttgttgtcggcatgacaggttgcgatgctttagacttagctcccattgacacttatggaagcggtaacttctggacaagaaaagaacatgtaatcgcttatatggacggaatacacaaaaatttccgtgaccaaatattccagcaacaatatgtattaggtgaagcacgcggtggaaccagtgttcccgatgttgctgtagacggaacttcggtttcttatcagggtatcgtaaatcaagccctgaatgccgagtctccgggaatcacaaactttggtaacatatatggatgtattgcgaatataaatatcatgttgcagaagactctggaagccgactatatgaccgaagaagaaaaggcctattatctggggcaagcttacggtttgcgcgctttctattacttcggactgtaccgcacttatggtactttacctctgcgcttagatccaaatccggtagtaaatggtgactttaacccaaacaacctttatatgaagcgttctgccggttctgaagttatgaaacaaatcaaagcagacctgaaatcttcactcgattactttggcaataataactctttcgaccccaataaccgtaagaatttaaaaggctattggtcaaaagctgccactgaatatttggctgctgaagtctacttatggaatgctaaggtttctgtagatgacaatacagcaaacaatgcagacttaagcgtagccaaaaatcatctgcaaagcctgatgaataattatgatctctccttacagtcaaactatgaagatatattcagcgtaaacaataaaggtaataatgaagtaattttcgctgtaagatatatggaaggagaagcatcaaatccatttacagctctcatgtacaactatcaaaccggagctttcaaaacagtaggtttcaacgatgaaaatggaaaacctatgggagatacgctgaaagttagcaccacaggaatgcagcgcatagaatatctaccggagttctacctgtcttatgacaagacagatagccgccgcgatgcgacattcctgggagcctattcacgtaaagacaattcattggcaggtacagtgtacaaaaaaataatgggacacttcgatgaatccatcaatcgctatatttgggacgctgatgtcattgtctatcgtttggcgggcgtatatctaatgatggctgaaatagcaaatatggaaggcggagatgtagcttcctatataaacaaaatacgtgagcgtgcttacggtaaaaattgggacgcaaccaaatatggctacaccaacggtaattttacagaaaacgagctggctatcctacatgaaaaagataaagaaatgttaggagaaggacaacgctggtatgacctgaaacgtatgacattgaccaaaggaggcaaacatctggtattctgtccggaaggcagcaaagatggtcaaaaggctatcttaactgaagccgaagcttacaaactatactggccgatagaaaccaatatgattaccaaagatcctgaattgactcaaacaccgggatactaataatcaaaacatctgtattacagatatagtcgattttaacattgattttggaagaggatgcccgtgagggtgtcctctttaattttctatgatgaatttgccgcaattcatctctaattacttatcttagcctcaaaatgacaaccttatatcatctaatcatgcagaaaacaaaactaaaaatgaaaaaatgggtaattctcctcaccgtttgcctgtcatcatcaatgctattcgcgcaaacagcattttcccccgaacaacataaaactgtttgttctgaacgaagtgacggacgttatctcagcacctacggagtagtacatgccatgctcaaagataccaaaccactctatgcattccggcatgatttcacccggcaagaatttgccgaatggcaaaaagaggtacggacagccatgatagaaatcatgcatcatccccacatcaccggtcagccaatacctgtttgtatagagaaaatacagaaagacggttatcggcaagagaaatgggagttctatccactgcctcactgtgtttctactttttatatactgattcccgataaagttaaaatacccggtcctgccgtactctgcattcccggctcgggtatgacaaaagaaaacctcatcggagaagtttccgccaacaatatgcgggcggctatggccttaaacattgcaaaacaaggatacatctcagttgccgtagataatgcggcagcgggagaggcagccgacctggaacctttgacaggaacaagttatgattatgatactccgtcacgcattttgctggaattgggatggagctatttaggctacacttcttttctaaataaacaagttttggaatggatgaaatgccaacccttcatacgcaaagaccgcattgttgtcagtggtttctctttggggactgaacctttaatggtattgggcgtcatggacccttccatttacgcttttgtctacaacgatttcttatgccaaacacaggaacgggctatcgtgatgacagaaccggaccaaaggggacgtcgcccttttcccaattccatccgtcatttaatacccgacttttggaaatactttaactttcctgatatagtggcttctcttgcccctcgccccatcattctcacagaaggaggactggacagagacttcaatttagtaaaacgagcctatgaaatcagcggacatccggaaaacgttgaaacacatcattatcagaaatatacggcaccggagacacgtaatactgctcaaaatttgcctgaaggactcggcagagcctctttctatgactctgtaaatgtagatgggccgaaccattacttcaaaaatgaatttgtactgccatggctggacaaagtcctggccgaataactcttaaaataagactaaaaagccgcagcttcgtttcccaacgttactgcggctttcaatcttattaaaaactaatattatttcttcattatctcttcgcaaagcgtatagctgcgaatcatcattctgggaatatggaacggccccttgaagatattacccttagccggctgtgccactgttccgtcacgatgcagatagccataccattcaccatattctttatcagggaaatgggcataggtccagtcgctgatttgcttatgcatctccagatatttttcattgcccgtggcctgataagcatacagagtggcaataatggcctctgtctgcggccaccagaacttcatatcctgagaataatcctggggaggaagattcttgcaatcacggaaattaatgataccgccatattctttgtcccatccccagtcccaggaccagtcaaggatagtcaatgccatatccaccaattctttatcccaattgcggtacttggcctcttccagaataaaccaggccgtctcgatgcagtgtcccggattgatggtgcgaccgttgatagaatcgataaattctccgtcaggacctaccatttcaagcaatgccttgaattcaggatgcatgaaataagtacgcaatgccttgatggaacggtctatctgctctgtcagcaacgggtcgttgatagccgcacggatgcgtgaagcggtatttaccagaatcattgtgatggaatgtccctgcgatttcaacgtatccagatacttcggctccaatatgcccggagtgttcaggaaatgcatgatgcgcttgaacagctccagtgctttttcggcataagtatggtctcccgatgcaatggcgtattccgacatggcaatggcggcaaagccttccgaaaagacataacggcgtttacgcaacggagttccgtcttccatcacttcaaaatacatgcgtccgtcggcatcgaaacaatgagcctcgataaagtcgatacagctttttgaagcagccagccattcgggattcttctctatattattataggcataagctgcgataaagccgaaacgtccttgaaaccataccgatttggtggtgtccatcagacttccgtcacggtcgaggcaagtgtatacaccaccatgcttacggtcaagaccgtttttcaaccaaaacggaagaatgttttcggtcagatccttcttatagcatgctgcccaattcgacaaatattcgtttacattcataaaaacaaatgttttatttagaatttattacatctttcaaagaagttaattgcttccagttctttcttcatggcagcttcttcttcatcggtcatattttggaacggagtgcggttcttacccaaatccagcccaatcagtttcataatgcgtttgccaccgacaatattgccgcgataatggcagataacattgattacttcctgtgcaaagttctgacgttcgcgggccagttccaggtctccggctttccatgcttcaatgatgcctaccagttctttaccgttataattggttgttccaccgataccaccctgagcaccgcccatggcaagacaaggcagaattgtttcatcctgtccgtgaagcatatcgaacttaccgttcttgtaaaggcggcactggttatattcatacatactttcgaaagtatatttgataccggcaaagtttggaatacgtccgtccacagcttcaaggaaagccaccattgacaagaatgcaccgttgaatgcaggaatatgatagaaatagaaaggaagttcgggtgcaccgcaagcgatttcttcgcaatatttcacaagttcttcaatacggcccactttcggaaagggaggagccatggcaccgataccccatgcgccaatcttttgggcatgttcagccaaacgcttgctggacttcacgcaagtgcttcccacatgtacgataaccttaaaaccttgaggagcaacttccatccagcgttctgccagtttcatgcgctcgtcttcggtcagcatataaccttcaccggaagaaccattgataaatactccttgaagaccattctttaccagcaattggcaataagcttcaatcggttcataattcacttctccgttttcataaaacggggtaaaaggtgcgtcaataagtccgataatcttttccataactatttcttttagagttttacttttcctattaattttctgatttttccttcaccgataaccggagcatgcgggtcttcgggataaacgatggcaaactcaccgggttgtaaggtggcaaacaaggtgggtctatcgctataaagcgcacagtctccctccttttggtaagcctgagcctgatgttccaacgtttcaacagccttccaaccgatagtttcctgccccgtcaaaaggatatgcacatcaatgtaatcgcgatgcatttccagcacttgcttgtcggcaggaacacattcgggatttacattattaataaataagttatcgccatccagttcaatgcgtcccaagggagcattcagcaagtcatgcgtctttacataatcaaataattgtttgaacagcggatgaaggctttctatccgcgaactgttctctaatcttgaaactatcatcgttattttttgtataatttaatcgaccatattatctgtcttcgggcgcaggaagaacaactgaagagccaaagcaaccagaacgatgacactcaacatggcaaagccctgtcccaatccacctccgtcagtccatttgcctaaaagctccgttacggctgcaccggcaaatacgcctgtcatgttcatgattccgtatgccgttccacgatgtttgtctgaaacaaactgacacagaatcggcatattgttggcatcgaagataccgtaacccacaccaaagagcaagccggctcccaccacactcacaaaactgtgtccgaaacccaacagcaacaaggaaggaaccgtcagccccaagccaatggcaccggtataaacacgtccgcggatattcttctgcacccatttatccgacaggacaccacccacaatgacaccgataaatgatgacagagcaatggttatagtagaaatcggacctgcctcagccatggggatattcagactttcggagaataatgtcggaagccagttcttggttgcccatcccggcaaactgggagctgcaaaatagaacaggataatccagaaagcccagttggatagtacaattgccagtccgctgaacacagaccctttcttgcgaggcgtttcttttgcaagtttctctatctttatatgagtaggattttcgtgcaggaacagcaccaataccaatgcatagacaatacccacaataccaaaccaatggaaagtaagctgccaggagaaagcggccgccaccgttgcgccgaaacctccgatagcctgtccggtgtacagaccggtcatgtgaataccgatggccagagagcgggatttatcctgatgccagtcggcaatcagtgaaagtgctgaaggaatatatagagcttcactcacccccatggtggcacgcagccagtaaagttcatggaaatcagtcgcataacccatcaaataagtcacggcagaccatacaaaaaggctaccgacgattaaccatttacgactcacccgatcagcaataacaccggctaccggactcataaagccgtaaatccacaaaaatacagccatcaaagctccaaaagcctcagccttattgagctccacaatgtccactttcattgcttcctgcatagtagaaagcatctggcggtccatatagttgagaagtgccacaacccacaaaagacctaccaccacccaaggatagattttcttgtttttcatttatattaaatcaattcgactgcgcaaatataggaacttaatttaataacacaaatagatttaatgaaatattttacgatataacgattattttttaaacagaggtaagaattaaaacaagatgctgttattgaagccttctttaaggtaaagtaagtataaatcatttaaatttcatacagaataaaagagggaaagaagaccggcatcctgcaaaattcccctccataaaagtataaaaaaaataattcggcgaactattatattaataaatcaccgaacaattcataaattaatttattatatcaggaaagagagtcacttctttgccaaatcgtccattgtcttaccctcgtaagcacaaatcgcctgtttatactcctcggctatctgcttcggctctttggttgcaatatcataacccaccatcactgtacggcactcacattttacctcctgcgtatccgttgtcacagcacgttgcagcaatgtgaagcttttatgccctaactgaacaacagctgtctctattaccaaatggtctgaaaagaatacaggcgcatagaagttggcattgatatttgctactacaatggccatcttattccaatccgcactccccaacacatcttttatataagttgtctttgccaaatcatataaagaaaaataaaccgaattgttcacgtgtccgaactggtctacgtcactgaaccgtatttgtaccggcatcgtatgcctgaattttatttcctctcccatagttatgcttattaatttcattcaaatataatacttttcctaataaaagaacactaaataagagattattcttacttttgcgttcaatttatttaaagtgaaaccattaacttaaagaatagacatggataagaagtttagcaaatccaccctttgcgtacaaggaggatggcagccgaaaaaaggagaaccgcgcgttttgcccatttatcaaagtacaactttcaagtatgataccagcgaacagatggctcgtttattcgaccttgaagatacgggctatttctatacccgcttgcaaaacccgaccaatgacgcagtggcggcaaaaatagctgcattggaaggtggtgtgggcgccatgcttacttcatcgggacaggctgctaatttctatgccattttcaatatctgtcaggcaggtgaccattttgtatgctcgtctaccatctacggcggtactttcaacctcttcggagtcacgttgaagaagcttggcatcgaatgcacttttgtcaatgccgacgcacccgaagaagaaattgacaaggctttccgcccgaacaccaaagcattgttcggagaaaccatctcaaaccccagcatcgatgtgctcgacattgagaagtttgcacgtattgcccacaagcacggggtgcctctgattgtcgacaatactttcgccactcccatcaactgtcgtccgtttgaatggggagccgacattgtgactcactctaccaccaaatatatggacggacatgccaccagtgtaggcggagccatcgtagacagcggcaatttcgattgggaagcgcatgccgacaaattccccggactgactcagccggatgaatcttaccacggactgacttataccaaagcattcggtaaaatggcctatatgaccaaagctaccgcgcaactgatgcgtgacctcggttccattcagtcaccgcaaaatgcgttcctgctgaatttgggactcgaaacacttcatctgcgtgtgccccgtcactgtgaaaacgcacagaaagtggccgaatggctggaagccaatccacaggtgaaatgggtaaactattgcggtctgaaaagcagcaaatattatgaactggcacagaaatatatgccgaacggctcttgcggtgttattgctttcggactgaacggcagccgcgaagaggccatcaagtttatggatgcactgaaactggcctgcatcgtgactcatgtggcagatgcccgcacatgcgtgcttcatcctgccagccatacacaccgccagttaacggacgagcaattgatggaagccggagttgctcccgacttaatccgcctgtcggtaggtatcgaagatgccaacgacatcatcgccgatctggaacaagctttagaacagattaaataagataagccatgtcagtcaaacgggttgttatcatcggagccacttcgggcatcgggctggaagtagccaaaggctacctgaaggccggatggcaggtaggcatagccggacgcagggaagaggaattggaaaagctccgccggactgctcccgaacaggtgtgtgcccaagtcttggacgtcactcacgaagatgcaccctatttgctgaaacaactgatagacgagttgggaggtatggatttatttttgctgagctcaggcattggtaaacaaaacctctctctgacactcgatatcgaattacagactgccgccaccaatgtggagggtttcatccgcatggtgacggcagcctatcattattttgaacagcaagggcacggacatctggctgtgataagttccattgccggaaccaaaggactgggttcggctcccgcctattccgccaccaaacgttttcagaatacttacatcgaggctctcgaccaattggcgcatatcaaccgcctacccattgtgtttactgatatccgtcccggatttgtagccacccctctactgaaagacgacaaatatcctctgctgatgaacgtttccgcagtcgccgcccacatcatcaatgcactcaacaaaaagaaacgcaccgtcatcatcgaccggcgttatcaagtgctggtgttcttctggaggcttattcccaaatggttatgggtcaagttgcccgtcaagaattaaaaagcgaaaaacctatcacaggcaaccactttcattttaccttgtaataaaaaaggaccggattagaatcctcttccacccggtttaacaattccagcatcttcacggtggtctttgccttgactttcggataagtttcaaccaaagacttcaaactcatcaagcttcctgccatagccacaaagcatatcctttctttttcaccgcccaccggagtataaccgtgcaagttatacccgtattcagactggaatatataatcatatttacgaacagcgtcgtcccattttgacaagatatacaacctatcaaacaagttcgttcggaacaataaatgttcggaagtttcggtcacatccgtcatcaaataaaccaagcctttctctgtggagaatttattcaagtcacggcagtcatacaccttatcctttgcatcctccggaaatgtttcattcataaagtcaatagtataagaaggagataccgattggttttctaacttataaattgtattatcaaatttccgggtaaacagcacaggcgatgaagcactcaactgatgccctgctataaaacaaaatggggcaatttctatcaatggttccaacaagcccgttgtctcttccccgtgaatcgcagttatagaattttccgacaaccggccattggcgtaagtttcattctccaaataaataaaatctccgtccaaagcaatagagtgataataaccgggcaattttcggctactgatgaaattgccttccgcatcaaccacttgtttccccgctttatcaagtatataaaggttccccttccattctatcaacctgttgacacgggcaatcagcgcatcgtctttcgtctctaaggcaataacgcgagaatcatataagaatgtagtatctgctatcgatggctctccttcttctaaaacagccgttgcttcacttccatattgtgaagtagcgcaccctgctccaagcaataacaggaacaacaaaaggaaatattttgtccgcataatatttatgtttctcaaggtcatacagatatatcaacattgaaaaaaggattcaggtcctttttcattaactacttgagatataagcctatactcgcacacagccaaagtgcacaataataaattccttttcataagtatttcaattttaaagttaacaattacactaatatacatcttatattgaatagaaaaaaataattttatgcttttctttgtaacaacattctctctgcttccgtctatctagatgaaagcgcttttaaaaagagaacctgaagtataaacataaacaaaataaaaccatgaaaaagtatatattggcattagcactgttgtttgtctgtcacatcggttttgcccaagaccttaattctctgttcgatgaattcaagaaagagcctaacgcagactgtattagcatttcacctttcatgatggctatcggaaagatgttcatgggcaacgacagcgatgcgaagcttgcccgaaagttcaaatcaataagaattttggatttggaagcctgctcgacaagcgtaaaggaacgcttcagcaaaaagataaacgcacagcgaattaaagactacgaaacgctggttcaggtaaacgatgaaggtgaaaaagtgcacattctggcaaaaagtaagaacgacgtgatacgcgaactgctcatcgtctgcaccgggaacggcgattgcacattggtacagttaaagggaaaagtaagcaaagaaaaaatagccaaactactggcaaaagaagaaatgatgtaacatggacgccgctagttttaaacaacaatttctaccttgccatgccaaactctatcgagtggccttccggctgatgggcaacgttcaggatgccgaggatatggtgcaggaagcgtatctgaaattgtggaaaaagcgcgacgaactttccgaagttgccagcatcgaggcttattgcgtgacgcttatcaagaacttgtgctatgattccctgcgttcctgccgaccggacgaagacagccgactgcccgaagagcttaagcttccgacagacagcaacatcgcccgcgagatagaacaaaaggacgaagcaaggcaggtaaaaagactgattagacagttgccccggtcacagcaacaaatcatcttgctgcgtgacgtgaatgactgttcctacgaagaaatagaacaagtcaccgggcttacagccgtcaatatacgtgtattgctgagccgcgcccgcaaaaagatacgtgaacaatttaatgaaattatgaactatgaaagtaaatgaaatagaagaattactggtccgatattatgacggtgagacgaacgaggccgaagaaaaggaactgaaagagttctttgcccaagcggacgttccggcacatttacttgccgagaagagactcttcatgcagctcgcctcacaacctgaaccggagacacccgaaggactggaaagtaaattaagcggtctgatagacgaatgggacacgcatgaacggcgaagcacgaagataaaaaagcatacacgcatcatccacttacagtgggtaggcagcattgccgccagtctgctcatcttgttctcggtaggaatgtatctgtacaaaccttacactcctcccactccgcaagacacctgctcttctcccaccgaggcatacgcagaagctcagaaggcactgttcatgttctcgtcagcacttaacaagggagtgcaacaaatggaaacggtgcacgaaaccaccgaaaaagtacaaaagaatgtaaaccaacagttgaaacgatttaaaaacttgagacaatgaaacgtacatatattattaccctgctattgtccctttgctcattattcacttatgcgcaagagtctttttttgacaagtatgccgacatggaaggcgttacgtccgtatatatatccaaggcgatgctcagcctgatgcccgatatgaaaacagaggaaatctatatcggagagctggcaagcaagttggacaatattcagattctgaattgcgaaaaagcatctgtcactgcacagataaagaaagatatcagctacatcagtcccaagaacggctatcaagagctgatacgtattaacgatgaaggtgaaaaagttacgattttccagaaacagaataagggaaagcaaaaagaattcgtattgctgtgcgaggaacagaatgagcttaccatcatcatcatcaccggaaacttaacattgcaagaaattcaaagcatcgttaataagaattgacgaaggagtgctcaaaaaagaccttgaggttttgaagaaagaccttgaggtttttgaaaaagatgaaagagtttttttaaaagacccaggtcttttatcagggaactgttatcacgaaaagccttccgcctttttcattataacggttctttgtgacagattttatccatgtaacacgtttcacatcaatccattataaatcaatatattatccccacaatatgtgtgaaacatgatttgtatttatctctgttcaaacacttttgccggaagaaaatccgtaaatatgtacccaaaaggtctcttaagacctttcccaaacaatagggaaagttttctccaatagtagtaacagtcttcaagaacaatacctattgtttgggatataagataccgtcacattatctcagttcttatacttcaccagcataaccaccggattagactcctcatccaatcccgctgtcacctctttcagtcggcccttcaatccatcttcttgataagcctcgacaagctgaccggccgacaatgtctgaacagccgcgattccattattattgattggatgcaaaaacatatccacactgcgtttctttacaaaatcactattgagcacctttgccttataaagctcattggtctgcttatcgtacataaaatcgttcataaagaatcctcgcccggtagtaaaatcaaactctttctttacagtgtgaagaaaataataacgatcggtgacagcccccattgtcagaagtatctccgggtccttggtaggtgctttcacaaagaacggaaccagtttattcttttcgggcacataattatatactgtgtccgaagaacagtcaaccagcagccattctccccgattcggaataatcggacgtacagaagtcatcgccactccgtctccctgatgcacacaaggggtcttgattatatcataaggaagataaatgtcgcgggtaacacttccatctttcttagaaatgagcgaatgataagatttcccttcctctctggactgcccgtccttataataaacagacgcatcataacaaatcagattgtctttgtcataattgagaacatccatgtattcggtatctttgggatgagcgaaagagcgcttgaagtttcccgacaaatcatacacataaatcttcttcgctgcagcgcagttgacaaacatttcatcgttgttttcatccagaataattccgctgataaaattatattcttcggcaccttgtcccttccggtttattttccgtatggctttaccggtttttctgtcataaacaaaaatgtcgccatcgtttgcccagttcttcaccaacagatacttgtcacctatatccatcacgctcccctgagtcacaaattcatcacttgtctccaacggaatgtattccacatccataaaatcctgaagaactacttccttctcggaatgttcggtggcaatatccaccgtgaccatcgttgtctgctctttttccgctccgcatcctacacacacagccaccaagagcagtatcgcaaatagttttttctttttcattgtattatttggtttgataaatcatttctttcttttctgcgtaggcaaagaaaactcatgtgtccggctcatcacaccattgctctccgtggtataaactctgaacacagcctctcctgtcttcagccttctgccaccgcgaatagttgccgtataacgaatcgtatttcccaccggcatataggcaatctgttgtgccggagaaataagaatatgtttcatgccggtcacttcttcaattatgggagtaacattgtaggcgggagtatcaccgtcattcaccacatcgaataccagcttactgtcttcctcggcatcaatcgtgtggttacggttctcatcgataaagcggagatttgtaacatgcaagcctgaataagccggggcataattatcatattcctcttccgcaccatcgtcctgtcggggcgtagtcactgcattgcctacagcagctccggctactgttcccgccaaagctccgaactgcgaagcattgtatccgcctgccctgtcacctacaatggcacccagcacacctccgatggccgcacctgcctgcactgccgccgggttcccttgcataccataagaagaacatcccgataggataagggtggaaagcaatatcaatgctactttttccataagctatgtgtttgtttactctttttatggataaatatacacctttcgggagagaaaacatccatttttccgttaaagtttcttatcgctgcaagacgacagacagataaggctaaataacataattactaacgaaaaagggatatttttccctatatttgcccgcaagtattatcaatgaacaaataaaaatggaattaaagacacaatatcaacaacgagttgacgaaacggaaagagaacttcaaatagtaaggaacaagattctgcgcatcagcagtctgcgggttgtcctgtttttggcaggtatcttcggagtgatatatggctatgatgccggagcagctgccttatgcttgatcactgcactcaccttcgtaccgtttctgatactggtgaagtttcacaatagactcttcttccgaaaagaatggctggaaacatgtattcgcgtcaatcaggacgagatttccgcattggataataactatgagccgtttgacgagggggcggagtttgttaacgcaggtcaccgctattccctagacctcgacatcttcggacatcattcactgtttcaggcaatgaaccgcacctgcacttcgttcggaaaaaacaaattggcggaatggctgcaagaacctttggaaaagaaagaggaaataagggaacggcagacagcagtcagcgaacttgccgggtatgataagttccgcgaatgcttccgcatcaccggcctgctttacaagggcaaagccgatgaccgaaacgagattaaggaatggacggaatcttctgcttatttcagccgaatgtggtggagccgtcctatgctttgccttgtgccttcggccaacatcatcctactggcactgggaatgacaggagtgatttcaatgagttggttcgggcttgcgttcggtacttttgtggtggcgagcttcgggcttatcaaacacgtcacaaacctgcaagggatatacgacaaaaagctccgcatcctttccatttatgccaaactcattgcgctcattgacaggcaagagatgaaagcaccattgctcgcccgcctcaaagcaaagttcggcacggatgggaaaagaacttccgaaatactgaaggaactggctaccgaactggacaaactggacttgaggaacaaccaaattatgtacgtactcttggagggatctttgttttggcaactccgccaggtgatgcgtatcgaagcgtggagaaaaaaatatggagaatgtcttcttcattggctggatatgctcggcgaaatggatgcactctgttcaatgggaacttttgcgttcaatcatcctgcttatacttatcctgtgatagccgacaaaccgtttgtcttttgtgcgcgggagatgggacatccgttgatgcccgtaagccaatgtgtgaaaaacgatgcagaaattccttcaagacctttctttgtcatcattaccggagcgaatatggccggaaaaagtacttatctgcgtaccatcggagtaaactatgtacttgcctgtatcggcagtccggtgtgctgcgactcgctcgaaatctatcctgcccggctcataaccagcttgaggacttcggattcgctcaacgataacgaatcgtatttctttgccgaactgaaacgtttaaaacaaatcatcgaccgactgaactcgggtgaggaactttttatcatcttagatgaaatcttgaaaggtaccaattcgatggacaaacagaaagggtcttttgcccttgtcaaacagctgatgacactgaaagcaaatggcattatcgctacacacgacctcttgctgggcaaattaatcgaatactttcccgatgaaatccataattattgttttgaggcagatattacaaacaatgagctgactttttcctataagatgcgtgagggcgttgcccgcaacatgaatgcatgctttttaatggaaaagatggggctggtcatcaacgactaaccccacccaacaatttatcacattaacgtcttaagcaagtaaggttcaccttcacaggcttgctttactttcataacataaagagtcatagaaaaaatcaaaatttattagtctctaagcaacgtgtgaaatctaatgcatcttgtccggtcagatagtacacggaagatgctgcttcatacgtataagggatgaaacggaataactggacagccgcaaatctcttatcatgagaaatgagataatccatccgaacgttaccgtttgactttacttgtacatcactgtctttgccaaatgttttcttatccaaccgggctgtcaacacatgcaaatcgcatacatcaaagaaacaagacccctctttggtcacactccccgtaggagtgtaaacccattctttgcttcgccagaaaagacggaaaagggcagtaagaatcagaattgtaccgaccgtcataaataccatgctcatggtggacgtagcatcacccatccgcaaagaggtaacgaaagcgccaataccgccaatggcaagtaaagccgaaacaataactgatgaaacactgatacgttttactatatcgggatgtactcttgaaaacagagtgacatctgctgaaactgcattattcataatcttcaaatttattctgttactaataagaaaaatataattatccttatacaccgacttattaccctgctgcaacaagataaaatcaatgcataaaaaacacaagtaaaagaataaaatctaaatcagaatacgcctcatgccaaagatataatgctcgcaagcatcatcccaactttggctgcgcgaagtatcataaacacgttttgaacaatgagtaagcacgtccatacgtgtggccaatttgcgcaataaggctttaatatattgtgtagtctctatagaagagaaacgatataaacgctctgctgaagtacttacacgatgagctaatgtgtaggcatcgctgaactccatgtcagccaaatatctttctctctccaaaggaataatagcaccttcattcacagaatgtgagtgagtgaaacagtcatcttgcacagcacattgccccggcacagctatcgaagaagctacgctgagatgccctgtcttgactcctgccaatgcaagcacaaagaataatatgattgctatgaatcctttcatctttttattttcctattgcaaagatagaaaaattcatcttccctgtttcatttcctatattaaattaacaaacaacaagagaatttgttcaacaattacaaacaaataaaaaagggtcgtaaccaattgattacgacccttagtatatatagttgtgtacagattactcagctttaggggcttcttctgtagttgcaacttctgcagcaggagcttcagcagcactcttcttagaacgacgagtacgagttgccttcttagcagttgcagtcttagccatgttttcatcatagtcaaccaactcgatgaagcacatttcagcgttatcacccagacgatgtcctgtcttgatgatacgagtataaccacccggacgatctgctacctttacagaaatttctttgaataattctgttacagcgattttatcttgcaaattgctaaatactacacgacgtgaattagtagtgtcatctttagactttgtaattaaaggctcaacgaatttcttcaaagctttagcctttgcaacagtcgtagtgattcttttgtgcttaatcaaagagcaagccatgttagataacatagcgcttctatgagaagcagtacgacctaaatgattgaattttttattatgtctcattttttattctttatctaatttatacttagaaatgtcagttccaaacgacagattcagactctcgagcaaatcatcaagctccgtgagcgatttcttaccgaagtttctgaacttcaacaggtcggtcttgttaaactgtaccaagtcacccaatgtttccacatcagcagctttcaaacagttcaaagcacgaacagagagatccatatcaaccagcttagtcttcagcaactgacgcatatgcaatacttcttcatcaaattcttcattgccgtccacgtcagaagtctcaagagtgatcttttcatcagagaacaacataaagtgataaatcaatatcttagctgcttctttcaaagcttccttcggatgaatggaaccatcggtagtaatttccaatatcagcttttcatagtcagtcttctgttcaacacggaagttttctacctgatattttacattacgtatcggtgtgtaaatagaatcaatgggaattacatttacatcggtacagtattcacggttttcatcggccggaacgtaacctctacctttgttaatagtaatatccatctgtaaagttgcttttgaatctaaatggcaaataaccaattcaggatttaacacttcaaatccagtcaaatacttacttatatcacctgccttaaattcactagaattctcaacggtaatgcttaccttctcgttttcaaattcttct

SEQ ID NO: 6731 - DNA, 257 bp, Unknown
  gut microbiota DNA sequence
ttgaaccagctgcgttcaccggacaggagttccgctttgagttgggcgtacagctgttcatgctccacaggagtggtgcagtcaatggcgtgctccaagctgacacagagaaagcggcgtgagccggtgcggtctaccaacaggtcttcccggttgctggtgccgatgaacgaggcgatgcggggcagtgccgaagcgctgcgtttgtaggccttgcggatgttcagtgcggaggcttgcatcaggttcttcagcag

SEQ ID NO: 6732 - DNA, 11352 bp, Unknown
  gut microbiota DNA sequence
ctaaggacaaaggacattttgataccttccaaatgaaagatattccgggtgatacctcattcctggaaatgatggatatcttgaacgagcagcttatcaatgaaggtaaagaacctatcgtattcgaccacgactgtcgtgaaggtatctgcggtatgtgctctatgtacattaacggacatcctcacggacctgctacaggtgctactacctgccagatttatatgcgtcgtttcaaagacggtgataccattactgttgaaccttggcgttctgccggtttcccggttatccgcgacttgatggtagaccgtagcgcatacgacaagattatgcaggcgggtggttacgtgtcaatcaataccggtggtattcctgacgctaacgcaattcctatcgcgaaacctattgccgatgaggctatggatgctgctgcatgtatcggttgcggtgcttgtgttgctgcatgtaagaatggttctgctatgttgttcgtttctgcaaaggtcagccagttggcactgttacctcagggtaaagtggaagctgcacgccgtgcgaaagctatgttgagcaaaatggatgaactgggctttggtaactgtacaaacactcgtgcttgtgaagcagaatgtccgaagctggtttctatcagcaatattgctcgtttgaaccgtgaatttattgctgcgaagctgaaagactaattacggttagttttacttgatatttgagagtgccctgccttttggcggggcattttttattgcaatatcttctgtatctcggcacttttttcttttcggagattccgcggagagtctccgaagtacttcttacagaagttggagaaattggagagtgattcaaaaccgtgtccgaaacagatttcggaaatagataaccggtcgtcccttaactgataaagaatgctttcttttcgttgttcggtcatccattcgtgaacgggaacatggaaaattgcatcaaaaatacgacgaaaagtggtaaggctataacctcccagttgggcaaactcttctacagtctttacttttttgtaattctgaatgacgaagtattggaatgaagtggtatattgggaaagagggtgtatgagggatgccagctcataatcagtataatagtgtcctaatataaaagcaagttctttgcgttttagggataggagttcacggcagattttgggttctgataagtacgtattggtacatatcagaaaatattccagtgcagggacgatttttaagggtgtattgatcagaggtcccgggatgtcattcataatatggtggtaacgtttatcacaaaacagttccggttgattgaagaggtaataaatacattccgtatctatcattgccaatatttcaattttggcggtgataggttgtaaaatgaattctcccgttttgacagtagttcctgcatactcttcgctatttaccaatatttctcctttcaggatgaagagcataaaattgaactcacttcttatgacagggatatggaatccttgcttatgaaagacgtggaatactgcgttttccactgattttggacacatttgacatttgtccgtgtttccacaaaagacatcaggcattaaagtgggggctttggtttgtgtacaggcaaaaataaaataaataatttgatttacaatgaataaggtgaaataatgttattgtttatggtggggagatgaggtagggataggaataaaagtgctccgcaaatgaaaatcgattccgaggaggaggctattttcattgcggagcgaaaggaatgggggggaaggagtgtgtcaaaactaaaccgacctatccaattgtcagctgtaggggcagggtttacctgcccgaagacacaaagcaaaccgttttcgggcgagcgaacctcgcccctacgaactaaacgacagcattattcacgttttgacacaccacgctctattagatcctcaatgtattatcaatactttgaaatcgtttagagctttatatagcttgaaaagtcttattttgtaacatctttaacatcgtctttattgatattgttattggtttcattctcccaagtgttaactttgggtgtcaacttaacctctttggcatctgtcggtaattcgagaatatagcggatattcttgttcttttcccatgtaccgcttaatgaaacttcttttgtgccattaaaagtaatagtagtattatcaggagctttaactgaatatgttatttcgatttttgcggtagaaggtaaagtctgaggcataagcatcagggcatttgttatttttgtatcagttgtctttgagaggttggcaatattatcatcaccttcaggagcagcattccaattaccatcataagcataatcggcggttccttcagatgtgccccatccgctgtcataactataggtatttttattattaacgcctttaattgaaattcctgtaatagtatatgcgaagttctttaccagtttggcagagaagttgatttgggttaatatatgactaaaggcaagttcgattgcttggtctgtagtgggcttggttttatcagtggcactggcgacaagcaaatcttcttgagatgctacctctttgatggtatatgtaaaacttgggtattttgttgtaacattccataaatcagtactgatagctgttttaggagaaaaagcaaaaaattggatattgtctgaaaccggccaataatgtgtagtgctcatgccccacgcaccttctgccgcttttgttacctcttctccatttataaaagtagtgcctattgcagtagcagttgctatattgtctgttcctgtattataagcatatactttaaattcagagaaatcagcttctagcatggctgtagctcttgctgatttattaacaatagttttaaaactgaccggtgtcttttgtgccggagcatcaatttcttcattttgtgagcaacttgtgattgctaatgcagctacagccgcaaataaaatctttttcatattcgtatgttttaaagttaataaattcatttgtttcatattttaattaacgggtaatatcacatcctcttcattctcccaattatcaacattgccaccgatacctccgcctcccgaaggaggaacttccacatcatccaccacaatcttttcatcctccggcagcttaatctctatttccggaggttgaggattatggtctccttctccgggctcatctccgtcatcgggaggtctcaccgcttccgtgatttctactttcgcctcttgtttggaaccatccaccctaactataatcagttccaaaaaccgggcgatatcggctctggcttgcgtcagcttgggatgaccgaaacaggtaaaactaccttttatgactccgtctcctttgccggtttcgcaataaatgggagcaaagcggcatacacctgcatctttacccaggtgataacattctgccattccggaaacactgccaatgacggaggcgacattttttaatccttctgtctttatggcgaaagtgtaagtcgttaccacagctttgagtttcaccttcagcataggcaattcattctctttcccgacttccacatcattcagagacagcatataaaaagcatccggtccccataccatgttttctgtttcactgatgcccagccctgtacaatttccggtgcacgccattattgtttcataacttccttcgtcttttacttgcaccacttcggtatcataattgtaaattacagccgaatagtgtcccggaggcacttttacctctccgccttttaccggcagataagtatctatctttcttccttggtcgtctttcggataaaaaataacccttacaccttccggcagatggtcggttaccccttcccaattgagcgaaatattgattcctgtgacaggataatcatctaaaagcgtgcggcggctacacccccacattaccggtagtgaggagaaaagcacaaggaataaatagcgtgctcgtttcatattctttctctcctcttcgttatcaaccatacaagcgagattttcgctttggtagggcctatgaagttgtattgtccgctacttgtccacactagtgattcttcgtacggggtatattttcggtattttgttgtcagatatccgatgcccagactgaattcgaatgccagatgtcgtgataccggaagggaatacccataactgaatcctgctgcaccataatatttcccttgataaccgtcccctttatattggaagtcgtaaatgcccccttcagcgtatagcccgataaaatgtcccgtcaattggcggcgcccggcgcggttgcccagccagaaccggctttctatgccgcccgatagcaattgataacaaatttctttgttgctatcagaccaccagggacatttatattcggcgttcaatgaccattgtcttcctatgggaacttctatctcgatgttaggggctagcgctatgtcgtacaataaattgttttttacagcaagtattgtcttgccggtattctccttttggtttttgtactctattggctgtgcatctatgtttgggggcaataggcacaaaagcacgaatatgctgaatatagtagtacattttcccataaatcattttttatatgaggcaaatatagaagatataatctgaaaaaaaacttattaaacgccctatttagggagttgaaagggtctgtgaagcgattggaaggattttgcaagttttgaggggagattgtggaaataaagcgggtggtaagtttattattcggacttgttgctagtgaaatgtttcatattctttattttgatactccttttttatcgtattgttatattgtgtgcgaaaacggatttattctgtgaaataattctaaaaggaagcccgatttgaagtaaagatttggagagaataaagggaaatcttatatttgttatgtgatttttttcatagtattagatttaaggttaacaaaggttggagcaaggcgttgctccttttcctttttttataagtttctctttctatcttattacttatgaatcatgttctccatctctttatttccatctgaaaactactatatgtacacccactttctaggattaatagaattttagtggggatagtttcgtttgttcttaaaaaccttccgttctttattgtataagaatgagggggtacattgttctcttggggatttaaatatcatatcacaaacaaagggaagaataagccgtttcttaggctcagccaagtccttttaaacggaagattattacagtcttccacagcagaccgtacagtctactgtaacggactgtacggtctacggtagcggactatacagtccactgtgggagactgtagtaattcgacggacaggcaggcataatcgaaaggacgaaaatgcttgttccagttaatgaaacgacttaaagagttcaaaacatatgcagcatttgaaaaccggaggaaataacatccggtgacaagtatttgcttgatatgttaaatccctaaaaataataactgccccagaatagttgcacccacttatgacctcatactcttattcctttttctgacatactttgcttattttattcattcacaacgaaatatccgtttgttggtttataaataggctgtttgtgaaatgcccatattgggcttttccttcttgaacaagcggtgcaaatgggtaaacgatgcgaaaacatttgcttggttttacagataatcacttcagtgctagttgactgtgaagtactccgtcagcataaaaagcttctgcagctctttcttttattaatgaaagcaaaatatatattaaccatagccgtaattaagtaatcacaataggctttgccaagtcgtgtattcaggcaggacagagacactgacagttgctcgatgaaatttatgctgttcctaaaaactgctttctgttcaagattgcgaagacagatgatgttccctgctaattttctattaatccattttctacagacaggcattggagataatatataaaataaattgagttctctttttgctgaagtgttttcgatgtgtgtttcttcaaaggggataagaattttagagaattataaaaaaaataatgaaaataaatttgattctgccaataaatgtatatatttgcagtgatatatgataaacacgtttgtgaaactcttctttttagaagtttttatttaccttaaaaaaacaatactatgctaaaagacatgaaaacggttggagtgctgttgctcctttctgcgatatcagcaggaacagcgtatgcagttcccaagtggggaacggctggcgtaaaagagattcagcaaaatggtgtttgtaacggagtagtaacagatacgacgggagaaacagtcataggggcatctgtagtggtgaaaggaaccactaatggtacaattacaggtctcgatggagacttttcattatcaggggttactaaaggaagtatattggttgtttcctttgtgggttatcaaaatacggaagtaaaatggaatgggcaaccgttaactattgttcttaaggaagatacaaaagtattggatgaagttgtagtagtgggttatggtactcagaagaaagctaatttgtccggtgcggtagctgctgttgatgggaaggtattgcaagaccgtcctattaccaatattggacagggattgcaaggtgttgttcccaacttgaatatcacgatgaacaacggtggtgctccgggtgctacttccagttttaatatccgtggtaatacgtcattgaatggtggtagcccattggtattggtggataatgtacagatggatgccaacttggtaaacccggatgatatcgagtctatttcagtattgaaagatgcggcttctgcttctatctacggtgctcgtgctgcttatggcgttatcttgattacaaccaaaaaaggtaagaaatcagacaaaccgactgtttctttatcagctacgggctattggcagtcaccggcattgactttccacaatgtaaactctatgcagtatcttactatgatggatgaagcttatcagaatgatggtggtagcggtcattatttcaaatcgcaggtctatcagtatgccgaagattactttaatggtaaatacgattctccggtattctttgatacagcttatgatacgtataaatacggatattgcggtaataccgattggtgggacgaattatataaaacttctttctcgcaaatctatacagccaacatcagcggtggtaatgaccgtactacttactacgcatctgtaagtatgaacgatcaaggtggtattttgaaagcaggagacgataagtacaataaatataatgctaatgtaaatatctcatccaatatcactaaatggttgaatgtatcggcaaagattgctcatacttacaccgatgagttgcatcctaccggtggtactacagctatgaactctaccgcttattcagggctgtcttcttattcgggtatgatgaagggtgacttgagcccgctgatgccagtaaaacatccggatggacattacgccggacaaggcagctacaccaatcctgtagccattatggaacaaggtggtaatgcacagtacaagcagaatgatttgtggatgaccggtgctgtgaaaattactcctatcaaaggcttggtaatcaatgcagattatacatggaatttctatggtaagtcatctaatcagcatgtacagaacttctatgattatacggctgttccgggtacagagaattattatccgtggactaatccaagcagtgtgactgtaaccaacaatgatgattattacaatgctttcaatgcctttgctgaatatactttctctttgaaggagaaacataattttaaggtaatggtaggttataatcaggaaaataaacataagaaatatcactatgcaggacgtaagaatttgattgattcttccaatccttcgctgaatctggcttatggtgacatggcgatgaacggttcggaaactcattggtctgtgaacggtttctttgctcgtattaactatgattataagggcaagtatttgttggaactgaacggacgttacgatggttcttctaaattcccacatggtgatcgctacgcattttttccatcagcttcagtagcttggcgtgtgtccgaagaaaaattttgggaaccgattagaggatggtttgacaactttaagcttcgtgcttcttacggctcattaggtaatcaggcattggacgaaagccgctatggtaacttcccttatttggctacttatggaatcaatacaaaatatggtgcattgcttaacggaactcgccctgtggctgtatctgttcccggattggtgagtgcttcatttacttgggaaactgtaaaccagatagactttggttttgatgcttctttctttggtggacgcttgaatactagctttgactggtatcgtcgtaatacaaaagacatgcttacggcaggacaggctttgccggctgttttgggaacttctgttccgcaagaaaatgctgctgacatgaaaactgtaggttgggaagtttcattggaatggaatgaccggctgagtaatggatttggttatcatattaaaggtgtattgtctgattatcaggctagcattaccaaattctctaatcctactaaattacttggtacacactatgtgggcgaaaaactgaacgaaatctggggttatgtttctaatggacttttccaaagtgacgaggatgcgaaagcagcagaccaatcttatctgtcaggtggtagttggggtgccggtgatgtgaaatacgaagacttgaataatgatgggaaaatcgatataggaaagaatacgttggatgactctggtgaccgtaagattataggtaacagcactccacgttactcttatggtattactgccggtttcgattacaaagggtttgattttgaaatgttctggcaaggtattggtaagagagactattggttaggaggttctcagttttggggattcactgatgaatggtgtacaccgcttacttcatctcttgattactggacagaagacaatcgcgatgcttattttccgcgtctgcatcactacggtgtgaacggtggtaaccatcaggtatctactcgttatttgcaaaatgctgcttatcttcgtctgaagaatgtggtattgggatatactattccacgcagtatcactgagaaggtgaaaatatctcgtttgagagtgtttgtacagggagagaatttgttgacatttactccgttgattgattcttacgatccggaaacattgaataacatgacttatcctattaacaagaagatttctgtcggtttgaatttaaccttctaaaaattaatttattaaaggaattatattatgaaaataaagaatatattattcgtgtcattattcgctggagccgttcttagttcttgtgactataccgatttgtcacctatagactctattacagacaagacgtattggacgacaaccaacgatttgaaactttatgccaatggtctgtatggtttgttggcttctccgactgctacaggtgacaatactagtgacaactttgtaccgaaagattatagtggctatttgtttaacgaatatacagtaccggcctcggcatcaagcagtaatggatggtattggaatgatatccgcagttgtaactatttcttgcagcgttatcaaaccgtggaaggatccgaagctgaaattaataaatacgtagctgaaatacgtttcatgagaggtttgctgtattacagcaaaataaagcaatttggtgatgtaccttggtatgataaagatttgcagactagcgatacggaagaactttataaagcccgggatagtcgcgattttgtattgggtaaagtgatagaagattttgaatttgctattcagtggttacccgaaaagtctgattctgaaaagggacgtcttaataaagatgctgcacgcacgcagttggcccgtatttgtctgtacttcggaacttacatgaagtatcataatgaaacacctactacagaatggacttcacaaacgttgttacagaaagcggtgtctttgacggaaactatgatgaatagtggaaattatgacattgtaaaggcttcggatgcaggagctgcaacggtagcttacgaaggctatccgctgtattatgctaatttgttcgtacaggaagatttgtcggactgtaaagaaggtattctctgtcgtttctatgaagaaggagtgctgactcatgaagttggacgtcaggtaggtgaaaacggtacaggtttgagtaaagattttattgaatcattcttgatgaaagacggtactcctatttataatacaaactcaggttataagggagatgaaaatcaagaagctgaaatttcgggtcgtgatccgcgtctttaccagttgattgataatcagcataagccttatagagtacagaatggaaaaccgagtcaaaatccggtagctgactgtagcgccagcaaaagtgtaactggttatccgtgtactaaataccattcagccaataccaaacaggcggaagctcgtaatacgtactatgactggttcgtttatcgttatgccgaagtattactgattaatgcagaagcgcatgcggaattgggagatatcagccaaagcattcttgataaaactatcaacaagttgcgcgaccgtgtagagatggctcatttgactatgaatcctgtagccgatgctgctcctgttaattacggatatcaactttccaatttgttgtatgagattcgtcgtgaacgtcgtattgaattagtggctgaaaatcatcgtttggatgatttgaagcgttggaatgctatgaaactgatggaaaatccaaaaactatgtttggcttgaagattaccccgactgtagaaaaagaatacgaagcagtcaatgttacatttggtggtgataaagggcgtcctgttatagaatatcagggagcgatttatctgtatcagtatccgtcaaaggctattgatgatgccggtcgtaaatggagtaatgatgaccgtagatggttatatccgttgccaactaatgaactggtgctaaatcctaatttggttcagaatccgaattggtaatatctaaaaaagaataatatagctgtgcattttttgcacagctatcaataaagaagggttg

SEQ ID NO: 6733 - DNA, 4997 bp, Unknown
  gut microbiota DNA sequence
ctgcagcaaatgcaggaacagcacggcaaacagattcgtaatatacagggaatacataatcaagagcttgaagctaaagacaaggaaatatcacgattgaataccattctcgaaaaagcattatgctggttcccattgctcaaagaaatgctgagaatggaaaaattatgctatgtcactggttttaccaaggggatggttgattctcttttatacaaaagggaagctctcagatgtagtggaaaaatctattccgaagaatatagacagagatttgaaacaaaaaatgtaattttcaaaattgaacgaagcccgatcaataagaataaattgatgctgactataaaccaacagccaatcagcgaatggttcaaggaacaatgggagaagttacagcagcatctgcgtaactcagtgcagaaagaacaaaaatccaaaggattcagaatgtaatctgatagtatttgattggatttcaataaaattgactatctttgcaagcggatggaggtaactctgtccagacatattagaattttgaagaagcgttatgcttatcttgtaagttagaaacctgagaaacttcgaacgtagtacaaggatagcatagtggttctcacgctatagcgtgggctgctatcaccatatctgtactacaaggttttctcaggacctctaacttaggacgtgggcatttgcagttccacgcttcgtggtttaaactaaagggtactcaaggaagctgcaagacccaattctcttttattatggaaattatttttattggaattgccgttatcttaggaatttggcttctatttcatgcggctatatatttatgggttttattcgaggaatatgttcttcctatactcatattttgtggagttggctcatttttcttttggttgatattttggatatttggcataaaagaaatctttggcatttctaccatgattataggtgctgttatcggttttattctatggatatggataactttttttggcgacaatgggggacatagcgattatgaacatgaagatatggatcatgacatgccgattcatgtaaaaatagacaattaataacccaataaaaaagagtaaatatgaaaaagttttgctattcgattatcggcttatttgtaatagttttagtaagcagttgtagtaatggaagtaaagtgttacaatcgcctgaagatgccgtacgcgaaaggtatgggctgccgtggcaaacagaagaagaatatgaagccgcttgcaagtctaacagaaagttccaagggcttacaccctttacagagcttcaagaatggtcgaaatattattatgaagaagatgccgtattcgaagaaaaagtcaaacagtacgacatgataaacaatacgcttcaaaaactggcattcggggtgatgtataacaagggcaatgatgaaaacgcaatgaaaaaactactcatagaatcaggctatggcgataatgaagaacaatgcaaagcccttatcgaaggattgaaaaaagacggattcctaatgaaagagctgaatgaaatgcgcttagcgcacagaaagcgtatcatggcagagataacccctctgtgcgagtctctaaatgatgaagggattgcgtttcaggcagaaaacagagaagggatagaaaacaatgtcatcaaagaagcgtatgttactgcgaaaccaaaggactatgaaatacaaccgggacaatgtccctttaatttctatatcaaggcatcaatgctgaaagacgtctatgtgagtagttgttcgatatataataagacatttctaatgcatgaagacggagaagattttatatcgggcataataggctttgaagacttgagattgtttccatttatcacaggaaagttagttacatttaggtatttctaatattaaaaccaagaaacaatgaatattaagacatttactattatcgctatagcatcatttgccgttttgtcagttaccgcatgcggtgggaaacaaaaagcatcaatcgaaaccgaacaaacagaagaaacttcaaagacagaagttatagtgagtgacaataaactttttattaactctgatttgtataacatgtcggaagaaaaagtgatattcaatgcgcacggcagactagatcctgacaacccatcctttggtacagaccacatagaccattatcgcactttattcgttaaagaaaatggcggattgaccgttggctatgtagttaagacaacgagaggaatcaccctgcaaaccgggaagactttctatttttacaatgacttatgtttgaaggaaagaacaagggatctttacaatattgttgggatggtgaaaaacaatggagtcttgataccaatgaaaatcacaattgacggagaggacaaccgcatcatgctggaatgtaaaggagatgagacgcttacattcgttccgcttcgtggtgatgattccgaaattgaatatacggttcaagcactaaaagattattgctacaagaacaaacttactatccatgctgtaccttatctggaatttacaaattaaacaaccctaatatagcgaaattcactcttttagtgaaattgggtagtataattccacaatggtaaaaacaaaagagtcgtatcattactcataaacgagcttgatacgactcttctatttaattaggtaactacaattcaagaaggttgttctattggtttatcaaaaataactaattcgtcaaatagaagacataatcataaatagcccaatctttatatttataaataccttctatcgggaactgtaatttgcatttcttttgggcagttgaaagtataagagaaacatcgtcatccgtaactgttaagccttcaggaaaagctaatgtaatatcagttatacagccatttaaatccgaatacaaaaaaatattcatccaaccttttacaccttgagacttatatttattacaaatttcatctaaaaaaactgatccttgcaaaattaccggaggtgcatataaactttcttctgcaaatgagaaatttcggatagactcagcttttttctcacttgtatttgtagatacatacacattgttaccgatactttttctttcaaatattgactgcgcaacagtatattgaaatgcaagaaaagcaaataaaaaaaacaatatctttttcataacagtaaatttaataaagtttgagtaatgaattaatgcatgatgtaccatagtcgtaattgccaaacttatatccttttccactatatcctctactatattctccaaaaatattgctccactttacgaattcattaatatctatagatgtaggcttcccatttgcacatatagaagcaacatacgtttgaaattctctttcatattgaggtattaaagaagggtcagtcaagcccgaagtccataacgattgatatgaagggtcaccatcttcacctttaaaagtccaagaatacccagcatgaatatatctaataataccttgataaaaggctaattcaaattccatcatacctgtatctcttttttccttatcagtatctacttttttaccctgaacatctctttgatacatgtgaataaactcatgttccatgctgctggctaagataccataaggaggaaaagctaaacttccttttctaaaatatgccgacgcatatgtgtcatccaaaaagatagttccagcataagaagtcttattgcgtactgcttcatctatatttctatagcaatttatactggtcatttttgcataagcatcattaacttctttaatttcagcagaagttaatgtcggagctcctcctgtaaataacgatgccaaattagcgtttaaggcagttgaaactgaacgggtgcttggttcaacattacctataaattcatcaacctcattagtacaagaagaccaacatagcccaacgcatgtaagtaaatacaaaattttcttttccataagagatctgatttttaaggttattacaaaacaggaagactgtcactatttataagcaactaatcatccatgttaatatatttttaaataacaattttagaaaaacaacttaaatcgcttacagaaaggattagattatttaatactttaaaatttcaaaggggatggaatggagtaacaaaatcggggtattcacaaaaactcaaggtacaaaacaacaagcaatacagaaaacaccattagttttcatgatatacttaccgctcatcaaaagtggacctggggagaatcgaactcccgtccaaacgaggaaaccatatgctttctacatgcttatctttgccttcggttttcgagcataagcaagaccaaagccaccaacctatgccttatctcctaatatttcgtaagagctatggagaagaactcaaactatccccgattttgctgtgccgctttatcaaacgcttcggagcaagagcttttgagcgacatctcgtttccaccactttggcagaaataaagctaatctactatacttcgattaagcagcgagagcataattttcgttgccagataaaattttgataactgagatttaagtggaaattaccgacccactgcatgcttacataccattccaactcgctgtcaattccagtcaagcccaaaatgatatttcaaagttacgtatttatttgataagaacaaacaaaacagcaaaaaatataatagaataccacaaggcatcataatagttaaattatttaagacttgtaggtagtgcttgatataaagaatgataatcagactatcactttttattttagggtgtatttcggggtgtaaatcctgtaacaatctgattatcaatcttatttgtggagctggagggaatcgaaccctcgtccaaacgaggaaatcataagctttctacatgcttatctttgcctgatttttcgtgcaacggcagaaccaaagccatcaaccgttgc

SEQ ID NO: 6734 - DNA, 13784 bp, Unknown
  gut microbiota DNA sequence
ataatcaaataagatacttcagattacaacaaatatacaaaaaaaagataatttatcaggcaaacagtaataacttataattggaaaacatttgattattcttttttcaaagtgatgactgttatttccggccatgctccgaggcgcatggggaacatcagatatcccagtcctacattgacaaaaagagcctgattgccttcccggtataatccgttgtgttcggggtaaacaaatttagccggagagaatccgaagatgctgaattgcatttcgtgggtatgtcccgatagcattaattgcacatcactttcgggcaatacttcgcggcgccagtgtgtcgggtcatggctgagtaatactttaaatattccgtctgtaccctttaaggctttgggaagatcgccataattgggaaaaggaggattaccgctattttctactcccactaaagcaatactgtcatgtccccgatgaatgatggtgtgttcattattcagcacttgccagcccatgcgtgcttctttggctaataagctgtcgagattggtttgttgctctgcttttgtattccatttgatatagggagaatagtcatgatttccaagtactgagtagactccgtcttttccttttatttggctgagtataggtatgaattcatccagttcggtggctatgttgttgacaatgtcacctgtaaaaaccaccaggtctgcttgttcggcattgaccatatccacagctttttgtattgcttttccatttcgtgtccaactgcccgaatggatatccgaaagttggagaatgcgatagccgtcaaaagcatccggcaaatctttataagttatagtcacttctctgatttgaaaatgctgttttccttcggtggcaccatatacgacgtatgccaatgatgccagtgccactacacctgcaatatatcctccatagagtcttcgtcccgaaatgagaaaaagcagtttcatgataaggatgacgatgacaaatatggctttaggtacggcaaagcataggaatatcaacagaaaattgctgagccggtacatggaatcgggcattggctcgtggatagagaaaatcaccgtcatccctgtgaccagaaataatgttggtatccaataagcccggcgaatccatttttgtgatacacgatggatgtaagctctgtatatataccagtcgggcaatatcaacagtaataagaaaaatataaagagttttattagcatcatggcaattggtctttataaaaaaatgaaatctataaattggcagccagaaactttttcatttcttttatgttcattccacgtcggttggcataatcggtcagttggtcttcacctattttcccgatggaaaaatagcatgaggcaggatgggcgaacatcagtccgctgacagaggcatgaggcttcatcatgccattttcggtcaaagaaatacctatctgcttcatgtccagcaattcattcaacacaaaattgacagattggtcgggtaatgaaggatagccgacggcagggcggattccctgatacttctcattatgcaaatcttttacactgagattctcattgggtgcatatccccatgtcgtcttgcggatatcttcgtgtaatttttcggcggttgcttctgccagacggtcagcgagagtctgtaccagcatccgtttatagtcatctttgtcataaagatgctccatatcggcatccacggtggtggcaaatgctcctactttatctttgatgcctgaagacagaggacgtacgaaatcacttaagcagagaaacggttcgtctgctttacatttgactgcctgctggcgcagtaatgggaaacgtgtgctcccgttcaggtataggttgtcgccatcggcattggcatccattaagcgaaaaatgccatgcgtctcaaagtcggcatccaattcattcaacattctgtgggcttctttcagcagttgcattgcttctgcagctttcggtcgctctttttcgggaaaaccggccaaccacatggcacgacacgagtcacacccatgtatatcggctatggcagcatatttaggctggaaaccccatgcatgaaaaaaataaatccagtttatgtattcactgacttgatgtattttgtaatgtacgatcatcgcttaaatcttagttcttttcctctgtgggctttgtctacttggtggttatggtagaccaaatgcccgttaacaaacgttttttctacttgtgagtggaatgtctgtccttccatgggactccatccgcatttgctcaagatgcagtcggaagttactgtccattgactatcggggtttaccaaaaccaaatcggcataataccccggtcggataaatccccgcttttctatatgatataattcagcgggagcatgacacattttctgtaccaattgttcaatggtcagcactccttcccgtaccagttccatgatagccaccagtgagaattgtatcatcggcatacccgaaacggcctttaaagcaccaccttgtttttctttcagcaaatggggagcatggtcggtgccgattacatcgatacggttggtggctaaagcctgtcgtaatgcttcacggtcggttgcagtcttgatggctggattgcacttgatgcgtgctcccagcgtttcataatctttatcgcagaaatagagatgtgaaacacatgtctccgatgttatttgcttttcactcaatggtttgtcttcaaacaaatctagttcgccggctgtgcttacatgtagaatgtgcaggcgtgctcctgtttcttcggctagttttattgccagggaagaagaatgcatacaggcttctgcactccgtatttcgggatggtatttgatgtccgggtcttctccgtatttttctttgaaagcaacggtattcgcactgataatagcttgttcttcacagtgggtggcaatcagcataccggcattggcaaagactttgcgcaacacttccatgcggtctaccagcatattgccggtactggctcccatgaaaagtttcacaccgcatatacgggttttgtccagttgagacagcatatctgcattattgttggttgcaccgaaatagaatgagtaattcactacacttttcgttgcagcatcggcaaacttggcttccagcgcttcgagattggtggtctgcggggttgtattgggcatatccataaaagaggtcactcctccggctgctgcggctgtactctctgtatgcatatccgctttatgggtcagccccgggtcgcgaaagtgcacatgatcatctatcacacccggcatcaggtagcaccccccggcatctatttcctcatcacagggatggagtgggagagtgccgtctgctatcacttctgctattctgtcattttcaattacaatcgaaccgtgaaaagtctttccttcattcacaattcgcgcattctttatccaagtacgtttcataagtttttcttttgaggatatttatggaaccagctataccatttcagttggatgactcccataatcgcttcaccaaagatgctgctgttcattttggaagttcccaattcgcgattgacaaagatgaccggaacctcggcaattttgaatccgcatttataagcagtgaatttcatttctatctggaaggcataacctttgaaacggattttgtccaatccgatagtttcaagtacctgccggcgatagcatttgaatcccgctgtggtgtcatggatgggcagaccggtgattatacgtacatatttcgatgcaaaataagacattaagacacgtcccatcggccagtttacaacatttactccactgacataacgcgaaccgatggctacgtcataaccttcgcgggcacatttgtcatacaaccggggcaaatcattgggattatggctgaagtcggcgtccatttcgaatacatagtcatatcctttttctattgcccacttgaacccggtgatataggcagttcccaatcccagtttacccttgcgctctatcatgaacaggcggtcgggaaattcctgctgcaatcggcgtacaatagctgccgtgccgtcaggagagctgtcttctatgattaagatatgaaagaacttctccaaaccgaatacagcccggataatattttctatattctccttctcgttataggttggtataataatgatgctatcggatttctccatacgtttatttgtattagctgaataaatatcatacaaatgtaattaatatattatgaacctctgcagaatttaattttattaaataaaaaaagaagggttaaccctgcttttacgcatggataaccctttcatcttacagaatagtttagttttctttagaaagccacacctacgcggaatccgaagttttgcaatttatccatgtcatagttaaacacggttcccttgttggtggaatagttgtaaaatcctgccaaatgaaagccgatactgttgggccatgggtaaatatttacaccgatttcgggagatacatagaagccccatgtgtcgtcctttacttcgtagatgtagaaatcactggacatctttgtatagttggcacccaatttcaatccgatataaggttggcagataccgtcactaaagcgatagtgagtggcaaaaccgaaaggcaactggaatacggaatgttgttggtcggtggtcagtgcagacgagctgttgataggcaatgtctgacgtggaatgtattcattgttagtgtgataattaataaatgcaccgatagacaaatcaggtaagacataatatccaccttcaaagttcataccccagccgcttgctttgtttgaaaagttgttgctgataggagcactgaactgccagtctacattaaagtaggtcatcggagtaatttgtgcttttgccggtagagcaaaggcaatggcgatggcagctaccgccattattctataagtaaaatattttatggttttcataaacttgctaatttattaaaatgatttatttgtttatttcttcaaataagggctttgtgcaaatgcctgattgatagccgttgtagcacggttgacattcagactgccgctgctgccgatcagaccgctgatataagcattccatacaacaggcagtttttctttagctccttcgggcgcacccagattgactaaatcagccaataatgaaccggtgctgtagctataagtgatggagtaaggatagtaccatccgcctccccagtatccgccccagtatccgggaatccaataaccgggataatagttccaccatggaccgttgttataataaccgttaaagtagtaagtgctggctacgtagctcaattgcaatccgaggtcggcatcttccttgtctggtgtacgcatgtaaccggcaccgtccattttggcaacgaatgcactgataatcagttgtgcattatcatctttccaatattccggttctttagaatctccgattacaagaatactgtcgggaacgtaataagtgctgaagctgttgaatttagcactagtgtcatgattggtaaatactagatactcattgtccagtttgtccatgtccgggtctttttcgcaagataccaaggcaaagaccgccagtaggataggaattaattttttcatgtcaagtttttgtttaagttaatactgattttttcgtttgttgtactcctaaaaacggaggagttacgcttttgttcactacaatcgttttttttgtgaactttttctcaaaggacagagcttcttgttaaagtttctttttgagcgtatagttcagttttgatatcgcttttttgaaatctttgcccaccatagtcagtgcgctgtcgccttcggctacaaaattggtcttttcatggccgggagctgccgaaacaagttggtagataatggcggtgctgtcattggggatgccgataatggttacaacggtaccgctatcggtaaatacctgatcttgtccgttgttggcacctaaataagtggtagtcagattatatgtacccagtgagtcttctcctgtttcttgcagagtgagcagatagttgatacccgagacgtcagcgccgggtaaaacgccttcgtaagtataggtttgtaaatcgcccaaagtgctgtcattaacggcaaacaaagagtcactttcgctttcagctatcatttcggcagatttatttcctttggagccgcaagaaacaatcatggcagccaaggctgctgcaataaatacttttttcattattaagtcaggtttttaatggttatttggctaaataacacctgtctgacttattttgtttagcagagtgaatttttttgttttcagcgtaacagtaccccgtttattttctttctgctgagtgagttgtaaagtacttttgccgattgagtttctgtctcttccggtttttccgcatcgggcattgtgccggtagtgattaatgaaagggtatttttcagcatcaattcgttttcatcgcccaacgggagaagaggagagataagtcctctttcgttcaatttgtaatcgggagtgataccgtttacataatccgctttgccgtcggcattgagtacgtatgccactaccggccataagataaagtctatctcatcattagtgtagccggacatggcaaccggttttccgactgtggtttcacctatcactaccacattgtcgtcacccatgtaaggacgcaggcagttgattacggcttcggatgcagaagccgtaaaagtagaggtgatgacatatagtttgttcaggttaagattttgtgcagacgttgttgaaatgaaattatacgtagtgtcctgtggagtcgtgatatcattatattgcatggtgcaaaacggtttgccgagtgccgattccggcgccaacaagctggcaagttcttgggcacaagtcagatagccgccggggttatagcggagatcgagaataaatgcatcgggagcttcactcttgaactctgagaagatttgcaacatctgttgtgcgtagtccgtttcgtatccgttgtctagggggccggtactgaatttattatataccatgtaggcaatcttcttaccgtttacattaaatactttgttgatataaaacggatttatttccaccggacgtgatgccccgatagaaagcacatcgacatctgtccaaatatagtcatcttcaccggcaattatactttttcttgtcaatgtggtagcgtctcccgaaatcagataaccgtaattgttgacattgatttgtgcatctcctacggcagaaatccagtcaccgcgttgaagaccggcttctgatgccggtgaatcgggaagaacaaacaatactcgcgcataggtgtgtgaggtcgttcccagcggatcggtgacgagttcgaagtcgaatccgtaagtcgatgtctgattgaggaaagaacggctgacatttgctttcatttctacataagagaacgggtctccttttccatccaatgcttttgtatagagtaatttctgtagaaattcttccggttcggcaaaataatctttttcagaaatttcaggtatttggtcataccatagataatgttgtttcattacttcttctatccacatatcgtcgcctacaagcgcataatattctccactgcggtctactccgcatgacgtgataaaaaatagagttgtcagcaagtaaaatgtatgtagtaaatatttcattttatatcgttttttaggtttgcaaagctaggtattttattcgtaaatcaggtatttttttctcatctttttatattcctccagttccttttgccatccggcacgaatttcttcttcactttttccttctgtgatttgccttctgactttcctgttgcccaccagcatgtcaaaccactgaggacgggtaaagaatttatcagcttttcccatattcttgtattcctgataataacttatgatgtatcttaaagagaaccctttagggggcaacaaacttttcatgttatttccataacaatactgtcctttatacattggatttttatcaaagccttccaaagcttccggtttgaatcggaaggaagacagtcggatgtccggcgagccgatgacttgaaaagggtgataagtgcctcgacccacactgatggcagtgccttcgaaggggcacagcgagggataaagcgcaatcgcctggtcattaggcaggttgggagaaggtttcacaggaagggagtaagaatcaccgtgtttccatccctttacgggaatgacagtcagcttgcattttcgttttcccgccagccacccttcaccgtttatcatttgcgcgagttcgcccacggtgcagccgtgcaatacagggatggggtgcatacttacgaagctttttaattcttttatccgaacaggcccgtctgtataatcgcaaggattaggacggtcggtgataatcagctctttatggttctctgcacacgcttccattacgtagtgcatggtgctgatataagtgtagaatcgtgctcccacatcttgaatatcgaacaccaccacatcaatatcctgcatctgttgtggagtaggtttcttgttttttccgtatagtgattggatagggatgcctgtgctgatatctttaccgttcttaaccgtttcacctgcatcggcatttcccctgaatccgtgttcgggagcaaatactttttttatgttgatatttgaagcaagcagtgtatccaacagatgtgtattgcctgtcattgatgtttgatttaccaccaatgctacccgtttattgttcagcaaaggaagcagggtttccatttgctcggctccgtttactatcttttgagcaaacaaagtattgataataaacaaagaagaaagaaggaaaagatattttgttttcatgtttatatgcagattattttgtaatattgcacaaaaataagaatttaattgaagatgaacgcacttgctatcattaataaatattattctgaagaaaacgagttgaaacatattctgctcactcatagtcgttcggtggctgacaaagcgttgcagattgccgtcaagcacccggaacttcatctggataccggctttttggaagaagctgccctgttgcacgacatcggtatttttatgaccgacgcttccggcattcagtgttttggcactcatccatacatttgtcacggctatttaggttccgaactgctgatgaaagaagggtatccccgccatgcattggtttgcgagcgtcacaccggggccggaatgtcattacaaagcatcatagagcaggatttaccgattccgcatcgtgatatggttcctgtttcgatggaagaacaggttatttgttttgcagataaattcttttcaaaaacgcatcttgatagagagaaaagcgtagaaaaggcgttgaaaagcatttcgcgttatggagaagatggagtgatacgctttaagcattggtgtgaatgtttcttgtgatagataagacttagagcttgtttaaaaatggctgaaatcttttcattataaagtttccgtatcagtcgaatcgtttcttcctctctcctttcattagccgttgaaacgtcctgttgataggcttccggtcatgaaagaacatctcgtcatcgctctttcagcctcctttcattcgtaaaacacgagaattgcattgtgtgctctgaaggcagattgtgaagggacttggaaagcacggctgaaacgaggatgaggggaagtgctgtcatttttaaccgtttgataaacagtgtgttttgactggaatgtaaggatgaagggaaaagaagaaatgatcggatcggggagggtgattcaatctgctcctacatgaaaaggtgctgatgtttttaaaaaacttcccgagcttttccaaaaacttcccgagcttttccaaaaacttcccgagcttttttaaaaacatcaaagtctttttgtgtacatacgcattggtctatacatacggtggcacaagcctgcgtgtacgtatgcgtaagcctacacatatatacgcatcgggctacacgtatatacgcataaacctgcacctatataggtattatgtcaggtgtcgtaccggtcaaattggaactgtaagattatgattgaggaaaatttaaacaggctttgagtaactaataaaataaattaaatatccgcttaatagttcataattggcggattatgcttaattttgcccctcaaagcgtaaaagtattgtgaatgacgccactaaaacgacatagatttataccatttttactactatttgcctgcctgatgctttcgttaagttcgggtgcacaacgcagaaggagaaacccggcatccggtagagataccctgaacgtagatacaacactggtagatacgctttcggtggatactgttgcacctaaaaagaaacaaccgttggatgctcctgtagcatatgaggcgaatgattccattgtatttaccgaaggtggatatgcgcatctgtatggtgacggaaaagtgaattatgaaaagattgaactgacttctgccgtaatcaccatgaatatggacagcagtacggtatatgcccgtggtgttcctgattcggtaggcgtggaaaccggtactcctatctttaaggatggggaaaccccatacgagtctaaaatcatgcgttataatttcaagactaaaaaagggtttatcaacaatattgtcactcagcagggtgaaggatatgttaccagtgaagagtccaaaaaaggagcaggtgatgagctttatcttcgtcgcggtaaatatactacttgtgaccagcatgaccatcctcacttttatctgaaactttcgatggcgaaagtacgccccaagaagaatgtggttttcggacctgcacaattggtggtggaagatgtgcctctgcctattgctgtgccgtttggtttctttcctttcaatagcagctattcttcagggtttatcatgcctacttatggtgatgaaatgaatcgcggtttctatttgcgtgacggcggatattattttgccatcagtgaccgcatggatttgaaacttttgggtgaaatatttacgaaaggatcgtggggactttccgcacagtccaattataataagaggtataaatatagcggtaactttaatgctagttatctggtgaccaagaccggtgagaaaaatatgccggactatagtgtgacgaaagactttaaactttcatggagtcatcgccaggatgcaaaagcaagtccgaacagttcgttttctgccaatgtgaattttgctaccagcagttacgaccgccggagcatcagcagtttgtatgatcctaatcagtattcaaataatactaagacatcaagtgtgagttattcgcgcaactttcctgaaattggtttgaacttgtcgagtacgttcaacctttctcagaatacgaaagactcttctattaatgttacgttgccggacttgaatatttctttgaatcgtatctatcctttcaaacgtaagaatgctgccggagacgaacgatggtatgagaagatttctttccaatatacaggacatctgaccaatagtatcaatacaaaggataatttgattctgaagcagggaatcagtaaatggaataatggtatgcaacataacattcctgtttccgctacctttactttgttcaaatactttaatgtggtgccttcattcaattataccgaacgttggtatacacgtaagattgagcaaagttatgaccctaatgctgccggaaatgtaaaaagggataccattaatggttttagtcgtgtatatgattacagaatggggattcaggtgaatacgaaactttatggtatgtataagccttggaagaaactgtttggcgataagattgaggccatccgccatgtcgtgactccatctgttacagccaattatgctcctgatttcggagcttctcgctatggatattataaaacatatcagtatacagacgaaaacggagaggtacgcaccgtggaatactccccgtttgccggtcaggcattctctcccccgggtaaagggaaatcggagagttttaccttctcattggacaataatgtggaaatgaaagtaaagacggctaatgactcaataaagaaggtaagtctcattgatcagttatcggcatcgcttacttataatgcggcggctgagactcgtccgtggagtgacttgagtatgaatctgcgtctgaaactgacaaagagttatactttcagtatgaatacatcatttgctacgtatggttataagtttgatgaaaacggaaatgtggtagataatgatcgcacagaatggtcttatggacgttttggacgttttaagggatatagcggttctttctcttacacattgaataatgatacatggaagaaatggtttggtccgaaagatgatagtaactcgggcaaggataagaataaaggaaacgagaacgaggctcttgaacaatacgatgatgaaaatactgatggtgaagaggaggataaatccggtttacgcaagacagaggcggctgctattgatcccgatggttatatggcattcaagatgccttggtctttgagtctaagttatagttacagcatcagtgaagataggtcgaaggaaatcaataagaagactatgcgttatccttatgcggttagtcactcattgaatgtatcgggtaatattaaattaggcagccgttggaatattaactgttcttccggttatgactttaataccaaggagatgtctatgacaacagtgaatatcagtcgtgacttgcactgtttcaatatgagttgcggcttggtgttcggtccgtttacttcttataatttcagtatccgtgcagcttcgaacttgctgacggatgcactgaaatgggaccagcgtagtaatacgggcagctcggttacttggtattaaaagacgatttaccactgtatgggttgttgcccatgtgctatcagatattcattggctcggctgaaatgtttatttccgaaaaatccgttatatgccgataggggtgacggatgtgccgatgccaataccaggtgtttgtttctgtcgataaatgctccttttttctgtgcataagctccccataagataaatactaaattctctctttcttctgccaatgcccgaatagctgcgtcagtaaattcctcccagccttggcgttgatgcgaagcagcttggtgcgcacgtactgtcagtgtggcattgagcatcagtactccttggttggcccatcgtgttagatttcccgtggtggggataggagttcccaaatcgctctgtatttctttgaagatattctgtaaggagggtggaaaaggtacaccatcgtttaccgagaagcaaaggccatgtgcttgcccgggaccatgataggggtcttgtccgataatcaccactttcacttggtcaaaagggcagaggttgaaagcgttgaatatcaattttccggggggatagactgtggtagtctgatattcctgtcttacaaagttagtgagtcttacgaaataatccttttcaaattcaggagccaaatgttgcttccagctttcttctatttgtacgttcattccaattactttttagtttaaat

SEQ ID NO: 6735 - DNA, 5146 bp, Unknown
  gut microbiota DNA sequence
ccgatctgattcgtgctctaacataggactgattaatttatcagatgagttgcatgcccagttgtgcgcattcttttctcatctcttcgggccagatgctggcttgaatttctccaatatgtgctttttgcagatagagcatacataaacgtgattgtccgatacctcctccgatacagaggggcagtgtgccttccaacaggcgtttatggaaatagagttctttacgtttttcctgtccgctcagggttagttgacgaagcaatgcttccttgtctacacgaatacccattgaagaaagttctaccgaacggtcgagtactttgtcccataccaataggtcaccgttcaatcccggcaaattattttcggggttgactgtagaatagtcatcatagtccggtgcacggagatcgtgttcttttccatcgcttaaccggcatccgataccaataataaatactgctccgtatttttgtgcaatagcatgttcacgctcctttggagtcttgtccggatatatctgaagcaattcttccgaatggataaaatggatgttgtgaggaaggaaaggcttgatttgcggatacatttcacataccatatattcagtgcggcgcatggctgcataaatacgggtgacaatttctttcaggaaattgacattgcgttgttctttggtaatcactcgttcccagtcccactggtcgacatagagtgaatgtaagttgcccagttcttcgtctgcacggatggcattcatatcggtataaattccgtatccgggttcgatattatattccgctaaggtcagtcttttccatttggcaagtgagtgaacaacttcagcttgtgcatctcctaagtctttgataggaaaggaaacaggacgttcggttccgcttaagtcatcattgatacccattccttttaaaacgaatagtggtgctgtcacacggcgaaggcgcaattcagatgataagttctgctggaagaactcttttatttgcttgatacccaactctgtttgctttaaatccagcaaaggtttatagttggcaggtttaataaggtaactcattatatatcattctaattattttaatagttcgcaaatataggtattatttgtgataatgctactgttttcgttgaaaatatagtcaaattgtttgttttaagcttattttatagagcaaaatattatattgtttcataaagtgagctttttattaggagaaagaaaatatattttgtacttttgcgcgttcattaaaacaacgcacccgtagttcaatggatagaataccggattccggttccgacgatatgagttcgattctcatcgggtgtacgaatttagcaatctcctgaccaacttcagtcaggaggtttttctaaataatactttccttctgtgaaccttttttcttcgttctagttattcagttatgaaacttttgaaaaacactgttgttatttagctttttcttaaaaaataatgctaataaataatattgtttatttgatgaattgtgtatattaaaaacatgagtatatattcgctttagtatttaaaatatttaattatgtgattgttttgaaactgacgattaattaaacttatttatttaaacattaaattatcaactaaatctgagattcatgaagaaggctctctttttaatgatgtgcttatgcttctcaattagtgtattagcacaggcaaagacggtaacgggaacggtggtagatgctatcggagaaccgattatcggagcaagtgttctggaaatgggcacaacaaacggtacaataactgatgtagatggtaactttactctccaggttccggaaggtacaaaactggaagtgagttttcttggttacaaatcacagcaaattgtggtgggcgcgcagagccattacaaggtggtgttgaaagaagatactgaagtattggatgaagtggtcgttgtgggatatggtgtgaagcagaaacgttccactatgactacggctatttcgaaaatggatagtaaagtacttgagaatgcagcgattgctaatgcggcacaagcattgcagggttctgtcagtggtttgcgggtgacgaatacatccggtgctccgggtagttcgcctactattgtgctgcgtggtggtgccggtattgaatctgccggaagtccgttggtggtagtagacggagttgttcgctcgatggatgatgtcaatccggcggatatcgagtcaatccaagtattgaaagatgcagcttcgactgctatttatggtgctcgtgccaataatggtgtcattttggtgcagacaaagaaaggaaaagaaggagttgcccagatttcttataaatttaagggtggtctgaactttgcccgtaagggatatgaatacatggatgccgaaaactacataaaatacggacgtttgggacgtcagtattcgggtggtagcttgtcacaaattgatggtatgcgcggttatggtgctgtgtatggtcagaataaccctgaacaattttctatccgatatctggatggcaatgaagacttgttgcaggaaggatggaaacaaatgactgaccctatttcgggtaagcaaattgtatttaaggattatggcactactttgagagatgaagtatataaagatcctgctttcactcaagaacattatctgagttttaccggcggtaatgaaaaaggtacttttgccgcatcattaggatattattcggaagacggtactgtaaaaggtactctgtacagacgttttagcggtacattgaacggtaattataaagtattgcccatcttgaatataaagggaggggtgaatttttctacttcggaagctccggaattatattatgatgatacggctgacttgtttgagcgtttacagagtgtggagccgacatggaatccttacctgccggatggctcgcctaactatggttatggcaaacgagatggtaatcctttgtattggcttgataagctgaccaatcaaaataacactcgccgcactacattgaatatcggtgctgatcttgagttgataaaagataaattgtatttgagagaaaacagttctttgtattattctgattataccaaagaaacgtttgataaggcataccgtgattactggaatgaaaatacggagcgtaaagcatcttttgaatatacacgtactattcagcaacaacatagcttgcagttggaatatactgatacttttaaagaaaaacataatctttctgctatggtgggaggtgagtactttgaaaatcaatatttacaatataaaggtacagccgatggtgctccttttgatcagataccgacattgaatgtttcgggtcgtgataatatgtggtcttattcatatcgtcaggggtatcgtattgcttctggttttgcacgtgtgacttatgattatgaacgtcgttatttgtttactgctgtagcgcgttatgacggtatttctaaattgtcggataaccgttggggcttctttcccggtgtatctgccggatggaatgtgcatgaagaagctttctttaaagatagcgagctggcaaaagtagtatctaccgtgaaacctcgtatctcctatggtatcaatggtaatgtaaatggtattggtaattatgatgtatatggtatttatgataagcagactgcttataatggaacgaccggtattttaaatacaggagttattaattctaaattgaaatgggaaaagagtaaatcctttgagttggggttggatttgggattcttggataatcgttataacttgatattggattattataaccgtactacttctgatttgctgactaatgttaatttgccgggctataccggttttgattctttcaaaacaaatttgggaagtctccgtaataccggttttgaagtggaaggtaacttgagcttgattcgtaatccgaaaggctttaactgggatttctcttttaatgcttcattggtacataataagattattaaacttccttataatggaaatgagaacaaccgtcagggcggtactcaggttttcgaccctaaaacacaacaggttatttgggtaggcggttatcaggaaggacataccatgggagatatttatgcctataaacaagtgaagattcttagtgactggaatgaagtgaataccatggctggtaattatattgatatgattgccggactttatggtcctaatgtcagtgatgctgataaaaagaaatatggattgaccaaacccattgaaccgggtgatgttttgtgggcggacttggacggaaatcataaaatagatcagttggaccgtgtgaaggtgggtaacatctatcctaaatggacaggaggtttctctaccacgctttcttataagaatgtatctttatatggacgatttgattttgctttaggacataccattttgaatatggtggctatgcgctctttgggacagtctgttggttttaaaaatataataaaggaaggattgaagacttggacggaagagaatacaaataccgatctgccgaaatcttattatgatgattctactaataaaaagaatatctaccgtgataccaagggcagtgatattacttctgttaatgatagaagttccagattctatgaaaaaggggactatctggctttaagagaattaactttgaattggaaattacctgttaactggatatctaaggtgggaatgacaaatgcgtctgtatatatcacaggtcagaacttgttctatattaccggttatagtggttcttctcctgaagccccgttgacttatccgggtgtggatgccggacgttatcctacaccgagaactgtgttggtaggtgcttctgtatcattctaagtttattataataaaagaagataacgatttatgaaaaataaaattatatcattagccattatgacagcttccctttttacaatgacgggatgtttggatatggagccggtaagtagcattaccgataagaatatgtgggagagtgaaggacagtttacttcatttgtgtatggggtgcacagtcgtttgcgtgagaactctttcaatatgtttgttttaggag

SEQ ID NO: 6736 - DNA, 9933 bp, Unknown
  gut microbiota DNA sequence
ctttgcaggtttatatagtaatatcaaccagataaatttgtttatcagtaaagctgctgatacgaatttgttgaaagaggcagataaagcttattatttgggacagatgtatggcttgagagcattctattatttccacttgcttcgttcatggggagatgtggtttggacagaccagccgagcacaggttttgaaatagggaaactggataaggctgccagtccggctgcggaaataatggaaaagattaaagcggatattcaaagttcggaagatagctttggcacagattacagttttcgtgaatcacgtacattttggtcgaaagctgcaacgctgatgctgaaggctgaggtttatttgtggtccggtcgccggatgggagggggaagtgccgatgctacagttgctcagaatgccttgaccgatattcagagccatatctccagagaaactcttgatttgatgcccaattatacagatgtgtttgcttatgacgataaaggtaataaggagataatctttactattcataataaacagaacgaaaccgatttgtttggcggtagttggagaaataatctggtgcctcaaagagctacattgagtctttattatgataaggagacagatgggcagtttgagttgaatttcaatggtaatatgtattatcctgttagaaatgagttatacgataaatttgataacttggacactagaaaacaaggaacgttgaaagctgtctttacaatggatgcaccacacgattatgtgggatgtttcccttataaatatcgtggaacaactccgtcaggagcttcagaaagactttttgctgatgattttcctgtatatcgttatgccgatttattattgatgctggctgaagctaaatcattgaccgggggagatccgacagctgaaatcaatttgatacgtgcccgtgcgtataaggctaattatgatgtggctacaatggggtatccgaatatggcaggtgataaagacggtatcaatgaggttttattgagagaacgttataaggaatttatgttcgaaggtaaacgttggtatgatttacgtcgttttggcgatgaatatgtatttgagtatactactgcagatgattcttaccctcaacgtttgttgtggccaatcgacaagaatacattaacaaataaccctgctttggaacaaactccgggatattgaccgtatttcttgcctaaataataaaataaaggtggttttttatcataaaaagataaagaatcacctttttgttttcatattacaataaaatattttatttttacccgcataattaaataataatattatgaaacaaatttcttggttgttaggaattcttttattcctctctcctttacagatgagtgctcaaaagcaggatacggttgcagtgcgcgaaactcgtattccggtattgattgaacggcaggacaatgaactgtttaatttgcgtatagatgctacgcaaagtcaggtgttgaatgatgtgaaacttagtttcggcaaagaagtgaatctgaatgaaatagaggcagtgaaactctattatggcggaacagaaagttctgagagaaaaggaaaaacttattttgctcccgttgattatattccaagtaatactccgggtaaaacattggctgctaacccttcttattctattttgaaagcggaagtgaaagctccgaaaagagatgttgtgttaaaagtagaccagaaactgtatccgggtgtgaactatttttgggttagtttgcagatgaaaccaacagcttctgtacttgcaaaggtatcggtggaaatgacaggagtaacgatggataatcggactgctccggtgaaggttgtgcgcaaagctgatacccactatatgggagttggtgttcgtcatgccggcgatgacggggtagcagcttatcgtattccgggattggcaacttctaataaaggtacgttgcttggtgtatatgatgttcgccacaacaacagcgcagacttgcaagaatatgtagaaatagggttgagcagaagtacagacggcggacagacttgggaaaagatgcgtatcccgatgtctttcggcgaacatgaaggtttgccaaaagctcagaatggtgtgggagaccctgctatcttggtggataggaaaaccggtactatctggattatagcagcatggacacacggaatgggtaacggacgtgcttggtggaattctcaaccgggaatggatatgcaccacacagcacaacttatgttggtgaagagtgacgatgatggtaaaacttggtctgaaccgataaatattacggaacaggtaaaagatccttcttggtatttcttgttgcaaggtccgggtagaggtatatcgatggatgatggtacgttggtatttgccagccagtatatcggaagtgatagaattcccaatgcaggtattatctatagtaaagaccatggaaaaacttggcatatcagttcattggcgcgtaccaatacgacagaatcacaagttgctgaaatagaaccgggggtattaatgctgaatatgcgtgataatcgtggtggaagtcgtgcagtttctactactaccgatatgggtaaaacttggaaagaacacgtgtcttctcgtacttctttgcaggaaccggtatgtatggcgagtttgattagtgtgaaagccaaagataatgtgctgggtaaagatattctgttgttctctaatccgaacgatacgaagaatcgtcatagtatcacaattaaggcaagtcttgatggtggagtgacttggttgcccgaaaatcaattgttgttggatgccggttggggctggggatattcttgcctgactatgattgataaagaaacagtaggtatattatatgaaagtagtgtagctcatatgacttttcaggctattaaactgaaggatattatcaagactaaataaatgaaatgtagattaacctgtctcataggtatgatatttgtctgtgccatgactatggcacagacaaatgcttatccgttacttcctatgccacagaattataaagtaacggataagtcgtttgcaatgggaaaggtaaagctttctactccggttctgaagtcggagtgggaggcttttattgtgaatgccggtggagaattggcggataaagctgccgcagagataaaagtagaacttcttccggttattgatggagttaagttaaatccggatgaggcgtaccgactgtctgtgtccgggaaattgataaagatagaggctgttacggaacgtggggtgtattgggccttgcaaacgcttcgtcagttagaaaagaaaaagggaaagaaaagtctgtttgccggttgtgagattgtggactggccggctttccgaatccgtggctttatgcaggatgtaggtcgcagttatatttcagtggaagaattaaagcgtgaaatagagatattatctcgttttaaaatcaatgtgtttcattggcatcttactgaaaatcaggcatggcgtttggaaagtaagatattcccgatgctgaatgacagtattaatacagtccgtatgccgggtaagtactatacattaaaggaagcacgtgagttggtggacttttgtaagcaacatcaagtcatgttgattcccgagatagatatgccggggcatagtgcagcttttattcgtactttccgtcatgatatgcagagtcctgaaggtatgaaaatcttgaaactcttaatagatgaagtttgtgaaacttttgatgtaccttatttgcatataggtaccgatgaagtagcatttactaatcctgattttgttcccgaaatggtatcttatgtacgttcaaaaggaaagaaggtgatttcttggaatcccggttggcattataagccgggagaaatagatatgactcacttgtggagctatcgtggaaaggctcaaccgggaattcctgccattgattccaaatttcattatttgaatcactttgatacatttgccgatttggttgccctgtataacagccgtatatataataaggtggaagggagtgatgatatagccggtactatattggcaatatggaacgatcggatgatttcaaaagaagaagatatgattgttcaaaacggattttatcccagtatgcttgccattgcagaacgtgcatggagaggtggcggaacagaatatttcgatgggaatggaacgatgcttcctgccgaagatacagagacattccatgaatttgttgattttgaaaatcgtatgttatggcataaagaacatacattcaaaggatatccttttgcttatgtgaaacagactgatgtcaaatggaatataactgatgcttttcctaacggtggggacctgtcaaaagtattccccccggaacaggagttgaaggagtcttatgagtatgaagggaaaacatacggaacacgcaaagctattggtgccggtatttatctgcgccatgtttggggaacaatggtaccggccttttataaagaccctaaagaaaatcatacttcctatgcttatacatgggtttattctcccaaagaccaggaagtggggctgtgggctgagtttcagaattatagccgttctgagatggacctggctccattacagggaaagtgggattataaaggcagtcgaatatggattaatgataaagaaataatgcctcctgtgtggacagctactcaccgggtaaaaagtaatgaagtacctttgggaaatgaaaattgtgtggtgcgtcctccattgcttgttcacttaaataaaggttggaacaaagtactcctgaagttgccgataggtaagtttggaatggacgaaacgcgtcttgtcaaatggatgtttactaccgtctttgttactccggatggtgaaaaagcagtagaaggattaatttattcacctgaaaaacaactataaaatgaaaaacattgctttacttttattggggcttttccttgcactgccccaatttgcccaggaacgcaaatattctacattctatgagcaacgtgcaactttattcgaagaacttccggttacttcgagagatattatctttttgggcaatagcataactaacggatgcgagtggggtgagcttttccaaaacacttatgtgaaaaacaggggaatcagtggcgatatttgtatgggagtatacgatcgtcttgatcctattataaagggaaagccggctaaaatatttcttttaataggcattaatgacgtagcgagaggaacatcggctgatacaattgttgcaagaatcgaaatgattgtaaagaaaataaaggcagaatctccgaaaactgaattatatttgcaaagtgtattgcctgtcaatgattgttacggtatgtttggcggacatacttctcgttggcaagttgtgaagcagataaacgatttgctgaaacctttggcagagaaggagagggttacatatatcgatttatatagccactttgtggatggagctaccggaaagatgaatcctcaatataccaatgacggtctgcatttattgggaaaaggttacctgttatggcgtgatattgtgaaaccttatgttaacaagaaatgaaaaagatactgatactttttgtaagtctctgtttctgtgttactctttttgcacagaaaaaaatcaaagttgcttgtgtgggtaatagtattacttatggttatacattgcccgaccgtgaaaccaatgcttatccggcgaagttacagaaaatgctgggggatgattatgtggttggtaactttggaaagtccggtgctactttgttgaacaaaggtcatcgcccttatatgcagcaggaggaatatcataaagctattgattttgccggtgatatcgttgttatccatttgggtattaacgatacagatccgcgggattggcctaattatcgtgatttctttattcaagattatagggcgttgatagattcttttcgtgtggctaattccagatgccgtatcttgattgcgcgtcttaccccgattgccgatcgccatccccgttttgagtctggtacacgtgattggcatgatgaaatacaattggctatcgagaatattgctaaatatgccggtgttcagttgattgatttccatgcaccgttgtacccttatccgtttatgttgccggatgctgttcatcccaatgtagaaggagctgaaatactggctaagaccgtatatgaaggtattaccggcgatttcggcggattgaggatgagtccgttgtatacagacaatatggtgttgcaacacggaaaaccgttgactattcaggggactgccaatgccggtgatagaataactgtatccattgcgcatcagaaacaaaaagttgtaacgggtatggatggtaaatggtcggtcactctttcgcctttaaaagcgggaggcccttatacattggttgtttcttcgggtaaacaaaaactgacttacggtaatgtattggccggggaagtctggctttgttccgggcagtccaacatggaattctatttaaactggagtgcaacagccaagcgtgatgtcgctaaggctgccaatgataatatccgtctttttgatatgaaagcgcgttggcgcacggatgccgtcgaatggaatgcttccgttcttgattcattgaatcatttgcaatattataaggatacggagtggacggtttgctctccgcaaacagccggtaatttttctgctgtggcttattatttcggtaagatgttgcaggacagtttgcaagtgcctgtcggattgatttgtaatgccatcggtggctcacccactgaagcatggatagaccgcagttcgttggaatatcatttcccggctattttgcgtaattggactaaaaatgattttatccaagactgggtgcgtggacgtgctgctctcaatgttaaaaagtcaaccgataagttgcagcgtcatccctatgaaccttgttatctgtatgaatcgggtattcttcctttgcaacaattccccattaaaggcattatttggtatcagggagaatcgaatgcgcataatcgtgaggcgcacgaaaagctgtttaaattattagtggacagttggcgcaagaattgggaagataatgagttacctttttattatgtacagttatcaagtattgaccgtccgtcatggccttggtttcgtgacagccaacgtcgtttcctgacacaaataccccatacgggaatggcagtgacttcagataaaggtgactctttgaacgtacatcctacgcataagcaggaagtaggggaacgtttggctgtttgggctttaaacaagacttataattataaaaatatagtgccttcgggaccgcttttcaagtctgtttcctttaaaaatggggcagcttatatttcttttgattattctgagggtcttcatgcatcagataacaatgaaattcgtacctttgagctgtccggagacgatcaaatattttatccggcaaaagcagccgttgtgaacggtgagttaaaagtatggagtgataaagtaaaagagccgacaatagtgcgttatggttggcaaccgtttactcgtgccaatttggtgaatggtgcagggttgccggcttcaacgttccgttcggatgtgaaataacgataggggaagctttgtgcttccccattggaacgataaaaagatgtaagatatgagaaaattgcgaatgttaatgatgatgggatgcatcccgatgatattaggtgccgaggaatataaggagcctgagaagataaacctgaataaaggatgggaattctctcaggtcggaaaaggcgagtggcttcctgcaaaagttcccggaacagtacatcaggatttaataaatcatggcatgattcccaatcctttttatggaaagaatgaagagaaagtgcagtgggtggaaaatgaagactggacttataggactacttttaatgtgacggacgagcaactggcacgtgaagcagccgtccttgaatttgaaggactggatacttatgctgatatttatctgaacggttctttattggaacgtacagacaatatgtttgtcggttatacgcttcctgtgaaagaggtactgcgaaagggggaaaaccgtctgcaggtttatttccattcacccatcaaacaggcattaccgcaatgggaaacaaacggattcgactatccggcagacaatgaccatagtgataagcgtgtcagcatctatacccgtaaagcaccttacagttatggatgggattggggcattcgattgactaccagtggtatatggcgtcccgtacatttggtttattatgatgtggcagctattgaggattattatgtgcgtcaagcatcggtaactgaggaattggcgaaggttgagaatcagttggcaataaataatatcacttctactcctcaaaaggcggaagtgaccgtgagttattcctataaagacggtgaaaagacaacgaagcagaaagaagtgactctgcaaccgggtgcgaatgaaatcaatatacctatggaaatcggcaatcctcatctttggatgccgaatggttggggcgaacctgctttatatgattttgaagttcaggtaaaggtggatggcaaagtgattgcttccaagcaggaacgtatcggactacgcaatatccgtgtagtgaaggagaaagatgcccaaggtgaatctttctattttgaggtaaacggtaaaccgatgtttgctaagggagcgaactttattcccgatgacgctttgttgcccaatgtcacgcctgaacgctatcaccgattattcaaggatgtgaaagaggccaatatgaacatgcttcgtgtatgggggggcggtgtgtatgaggatgatgctttttataaggaagccgatgaacacggtatcctgatttggcaagacttcatttttgcttgtaccacttatccgtcggatcctgctttcttgaagcgtgtggaggcggaagccgactacaatatcaagcgtttgcgcaatcatgcaagtttggccatgtggtgtggaaataatgaaatctatgaaggaatgcgctattggggatgggacaagaaatataccgaccctgccatcatggaaggtatgaagcgaggatacgacaaactgttccgtgaattgctgcctcgcaaggtacaggaacttgacccggatcgtttttatatgcatggctctccttacgaagccaactgggggcgtccggaaagttggaagatagccgacagccataattggggcacttggtatggacagaaaccttttgagagtttcgataccgagattccacgctttatgagcgagtatggttttcaggcattcccggaaatgaagaccattgccactttcgctgcacccgaagattatgcattggaatcggaagtgatgaatgctcatcagaaggcgtctatcggtaacttcttgataaaaaagaccatgggactgtattataaagttcccgaagactttgaacaactggtgtatttgggcttggtattacaaggacaaggaatgcgtcatggaatggaggcccattgccgcaaccgtccttattgtatgggtacgctttattggcagttgaatgacagttggccggttgtttcttggtcgagcatcgattattatggaaactggaaagccatgcactatcaggcaaagagggctttcgctccggtattggtagatgcaataaaagaaggggatgatttgaatatctatgtaatgtccgacaagctggaagccgataaagatgtcacccttcagttgcgtctgatggattttgacggaaaagtattaaagaaaaaagagata

SEQ ID NO: 6737 - DNA, 19355 bp, Unknown
  gut microbiota DNA sequence
tatctactgagccattattaacagttgcgtaagtaagataaaatcggatagttaaaagcggcttgattgacattctgttgacacaaataaaaaagactcctaacaaactgctgaataacaatctattaggaatctttattgtggaccagcctgggcttgaaccagggacctccagattatgagtctgttgctctaaccaactgagctacaagtccgagctatgagaatttcttcttagcaggtgcaaaagtagaacatttctttgagatttgcaaagaatcacacccaaaatttgataaaaagatttaattcacttattcgtaaggatttaaattgtatttttgtacttcactaattaattgataatagccgtatggcacatacaaaacaggaaaccgcctttacagggctgacaaataaagaagttcttgaaagcagggagaaattcgggatgaatctcctgacaccccctaaacgtccttctatgtggaaactttatctcgaaaagttccgcgacccggtgatacgcatccttctcgttgcagcattcttttcactggtcatagccatcattgaagatgaatatgccgaaactatcggaatattcttcgctatatttctggctaccggcatcgggttctattttgaatatgatgcaaacaagaaatttgatttgttgaacgccgtaggtgaagaaacgcccgtcacggtcatgcgtaacggcaaaatacaagagattccgcgcaaagacatcgttgtgggagacatcgtcatattaaataccggcgaagaggtgccggcagacggcatcttgttggaagctatttccatgcagattaatgaatccaacctgaccggagaattaatggtgaacaaaacggtcaacgaagaattatttgatgatgaggccacatatcccagcaacaccgtcatgcgtggaacaacagtagtggacggtcacggcatgatgcgcgtagagcacgtaggcgatgcgacagaaatcggcaaagtggctcgccaggcaacagagcagagccaagaacagactccattgaatatccaattaacaaagctggccgatttcatcggtaaaatcggctttaccattgccacactgacctttattatcttcacggccaaagacctttatggatatttgagcatgaacgagataaccggctggcagcaatgggtgcatatcgcccgtattgttttaaaatatttcatgatggccgttaccctgatagtggtcgccgttcccgaaggtttaccgatgagtgttactctcagccttgcactgaatatgcgccgtatgctgaaaacgaacaaccttgtccgaaaaatgcatgcttgcgaaacaatgggagccatcaccgtcatctgtacagacaagaccggcacactgacacagaatctgatgcaagtgcatgaagcaaagctcgacacctccaaagcagacttgatagctgaaggcatcagtgccaattccacggctttcttggaagaagcagaggccggaaagaaaccttccggtgtaggaaacccgaccgaaatcgctttattgttgtggcttaacgagcagggaaagaattacatggagctgcgtgaaagagcgactgttgtcaaccagctcacattctccaccgaacgtaaatatatggctacgttggtcgactctcccatccagcaaaaaagagtgctatatataaaaggtgcgcccgaaattataatgggtaaatgcaatctgagccctgatgccattgcacaatataatgccgacctgcttgcctatcaaaacaaggccatgcgtactttgggactggcttataaatatatccccgaaggcgtcggagaggattgttctgaattagtgaatgaaggcggaatgactttcctcggtatttttgccatcagtgaccccattcgtcccgatgtacccgaagctgtcggcaaatgtcagtcagccggtatcggtgtgaagattgtaaccggtgatactccgggaactgctaccgaaattgcccgccaaatcggattatggaaacccgaagactcggaacgcaaccgaatcacaggggtggaatttgctgctttaagcgacgaagaagcactcgaccgtgtgctcgacctgaaagtaatgagccgtgcgcgcccgatggacaaacaacgcctggtgcagctgctccagcaaaaaggtgcggtagttgctgttaccggtgacggaaccaacgatgcccccgctctcaaccacgcacaagtgggactttcgatgggaacaggaacttctgtcgcaaaagaagccagcgatattacactgctggatgactctttccacagtatcgccactgccgtcatgtggggacgttcgctctacaaaaacattcaacgcttcattgtcttccaactgacaatcaatgtagtggcattggcaagtgtattgctcggtgcctttctgggaacggaacttccgctgactgtcactcaaatgttatgggtaaacctcattatggacacttttgctgccatggcactggcttccataccgcctagtcccgatgttatgaacgaaaagccgcgcaagaccaatgactttatcatcaccaaggctatgcgcaataatatattaggtgtaggacttgcatttttggttatactgatgtcactcatcgtaggtatcagacaacttcccgcctcacaaacagagtgggctcttacctgcttcttcactatctttgtaatgcttcagttctggaatctgttcaacgccagtgttttcggaaccaaccattctgtatttaaagattcacgccatgcactgggtatgctcagtgtagcggttatcatactgataggtcagatattcattgtcgaattcggaggaaaagtattccgcaccgtaccgctaaacctgaccgaatggattataatcatcaccgctacctctttagtgctggtagcaggtgaaatctaccgactgataaaacggttgcaaacaaaaaagtcaattaggtaaaagagcataaagagttatggacagtaagattaaaaatgttattttcgatttaggtggagtattaataaatctggattttgacagttgtctgaatgcattccgcacagcaggattcaccaacatagaagagcaaattcgtcaaatgcaaggtaatggagtattttcccgattcgagttgggagaaatctcacccgaagagttcagggatgccatccgcaaagaagccgacgaatcgttgaccgaccgcaagatagatgatatgtggaacctgatgctactgaatattcctcgcgaaaagttggatttactgttagagctgcgcgaacgctacatggtttacctgcttagcaacaccaaccaaatccattgggattatgccggtgaagaaatgtttaactaccgaggttttcgagctgacgatttctttgaagacacctttctttctttcaaaatgcatttggctaagcccgataaggctatctatgagaaagtaatgaaagaggcaaatattcttcctgaggaaacgttctttatagatgattcggaaactaactgccgggcagcagcggcacttggcattcaaacccaccactaccatatcggtgaagatttaagtttattattcgactaatggaaattatatcagacataaaccatccggcacttcccccatcggttgccaccatcggcttttttgacggggtgcatcgcggtcaccatttcctcatcgaccaagtaaaggaagtggctgtaaaagaaggattatgttctgcgttagtcacctttccggtacatcccagacaggtgatacaaacctcttattgcccccaactcctctcctctcctcaagagaaattaaacttattgaaaacaacaggtactgattattgcatcctgcttccgtttacacatgaattgtcattgctttctgcacgcaaattcatgcaattgctacgcgacaaattcaatatccgcatactggtaataggctacgaccaccgcttcggtcacaaccgaagtgagagttttgaagattattaccgttatggagaagaactcggtatatatatagtacgcgcgcgcgaatataccgacggtgaaaataaaatcagttcttccgtcatccgacggttgctaaaagaaggagacgtaacccatgcctctcagttcttgggatacaattattatttagacggaaccgttgtcgacggttataaagtcggccgtaagataggctttcctaccgcaaacctaaaagtagattatcccgaaaaactcattccttcggaaggagtatacgccgtatatgtacatatagaagggaaaagatgggcagggatgttgaacatagggcatcgtcctaccatgaataatggaaaagacctcagcatcgaagtgaacatccttcatttttcggataatatctatcacaaaaaaatgtgcattgagttcgtccaatatctgcgtcccgaagaaaagttcgataacattgaaagccttatctgccaaatgcacaaggacagagaagaagccgcaaagattctattatagaactattcccgcctcacaacaaagtgtcttttttaccggcatttcctaccccaaacacataaaaacaacatcctcatcctctttcatccccacaaacaacgagaaaggatatatttttatcgaatttcgataatttttcctcgtttttctttggtgatataaaaataagatgtacatttgcatatcgataaacgataaatgaatatcgaataacaaacacaagtagaacattaaaacacaaagtaaaatgaaaaggtcagtattgaaatcaggtttagcagcagcaattgcaacagtaatgatgagttgtacaacagcagcacacgcacaaacaacaggaaacacgaagtacatttattgtcaagacgacacaaacacaacagtgtacacactgaatgaagacggcaaaacattaacacgcaaagtgaaatatgagtacaaacgcaatgaaacaggacaagtaattgaaaagaaagcgtatcgctgggatgcctgtcgcgaaatctggaagccggcttacttgcttacagtaactcccggaatatctgaaacgaaactgagctacactgaatggaacgccaagaaaagcgcctttaatgacaacaaacaagaaacaatttaccgtgaagactgcaacacaaacttgctggccgacacacaaaacaaaaagtaacaagaacttaaaaatccattaagatgaaagcattcaaacgtattttcgccgcagctaccctattggtaaccaccggcctcgcttccgaagtcaatgcacaagtgcctttggaagacttctttaagaaccccgagaaagtgggttatcaaatctctccggacggcaaatacttctcgtatatggcaccgtatgaaaaccgcctcaacctgttcgtacaggaaatcggttcggacaagacaacccgaattacttcggaaacagcacgtaacctagcaggaagtatgtgggcaaatggtcatcggattctttacataaaagatactgccggagacgagaattatcaactttacggagtcaatgtagacggaacagaacctaaagcatacactgcttttcccaacgtaagaacacaaatcattgacccgctggagaatatcgactcactggtcattatcggtctgaacaaacgtaatccacaggtcttcgacccctatcgactcaacctcaatacaggcgaactgacccaactggctgaaaaccccggaaacattcagggatggatgaccgaccacgacggtaagttgcgtgtagccctggctattgtagacggagtgaatacccaaattttataccgtgaaacagaagaacaaccattccgcccggtattgactacaaacttcaaagaaacagtcaacttcgctactttcactcccgacaataagatggtatatgccttgactaacatcggtcgcgacaaaaccgcccttgtcctgatggatcctgccacctgcgaagaaaaggaagtgctttacaccaatgacaaatatgatatttccggattgggctattccgaactgaagaaaaaactgacttccgtatcctgtaccggacacaaaggaataatccgtcactatttcgacaaagacgaagaggctatccgcaccaaactggaacaaaaactaaaaggttatgatataggcactaccagccaagacaaaagtgaaaacatccgcatgatttatgccggcagtgaccgcacgtatggcacttactatacctataatgtaaaagaagacaaactgacaaaggtggccgatgccgctccctggattaaagaagaggagatggttgccatgactcccatcacttataccagccgtgacggactgaccatcgaaggatatctcactctgccgaaaggctatacaatggaaactgcaaaaaaactgccggtagtggtgaatcctcacgggggtccatgggcacgcgacacttggggatataaccctgaagtacagttccttgccgcacgcggttatgccgtattgcaaatgaacttccgcggttccaccggttacggacgcaaattcaccgaattgggttacaaacaatggggacagaccatgcagaatgacattaccgacggtgtgaaatggttaatcaagcaaggaatagccgacccgaaacgggttgccatctacggagcaagttacggcggttatgcaacactggcaggtgtcactttcacccccgacctttatgcttgtgccatcgactatgtgggagttgcaaatctgtttactttcatgcagaccattcctccatattggaaaccattgctggacatgatgtacgaaatggtgggcgacccggtgaaagataaggaaatgatggaaaaatattctccggtgttccacgtagatcagattaaagccccgctcttcgtggcacaaggagccaatgacccacgcgtgaacaaagccgagtccgaccagatggtggaagcgctgaagaaacgtggcatcgaagttgaatatatggtaaaagacaacgaaggacatggcttccacaacgaagagaataaatttgatttctatcgcgccatggataaatttctgagtattcatttaaagaaataataatcataaaaacaaattaagatgggacgcacgattaaattaatactttactattttgcttatcagtttgctgtagccattccgggaatgttcggatacacaatatggaaatgctttgaaacgcaaagtttcgacctgcataatgcccctacttctttggccattatcctttcactgttgggaaccctgctcatggcatggcatctgatacattataaatatgtaaaactggacaaacagactcttgcgtccctgcctcttaaacctacctgtctctacatccttatgggagcagccgccattatatggatgaactggctgagcgagatggtccatctccccaatatagccgaaaacgtctttgcacaaatgaaaaacaatgtattcggtattttgagcgtatgtatcatcgctcctatatttgaagaaatctttttccgtggtgccatcgaaggatacttgctgcgcaaatgggagaatccccgttgggccatccttgtgtcagcccttatcttcggattgatacacatgaatccggcacagatacttttcgcctttctgttcggtattatcttaggagaactttattaccgtaccggcagcctgcttccaagcatcattcttcactttatcaataatactctgtcattgatactgatgaatgtttttgaagagaaagataccctgaccgatattttaggaaacaccactgccgttcatgtatggggaatgacaggaatcgccatcttctgcctcacattcctgttattcaaaaaagaggtgaaacccgtgcagtgggcggtagaagcgaccgaacctgttcctgcggaagaaaccaacccacaaaattgattaatccaataataaaatataacgatgaaaaagaaactgaatctgctttgtgctatgatatttgccgtcttattactctccttgtccgagaatatctattccatggtatggggagccatcgaaggtgggaaagccggtatggaaaataaggcaggagaaataaataacctccatccgctgatgttgctcccggacaatctgagtagcacttctgactctatatacaatgagatgaccggaaagaatgtaccgatatggcagatacaatccatggtgactgtcgacaccgatgcacccggctggttggcccttatcaacacccttcttagtttcatcctcatcattttcggcatcaaagctgtcctgcaattcatcaagttcattcgcaatatcaaccgctcggacatcttctgctgggcaaatgtaaaactgttgcgcaagttaggcacctctttgctgattactttcgccaccactttgaccagcacttatatgcacacttggcaactttcgcaagtattgaagatacccggttattcttataactggctcaaccccttttcacactccagtcttttgcttggcgtactggcattcgtcattgccgaagtatttgccatcggactgaaaatgaaagaagaacaagacctcaccatttaaatatagaacaactatgaaagagaagagcaaagagcattctttaaaagaaatgaaactgattatgacttgcctcaccatcatctgtttctgttgcacattcatcactatctttcaaaacgcaatattgtgtttcgaattgggaaccaatcgggctgccatagatgccggaaaagcagcggcatccgaacaatttatctggcaagcatttccacaaggtatcactttattatccatggctgtatgcagtgtttttatctatctgatgctccgcaatgtaaagcgcaatctgatatttgtaagagccaacgccaatctgatatattatatcggtcttattatcgagtttaacggaattctgcaagctatcctgaatgagttcgctcctgtaacaaacccaagacaaacctatatgatatatatccttattggagtattcatcatctttatcggatatctgttccagataggcatccgcatgaaagaggaacaagaattaaccatttaaggaacaaccgccatgaaagaaaaagataaaaaaactatttcgatagtttgcctgatagccggtttcataataacactgtttgttgtccaactcatctatacacttacgttacgccaatggctggatcacaaaacagcaaaagcctttcttaatatcggatggatatacttctgtatgtatgtctattacagactgagcaaacgctatacttcgtggtggaactcgctaaaaagaaaaaacaacgaataattaaaacctgaactatgccgataatagtaaacttagacgtaatgatggcgaaacgaaagatttcgctgggagaactggccgagaagattgatctcaccccggccaatctctctatcctgaaaaccggaaaagcaaaagctatccgcttctccacactggaagctatctgcaaagaattagactgccagcccggagacattctggagtatcgtgaagagaatgaataacctgacaggcaacacagacactctaacataaattctctcatacctgcccccctcataactcttacagtgggaaggaataaaggattgctcaatgcaatcctttattattctctccggcaccttttagtcaattttctataaattgtactgtccgatcaaacaaatatttcatatatgccatataatcccatgattatccgtatctttgtaacgaattagatatttgaaataaatgaagacatttgaagagttaggcgtttcccccgaaatcaggaaagcaatagaagaaatgggttatgaaaacccgatgcctgtacaagaagaagttataccgtatttactcggtgaaggaaacgatgtagtggccctggcacaaacagggactggaaaaacagccgcatttggtctgccgctaatccagaaaattaatgtaaaaaaccgcgtaccgcaagcgttaattctttgccccacacgcgaactgtgcttgcaaatcgcaggtgatctgaatgattactccaagtatattgacggactgaaagtccttcccgtatacggcggttcatccatcgaaagccaaatacgcatgctcaaaagcggagtgcacattattgtcgcaactcccggacgacttattgacctgatggaacgaaaagtagccaaactagataccatcggtaatgtagtaatggacgaagcagacgaaatgctgaacatgggatttaccgacagcatcaactctattcttgaaaaagtacccgaagaccgaaatacactgatgttctcggctaccatgagtcccgaaatctcacgcatctccaaacaatacttacgtaatgcaaaagagattaccatcggaaccaaaaatgaaggaagcaaaaacgtaaaccacattgcatacgtggtacacgcgaaagataaatatgcagcgctgaaacgcattgccgattattatccgcaaatttacggtattatattctgccgtacccgcaaggagacacaggaaattgccgacaaattgatacaggacggttataatgccgactcgttacacggcgagctgagccaggcacagcgcgacctggtgatgcagaaattccgtcaacgtcacctgcaactgctggttgccaccgatgtggctgcccgcggactggacgtaaatgacctgacacacgtcatcaactacggtctgcccgatgataccgaaagctatacccaccgaagcggacgtaccggacgcgccggaaagacaggtatctctatcgctatcatcaacttacgcgaaaggggaaagatgcgcgaaatagaacgtatcatcaacaaaaagttcattgtgggcgaaatgccaaccggcaagcaaatctgtgaacagcagctcatcaagctgattgatgacatagaaaaggtaaaagtaaacgaggaagaaatcgaatctttcctaccgggtatttaccgcaaactggaatggctctcgaaagaagatttgataaagcgcgtagtgtctatggaattcaaccgctttttagagtattacagtaatgcacccgaaattgaaacgccgaccgtaaccgaccgccgcggtgaacgcgaacccagagaacgcaaggagcacggcagcagtcgcgaaaagacagaacgcaaagcagaaaagggatatacacgccttttcctgaatttaggcaagacagacggcttctatgccaaccaaattattgagctgattaaccgcaacatgaagaagcagcgcaccactatcggaagaatagacctgatgcaaaacttctctttctttgaagtggcggagaagcaggcaaatgatgttatcagcgcccttaataaagtcaacctgaacggacgcaaagtagtagtggaagtagcaggtgaaaacagtggaaaaagcgataacggaggacgcaaaaacagcagttctcgaaaatcggcttctactaaggagaaaaccgccaagtccgcttctcccaaggcagcaaaggaaagaaagcttagccgtgccgaacgcggatataccgaagagcgcggtccgaagaagcaagatgactggaaacagtttttcaacagcgacaacagcaagaaaaaaagcagcaaactgaaaggggaagaacccgactttaacgaagaaggctgggcacgcagaaaaaaacaaaaataaaaccgtttataagagaaaaaagggagtatcaaaaactgatggtactcccttttttatcaccaaaacatgcgggaaaaacaataagcattcctcaccccaaaatgcttactccactaatttcaattcattaatcaaacgcgtagactttccatatttctcaatcatataaagtacatagcgaatatccaccccaatacaacgctgtaaattgggttcataaataatatcactgctcatcgcttcccaattcccatcaaaagctagtcctatcagctctccatttccattaaacataccgctgccggaatttcctcctgtaatatcattatcggaaataaaacaaacattcatatttccatcttctgccgcataacgaccgaaatctctgttctccagcaaatcaatgacggagggaatgacttcgaaatcgctatcgcctttgtattcacgtatcttatcgaagatacccttggtcgttgtataataagtatattctaatgcatcttttggcgagtatccgccaatcattccgaagctgaaacgcatggtagagttagcatccgggtaaaaatccttatctgattccatctcacgcacagcctcattaagtaaacgctcattcttttctattttcatattatcatcatctgcagccgcactgagttcgtaagatttcaccaacatatcaatgacaaacgaaatagccgggtcttcaaaaagaatataagtactgtcctttttcactacacgttcaaatcctcggggagtatccaattctgtgtggctgtataaatcgtccacatacgcctgataatcacctttgaacttcttttctatagtagcataagtttccgaaaggctctccggctctactactgccgcatattctttaagcatagccacaaaaactttcttatcaatgtccaaatcaatattggcataaagttccaacaattgacgaaccctctcttccaaaaccgatttttccgcttcaaaatcaaagttcaggacagaccatgcagcagtaaccaactcgggaccattggcaaaacattcaccaaaataagccattgcacgggcattcttataacgattgcgataactgtcttccaactccgtcaatatcccggcatacttgtttcgttcttccggcttccgatgaatccattccgtcagttgatgttccaaccgacgttttttcccgataatattcagctttttaatagactgattcataccaatgctattcttccaatagttggcactttgagcatacttcgaagcatattttatacgaacagcatcacttttctccattgcatctttccaaatagcctgtttgatagcacgaacatctattcttgccatattatcggcattcatacgttcttccacaccataagaagacaaataacggctggtagtcccgggataacccatcgtcatacaaaaagaaccttccttataacctgccaaggaaataggagcataataatcaggatgataaggaacattatctttagaataagctgccggttcgttatgagtatccgcatagatacgaaaaacggaaaaatctccggtatgcctcggccaaacccagttatcggtatctcccccaaacttgccaaccgaagagggaggagcatagactaagcgaacatcataataatccttatacacagacagataatattcattgccggcatagaaagacgaaacaactgcccgcagtaaagtgtcattcttcactgcttcgtcagcaatcagtgtagaaagagagtctacaatcaaagaacgattatcttcagtcacatcttgcggtaaggcctgtaaaatgcgctctgtcacatcttcggtacgaacaagaaaactgacaaataaatcgggattgggaagttcgtccgataacgaatcggccacaaaaccattacgcaggtagtcatgcttcaccgtgctatgctgccggatagcatcgaaaccacaatgatgattggtgaacaccaaaccatccggagagacaaccactccggaacagaaacctccaaaactgaccacagcattggaaagtgcagcaccgccgggattatataattgcctgggagtaagattcaaccccatatctttcatcacttgttgagtctgcttgctcaggcagcaaggcaaccacataccttcatcagcccatatatatataggtaagaagacgagcaacatcaatatttttttcatggcacgagtgttttgcttggtgtcctgtctttattccaccactaatttcagtttctttgctccgacacgggctttcagccattcggttatcttttcctgttccttctcgctggggtgcttcgcaaatttcatcaaaaccagagttaatgtatccatgcgtgtcgaatcaacggaaagttctactgtttttgccattgcaatggtttcggccgacggataaagcaccttcagttcgggaatgattttcttgtctaccgcattataagcggcataaactttcaattcttcttccagctcatgtatcttgttctgttgctccaacaaacgcttttcactattcttatagaaatcttccatgacctgggccttcaagcttcctatgtccatagcctcattattcatcccctgcatgacaatcaatttcgtaccggccaaattataatgtttcaaattatctttagcagcagcaatctctgttgcaggaacttcattaccaatcagcacaacacgaatttccttattctcatacgaaatcttacggtcaataacctgtgtatcgggaaaattcagttcttcgctgatgaaattattggcagatgccgtatagatggtattcttcacaataccatatgtcagatatattgccggacacatggtagccaaagtaatgataacaatgtacttcttaaccaatttctcacgctctttgtccacaaactctttccgctggaagtgcatcacgcgcactccaatgaaagttgccaaactaataaataccgaattaatgaaatataaatagaaagcgcccaagaaataaagcaggtttcccgttgccaacccgaagccggcggtacacaaggggggcatcaatgcagtggcaatggctacccccggaatcacattgcccttttccttggtggaaagcgcaataatacctgccaaaccgccacataaagctatcaaaacatcataaatagtaggcgaagttcgtgccagcaattccgattgcacttcatccaatggagtcagtgagaaatataaagtggcagtaataacactgaaaacagtcgctatcagataactcttcaacgaccgtttcagcagttcaaagtcattctgcccgatagccaatcccactcccatgataggacccatcaaaggagatatcaacatggcgccgatgattaccgccgtagaattgacattcagccccaaagaagcaatgaaaatggcaaatatcagaatccaaaggttagtacctttaaactccactccattacggatagactcgacagtcacagcttcattatccttatctttgcccaaatcaaaatattcatgaaggaactgcctgatataaggcatattcttcaaatcgttttttaacttacctttaatgtcagccataattatttctttataaaccgattaataacaggaatctgatgcaatggaaaatctacctttatgatgtatgccacaaagagcatcagcaacaccgtacgaacagacagtaacaaaaaaatgttctgaaaaggaaggtattccgatataccaaacaatacaagtgccaatgcaacatatttacctattgctttcaaatcataatgaatggggtacttcttctgccccacaaagtaagagagcagcatagctaccgcatatccggcaaatcccgcccaggcacatgccatataactgtacaagggaacaaaaatcacattaatcaagattaaaacgatgcaaccggcaaatgaaaaataggccccccacttggtctcgtcaatcagtttgtaccaaaatgaaagattaaagaaaatacccataaaaatttcagccgccatcacaataggtaccacccgcaatcctatccaatagtcgggagcaagaatgtatttcaatatatccaaataaaacataacagccaaaaaagccaataatgtgaaaataatgaagtacttcatcgcctgtgcataaataatcttgctatccttgtcccggctctttccaaacacaaaaggttcataagcataacggaatgcctgagtgagcattgccataatcatggcaatcttgctgcaagcgccatagatggcaagttgcgtcttggcctccaccttatcgggatatatatgacgaaaaataatcttatctgccacttggttcaaaatacctgccactcccaatatcagaataggataggaatatatcagcattcgcttcgccaatggcttgtcaaaacctccgttaaatttgagataaggaaccatcagtaccatgatgaccgaggtgcaaatcaaattaaagaaaaaggcataaaaaacatcactacccttcatcactacgtaataaactaaattcagagtgatattgagcagaatgaaaagaagtttcagagcggcaaaacgtatcggacgtttcttataacgcagataagcaaacggaatgcactgaaacgcatccatcgcaattaccagtgccatcatgccgatataccaaggatggtcgtcatagcccatcatgccggcaaccggatgaagaaacagcatacacaaagcggcaaaaatcaaagaagtacttcccaccataaacagaacagtggaatacacacgctcagagttttccgtctccttattgacaaaacggaaaaaagtagtttccatgccataggtcagaatgaccatcagcagcgcagtccaagcataaacttcggtcaccaccccataacctcccgaagccgcagacatagctgctgcataaatgggcaccagcaaataattcaggaaacgccccacaatgctgcttagtccatatattgcagtgtctttggctaatgattttaatccggccatatttaatcatcaaataatgtcttctgactattatagatactccgtcccagatggatgtaagcgagttctgtcacttctcgtccgcgaggagtacgtttcaagaaaccttcctttatcaggaaaggttcataaacttcctcaatggtaccgggatcttctcccaaagcagtagcaatggtggtcaaacccaccggtcctcctttgaatttatcgataatagtacacaaaatcttgttatctatctcatcaagaccatagcggtctatgttcaaggcctccaatgcaaaccgagctatctccacatcaatcctgccggaacctttgacttgcgcaaaatccctcacacgccgaagaagtgcgttggcaatacgtggagttccacgactgcgcgaagcaatctcacccgccgcctgtacatcgcaaggcacattcaatatctttgccgaacggcggataatagcagtcaacacatcatcatcgtaatattccaaatgcaggttaatgccgaaacgtgcacgaagaggcgccgtaagcaatccgctacgagtagtcgcccccaccaaagtaaaaggattcaagtctaactgaatgcttcgagcagacggtcccttgtctatcattatgtcaatccgataatcctccatggccgaataaagatattcttccaccaccggactgagccgatgaatctcatcaataaacaggacatcgtttggttccaaactggtcaggactcccgccaagtcaccgggtttatcgagtaccggcccggaagtaaccttaaaaccgactcccagttcattggcaatgatgttgcttaatgttgtctttcctaaccccggaggcccatgcaataaaacatggtcgagcgcctcggcccgcaagcgagcagctttgacaaatatacgtaaattatccactaccttatcttgcccactaaagtcagaaaaatttaatgggcgtaaggcattctcaaagtcacgttctctgcttgtgagctgatgctcacgtatatcaaaattctcttccatctttttgtttctcgcacaaaggtacaaaagatattattataatagaaagaaagatcgaggaattcattttcagtccctcatccgtcctttatataaattcattattgtataaataattaattattatgggagttacactaggtaagaaacaattaaacaaaggaagaatttctctttatttaaattacagtcacaacggcaagcgccgtaaagagtatttaggcattattctagaaccgcctgtcacaccggaagccagagcggagaacaagaataaaatattgattgctaaacagattcgagcaaaaaaagagcttgaattcttgtctgtcgaatatgccttaaataaaacggcagaaacatttgaagatatcctgcccgaagcaccaagtaacggaccggactttttccgcatcatgaatgaatacctaagcacttattataagaaagataagaaaatggtaaaatcaaccattctccacttacgcacatttaataaaaagaaaatcttaccaatcaacaaaattacaagagaattttgtgtagattttctcgactatttaagatctaaactccgtggcaatacccctattggctatttcaagaaattcagaatgtgcatcaataaatgtgttgaaaagaagttaatttctcataatccaacaaatgggatacggttatcgcaatttgacgaagtaacaaaggagatactgacattaaaagagatacaaaaattagctgttacttcctgcccaaataatgaggtaaaacgagcatttcttttttcatgttattgcggattacgttggtgcgacgtctatcaattacgatataaggatgttgactttccggcaagaagattaaccatcatacaacagaaagtacaaacacattccaaaagtgccattttgcatttaaacttaaaccacacagctctcaaacttttacagaaatgtaatggagacagagaagacttggttttctcacttccctcctactcatatacaatcagaattcttcgtaagtgggtaatagatgctaatatacgaaagcatattaccttccacatgagccgccactcttttatcacaaatatcatggcaaatggagccaacattaaaaccgccgcttcccttgccggccactcaacaaccagacacaccgaaaagtatgtacatataatagatgaactgaagcaaaaagctgtcgatagtttaccggatctaactatcaactataaataataaaagggtcctttacaggacctcaccatattaagccttccttctatacttctgatatactgaatattacaaagggtagatagtattcggcacgaatactacctacctgtcgaatgtcgtcaatcattactttaaatgcaactttaaacacttgctgaataaataccgcataagatatgctaa

SEQ ID NO: 6738 - DNA, 5719 bp, Unknown
  gut microbiota DNA sequence
gaatactatcggcactcagcatttcccctcggttatagcggtctatcaaatcttcattatatttttcaatactttcgtaaggcttctgaatacaacgccctgccggagtataataacgagccaccgtcaagcgaatcatagagccatcgggcaagtcgatgggacgctgcaccagccccttaccgaaagtgcggcgaccaaccactactcctctgtcccagtcctgaacagctccggtcacgatttcactggcagaagccgaaaactcatccaccagcacaatcagacgcccatcccggaaatctccggtacccttggcaaagaactcgctacgaggattccggcgtccttcggtataaacaatcaactcttgtttttccaaaaattcatttgccaaatcgatggcagcattcagataacctccaccgttaccctgcaaatcaagcaccaaatctttcatgcctagttttttcagttcagccaatgccttcttaaactcctcatgcgtggtagcaccaaaacgattgatgcggatatagccgattctatctttcaacagataagaagcatcgaggctgtaaaccggaattttatcccttttcaccgtaaaaggaagcagttcccccactccacggcgcacaattttcagattcacttccgaacccttcggccccttcaaacggcgcatgatatcttccgtgctcatcttcacaccggcaataatcgtatcatccaccattacaatgcggtcaccggccagaatgccaaccttctcagaaggacctcccgatacaggctgtataacgaaaagagtatcttccgccatattaaactgaataccgattccttcaaaattgccctgcaacggctcattcattttttttacctcttccgcatccgaataaacagaatgcgggtcaagctgttccagcatctttataatggcttcttccaccatcttgccttcatccaccttgtcgacatacagattggcaatggcaaactccgccaattgcagtttacgggccggggaatccactaaagactttctttcctgtgcccggacagcacagaaagaaaaaatgcaggcaatcaagcctgcaactaaatacttggtatatttcatcattaatctattttcattccttcaggcaaaaacggagtaacatctttaccgaattgcaataattccctcacaatagtagaactgatagaagtcagttcgggctcggtaaacagtaaaatagtctctattcctgccagcttccgattgatatcggcaatggtttcctcgtactcaaaatcatgcacggtacgaatgccgcgcacgataaacccggcattctgttctttggcaaaatccaccgtcagacagtcatacgcctccaccctgatacgaggttcatcggcaaacaatccgcgaatcatttccagacgtttatccatcgggaaccaagtctttttattatcattaataccaataccgataatcacctcatccataaaggtcaatgcccgttttacaaccgaataatgcccgatggtgaagggatcgaatgttcccggaaatattgctcttctcatctcacgctatatcttcttctataacaaggttttcaattataaagttttgtctttccatggtattcttacccatatagaattccaacagttctttcaccaaatcggtctttctaaggcttacctgttccaaacgcatatcttttccgataaaatgcttgaattcatcgggtgaaatctctccgagtcccttaaaccgagtaatttcaggattgggactcaaccgttcgatagcagcaatcctttcctcttccgaatagcaatagacagtttcgtacactcccttcttacggttacgcacgcggaacaaaggagtctgcaaaatatacacatgtcctttctttatcaaatcggggaagaattgcaggaaaaacgttatcaacaacagacgtatatgcatgccgtccacatcggcatcggttgccacaatcactttattataacgcagtccctctatgccttcttctatgttaagagccgcttgcagcaaattaaactcttcattctcatacaccaccttcttggtcagcccgtaagaattcaacggcttaccgcgaaggctgaacaccgcctgcgtgtttacatcacgacttttcgtgatagaaccgcttgccgaatcaccctcggtgataaaaatacagctttcctctttcttatctccctttgcatcattgaggtggaaacggcagtcgcgcaacttacggttatgaagattcgctttcttggcacgttcacgggccagtttagtcacaccggctatcgctttacgctctttctcggattcctgtatcttttgcaacatcacatccgccacgtccatatgcttgtgcagataattatccacttccgtcttcacaaaatcgcctacgaacttattcaccgtaggaccgccgggagccatattggtagatcccaacttaatctttgtctgactttcaaacatcggttcttccacattgacggcaatggctgccaccaatccgttacggatgtccgcataatccatattcttattgaaatactctttaatagtacgtgcaatatgctccttaaaagcactttgatgtgtacccccctgagtggtatgttgcccattgacaaacgaataatactcttcgccatactgtccggtgtgcgtaaaggcaatctctatatcctcatctttaagatggatgatgggatacagacccgtagccgtcatattatcattcaacaaatccaccagcccgttgcgcgacaatatacgctgtccgttataaatgatagccaatcccgtattgaggtaagtataattgcgcaacatcgtttccacaaattcagagcggaaactataattttcaaataaagtattatccggttcaaagaagatataagtaccgttctcttccgaagtatcttccgtccggtctgtcagcaaatctcctttggcaaaagtaacaatacgcaccttcccttcgcggtagcttcgcacttcaaagcgcgaactcaatgcattgaccgccttcacaccgacaccattcagcccgacactttttttaaaagccttgctgtcatatttgccacccgtgttcagcacgctcaccgcctcaatcagttttccctgaggaataccacggccaaagtcgcgcacactgacacgaagtttatcttctattgtaatttcaatcttcttgcccgcctgcattttaaactcatcgatactgttatcgagtacctccttcaaaagaacataaataccgtcttctgcatgcgctccgtcacccaactttccaatatacataccgggacgggtacgcacatgctccatatcgctgaggtggcggatgttatcgtcggtatattctacggcggaattgtttatcagttcgttgttttcttccatatcttagtaacggttacaaaatcagtttcttcacgagtacattgtcagacgatgcttttcttataagcacgacggcgcttatgctgttcagtctcgaaatactcccactgtgcctgcacctttccgttcagctccagttccggattactttcggcatacttgaaccccaattgctgatacacaggaatcaggtcggagaataacaaagcattcacccctttgttttggtactcaggcttcacagccaccaacagtaaatcgagcatgggaggatatttatgcataaacagcaccttcatcaagtgataccatcccataggcagcaaacgtccttttgccttttgcaatgcttcagacaaagaaggcattgaaatacccacagcaatgagtttatcgtcggcatccgtaatcagagtcaccatacgcaaatccacgataggcagatacatcttgatatactggtcaatctgtccttgtgacaatgccgaaaatccataaaggggcgcatatgcctcattcatcagctcaaaaatagcctgaccgtattcggcagcaatctttttacccgatgtatatttcttaatcttcagattaaacttacgctgaatcaaatcgctgatacgcttatgcttgtcgggaatagcatcaggcacatatatcttatactccacccagtcggcatctttctcaaatcccaacttttccatatgttgcgggtaataaggataattataaatagttgccatcgtgctcaactggtcaaagccttcaatcaacattccttccgcgtcaaaatcagtaaagcccaaaggtccttgaatagtatccatgcccttcgactttccccattcagacacagcatccagcagtgcacgtgatatttctatatcatccagaaaatcaatccatccaaaacgtacttcctttttctgccatgtttcattggcacgatgattgataattccagcaatacgtcccaccactttatcatctttataggccaaaaagtaaacagcctcgcaaaactcaaaagcagcattcttcttcgggctgaacgtattcagcatatcatcgtacaaatcgggtacggaatagggattatccttatataactcgtaattaaaacgtataaatgtttttagttccttttgggtactgactttcttaatggtaatagccatgttcgatttttataaaaattcaggcggtaaagatagctgtttttaatttaaaaagaggtgattttcacaccttttttcattgttgggcaataagataggccgtataagccacataacacaccatcatcaacaccccttcagggcgtgtaatggtacgttttttgaagaaccatcccaccagccacaacagcagtgcggaagcaatcatcaccgtcaagtcaagattattgatgccacccatcggcaaaggtgaaatagttgcgctacatcccaacacaaagaatatattaaacagattgctacctatcacatttccgatggcaatacccggattcttcttcaatgcagccgtaacagaagtggccagctcgggcaacgaagtacctcctgccaccaaagtcaatcctataacagattcgctgacacccagcgaccgggcaataccgcttgctccttcaacaaagagttgcccgccaaagatgagacctgccagtccgcccactataaaaagaacagatttccatacaggcatctctttaatcttctgttcttctcccacttcttcgcctccgtttcgtgcaatagcaaatgtatatcgcaagaaaataagaaagaaagcgagcagaataagtccgtcaatccgcccgattatattttcattgccttgatcgagcatcacatcattggcacaaaagaaaagtaccagcgaagaaagaatcaccagcggtatttctttgctcattgttccctcaccaactttgatgggtagtaccaccgccgtgcaaccgataatcatcaaagcattgaatgtattactacccaccacgttaccgatagccatctctgcacttccgtttaaagcagaaagtacactgattaccaactcgggtgcggaagtaccgaaagccacgatggtgagaccgattacgaggtcggaaatacgaaaacgcttggcaacagcagccgagccgtcagtcaggccgtttgctcccagcaatataagggctaaaccgccgattaaaagaagggtatctaacataatagaatgtataattacgattttacttgtgcaaaa

SEQ ID NO: 6739 - DNA, 11739 bp, Unknown
  gut microbiota DNA sequence
tttgcgtgatgcctgataagtgcaataaaactcataatcaggataatccatacaataggttctgaatactgctttcaggcaggcttcatcaaacgccttgttatgcgcaaccaacggaagtcctgtgattttgggttctacttgtttccatacttcggaaaaaacaggagcattggccgtatcttcccgagtcagcccgtgtacacgtgtgttccaatacaaataatagtccggttcgggatgaataagactataaaacttatctacaatctcaccatcctttactatcacaacacccacactgcacacactggtgcgctcattatttgccgtttcaaagtctattgccgcaaaattatccattgattctttctctgatttttccccatgcataggtatcgaacagacaactgttgcgcatggtgtggtacagcactttaaagcaggacatcgggacggcagaatgcgaaagttcagccttttcgccaaaagcctctctataaccaactataattttattaatattcatcgtattcttctgtttttatccgttatcacaaatgtatagaatataatcgaagtacacaattactaccctccttttattttagttctttaccgtccttctccatgcattaaggaataattgccaagtttttcggataaatcgccatttcttttttcttgcataaaacggacctttgtatatcgtaaaacaacaaaagaaggatatggaaaactctaaaatcataaataaaatagtagcgatgcaaccggaacttatgagcttcgcttttaaattgactgcaaatcaggattctgcaaacgacttggtacaagattctatcttaaaggctctggataatacacagaaatttatccggcaggaaaactttaaaggatggatgtataccatcatgcgtaatttattcatcaataattaccgccgttctgttcgtgagcttaatttcctggattccaacttcacggactatgcacagattcaggtagccaaagatgatgacaaatttgaagaaacttatgatttaaaactgctgtataggataatcaacaaattgcccgatgacacgaaacagccttttatgatgtttgtatcaggactgaaatataaagagatagcagaaaaaatggacttgcccatcggaacaatcaaaagccgtttgcactttgcccgaaagaaacttcaaaaggatttgagagatttctcgtaaggaacagtcggacaaaggatagccacttaatcataatagatttttaacatacaatttttctttcacaatttcgattcaaagaaagaggatgtgtcaaaactgtcgtttcgttcgtaggggcaaggttcgctcgcccgaaaacagttggctttatgtcttcgggcaggcaaaccctgcccctacagctgacgatgggataggccggtttagttttgacacccccctactagcaaaataatagcattatcaacgttttgcctccttttaattttatattattccactcctatctcatccacaaacaagaaagcgttctttccgggcatggaatgccaggcaggaagttttgaagttgtctctgcaattatccgtacatatctggttttgactttatcaaacgaaatctcttctttacgaatttgcatctttgttcctttttccaatacgggaatcttcttagaggctatctcacggaaaacttttccatcatcagagatttctattttcagaccggtcgctccgaatatggcatctcccggattcaataatgtattgataaaggccgatgagatttctttcggctcctgcatatcaatggtgatatccggattgttaccataaaaaccgacccaacgaccggaacggtagttcaagtctccataaagtccgtctgttaatgtacttcctccttgagaagtatatgatttgtgaggttctacattcagcgtcgcaggcttcatggtaacagcattgaaatgaatttcttccttactgatactgctattgccttgcggacgaacggctattgcctgaataactgcatccttgtccaggtgcaatgtatctgtgtaaagagaagattgggcattgggctcgctgccgtctaatgtatagtgcacttcggtgttatcgaaagtaagaaaaaagactttagcttttccttcttgttcttcgggaacaacctgaatggtaacatcataaatatcctgacggaaatcataaccacgatctttataaatagccaataaagccggaagacgattcaggaaaccgtcaaaatccttatgcgcaggttctgtccattgaatctcggaaagggctgccatacgaggaagaatctgccattccatcttaagactgtcacgagtccattcagtccagatacatccttgagcccctatgatatattgtttttcttcctctgtcaattcatccgataccggttcgaaagtataaacacgctcaaggctctttgttcccttgatgcgattgtaggtaggattactgaaatagaggtattgaatgggagtcattatagcgttatgatgcagacgcgctgtctctatgccgcctcggggacttgtccacgacataacggttgcccccggagccaagcccccttcaagcatttcatcccatcccaacatcttacgtcctctctcactgattacttttccgacttcagccataaaataggtctgcaaccggttttctttattgtgtttaggagtatccttcagtcccagttcgcgaatcttcgcctgacacttaggacattctttccagcgtaccttcggacattcgtctccaccgatatgaatgtaaggggaaggaaaaatatccattatttcatttaatacatctttggcaaactccaaagccttcgtatttccgccacacaacacatccgggaaaactccccattcgcacggtatttcatacggacctccggtacaacccaattcgggatatgaagccaatgcagccatcatgtgtcccggaaggtctacttcgggaataactgtaataaaacggtctgctgcatatttcacaatctcctttgcttcttcctgagtataaaatccgctgtgtggagtctcgtcgtattctcttgtgctccaatccatcaaggtacgtgggcgcgtcgaacctatttcggtcagcttagggtatttcttaatctcaattcgccacccttgatcttccgtaagatgccaatgaaaataattaatattatgtaacgccaacatatcgataatctgcttcagataagaaaccgggaaataatgacgacctacgtcgaccataaatccgcgataatcaaaacggggataatcattgacgataccggcaggaatggcagacgccgactctctatccttcgtcaccggcatggatttatgtaaagtctgaataccataaaacactcccgcttcacttccacctgccaaacggatattattggatgttacctccagccgatatccctctttttgttttatagcagtatcaacagacagaatgatggcatcaccttctttattctctgtcgtacattgaacggtaagtcccgtggcttcttttatataagaagccaaaaattccgctgtccgttccagcttttcattacctgccggataaacaatttttgtgcccgaatgaataacaaaaggattttcctgaaaattttgaacgacctcttgcggttgaggaataacattcagattacctacttctctttttgtaggggtacatgcagacagggtcagtgctacccacattccaagtcctgcccattgcataaattgctttttcattgtttaaaatataataatttgttgcaagggcaaagatacaacaatccgttttatctgctgtgttttactctaatctttcttttcttcagtaatgattttcctccaatgatcaaagttactgcggtaatcaccatcaagatacccaaaataatgcgtggagtcaactgttcaccgaataccagtaccccgaaaaataaagcggtaaccggctccaatgcacccaagatggcagttggagtagaacctatataatgaatagccttagtcattgtcaccagtgagatgacagtaggaaagactgccagcgaaacagcatttatccatagcatcggcgttggaatgacctgcaattctgtacagaactgcaaacgcactacatacaccgataatccgaacaacaaaacataaaaggtaagtttggcaatcggcatatctttgagcgatgagcgattgacccccactatataaatggcataagacaatgaagaaaggaagacaaatgtgattcctaccaagctgagtgtctgtccgcccggactcttgcacaacatggatatacctacaaaggcaagagcaatggaaaacatcgtaatgggggaaaccttctctttaaagaccaccgccataataatagccactaataccggataaacaaacagaatggtagaagcaatgcctgcatccatatagttgtagctcatgaaaaggaacaaagaagagaaagcaaacaataatcccattatgcagagtggcagcacatctaccctttttatggcaaaagattgcttttgaaatttcatcataatgccaagaacgataacagccagcgaataacggtaaaataatactgtatctacgctcattcctgcactgtaaaggggaagagtgaaaagggggttcatgccgtaactggctgctgcaatcgctccaaggataaatcctttagtcttgttgttagtcattatagtctatcttcttaaaatcgccgcgaaattagatatttgttcgcaataaacaaagggaaagaaatttattcttttgtcctaacaacaatttatctatattacacctatacaacaacaataataaatcatttccgaatatgaagagttggatttcttcttatcactgtattgttttagaggtgtatcaagactccaaagtttcttctgatacacctctccaaaaaattaattcagtttatgaataatcaatcccgaacgaagttttggttcaaaccaagtagtcttcggtggcataatgttgccggtatcggcaatatccatcagctgtttcattgaaacaggatagagcgctaaagcaactttcatctcgccactgtctacacgctttttcagttctcccaagccacggataccacccacgaaatcgattcgtttatcagaacgaagatctttaataccaaggatttcatccaatatcagattagaagaaatagttacatccaatactccgataggatcattatcatcataagttccctccttggcagtcaggctgtaccatttgccttccagataaagggagaaattatggaggctttgcggtttatagatttccacgcccttttcctcgatgacaaagttctttccgacagccgctaagaactcttcgggagtcaagccgttcaaatctttcaccacacgattataatcgatgatagtcaactgattagccgggaaacagactgccatgaaataattatattcttcatcacctttatgatttggattctgctttgccttttctgctccgaccagtgctgcggcagccgagcggtgatggccgtcagcaatatataatgcaggcattgcggcaaaagctttagtaatggcttcaatatcattttcccggtctataacccaaaatgaatggccgaagccgtcacccggagctataaaatcatattccggtttttgagaagtgtatttcttaacaatagcatccagttctgcattatcgggataagcgaaaaataccggttcaatgttggcattattcacacgtacatgtttcatccggtcttcttccttgtcacggcgggtcaattcatgcttcttgataataccattcatataatcgggaacataggcacctactaccaaaccatactgagtcttaccattcatggtctgtgcatacacataatagttttccttttcgtcctgcaccagccaacctttgtcctgaaacatccggaaattctcagcagccttgtcatacaccttcgcatcatgctcgtctgtacctgccggaaagtctatttccggtttgatgatatgataaagtgatttctcattaccctttgcttcttcacgggcttcttccgaattaagcacatcataaggacgggaagcgacttgctccaccagttctttcggagggcgaatgcctttgaagggttttattatagccatagaatattagatttataagttataaatacttatttatttacgcgaaacttttcgcaaccatctttcaggaaacccacaatctgcctggcagctgcaataccggcatttatattcgcttcggcagtttgggcgcccattttcttcggtgtagagaaataacgacccggaaaatggtcagcaaattcggcatgatgtacaggcataatgtcagtaacatattccaaatcaggacggtcattcatcagacgcagcaagtcggcttcattaataacttccttgcgtgcggtattaaccagcagaccgtttttaggcattttgtctaccagatcataattgatagaattctttgtttcaggagtagcaggaatatgcagagatacaatattacaagtagcatacaattcttcggtagatgcaaccgccttcacaccgtctgcttcaatgacctctttcggacaataagcatcgtatgcatagatgtccataccaaagcctttggcaatacgagctacattacgtcccacattaccgtatgcatgaatacccagtttcttacctttcaattcagtacccgaagcaccgttatacatattgcggacagccatcaccatcaacccgaaagctagttcggccacagcattggagttttgtcccggagtattcatgacacatacattgtgagccgtagcagcctccaaatccacattgtcataccctgctccggcacgcactacaatttttaactctttagcagcgtccaatacttcagcatcaattacatcactacggataataatggcatcggcatctttaaccgcttccagcaattttgccttttctccatatttctccaataatgccagttcataacctgctgcttctatctctttgcgaataccgtctactgcaattttagcaaacggtttatctgttgctactaatactttcatggtcttatttgtattaataaataaggacgtactcacagcacgcccttattcttataaatcaattaatgaagtttctcgaattcttgcatgcaatctatcaaagcctgaacactttctttcggcatggcattataacaagatgcacggaagccacccacagagcgatgacctttaatacctaccatacctttttcggttgcaaacttcaggaagtctgcttccaaatctttgtattcatcattcataacgaaacagatattcatataagaacggtccgccttatccgttactgtaccacggaacaacttgttacggtcaatttccgcatacagcatttcggctttctctttggcacgcttctgcatttccgccactccaccgttagccttaatccagcgcaaagtctgcaacgctgcatagataggaagaacaggaggtgtattgaacatagaacctccgtccacatgggtctgatagttcagcatagtaggaatatagcgtgataccttgcccaaagcatcattcttcacaataacgaaagtaacaccggcaggagccagattcttttgtgcaccgccgtaaatgcagatatatttagaaacatcaatcggacgagagaaaatatcagatgacatatcggcaatcataggaaccggagagtccaaatcctcatgaagctccgtaccataaattgtattattggtggtgacatggaagtaatccgcatcggcaggaacagtataatctttcgggatatacgtatacgttgcttctgcagaagatgccacttctacgacttcgccaaacgctttcgcttcctttattgctttcttcgcccaaacaccggtattaagataagcagctttcttttcaaggaagttgaaaggcaccatacagaattccaagctggcgccaccacccaagaacagtaccgaatacccttcaggaatgtttaacaattccttgaacaaagcgactgcttcgtctaccacaggctgaaaatctttagcacgatgactgatttccatcaaagaaagcccggagccattaaaatccaaaatagcctgagctgttttctctataacctcgcgaggcaagatagatggtcccgcattgaaattatgctttttcatttgaagttagttttggttatacaatttgtttatgtcttacatttgcgaatttacacattattttcagctttccaaaaaaaacgctaataaaattacgattttccacataattttctttcaaattagttaaatctattttttaatgctttcattttgtaagctatactccaacaaacaatgatttaaagcatataaaaataatcttttagaattattcgttcattattaggagttgtaaaatgacataatgacactattttgcttcttctatcagcgttttcaccccttttattttctcattctgtatcaaattaagtgtttgctttatctttttgcgagatactgcggcaaacgaataatggtctttcacatcaatccgcccaatttcatctttattcaggttaccttttttaaagagaaaccctacaatatctatcttattgattttatcttttttgccctttcctatatataaggtcacaaattcgggtaatgacggcttgggagtcacttcgggtaagaggaattcttcagggacttccgtcaagtattcagggagcatttcttcctgatggagtagaatataagaatttccttcagcttcccaacgggctgtccggccgttacgatggatgtatccgtcttcattgaccgggagatggtaatgaaccacattttctatctcggggatatccagtccgcgggcggcaaggtctgtggatatcaagacatggcaactaccgttacggaatttatacaatgaacgttcacggtcgtcctgttccataccaccatgaaaaataccacattggaattttttggattgaagatacttccctacccgctccacgctttcacgatgattacaaaatactaatgtagagcgactgcccaatgtacacagcaatttatacaatgtctccagtttatcttttccgggagagagcactttatataaatgcaagcgctgcactgtttgttcctcggtattcaagaaattcaacttaatcgttttgttcagacccgtaaattgaggaatctcctcggcatcggtagccgaaagcaaaaaacgccgcttcaaacggggcaactgcccgataacggtagccatttcttcttgaaaaccaaactccagacatttatcaaactcatcaatgactaatgtagtcactgtttctgcatcgatattttgtttcgaaagatggtcattcatacgccccggagtacctatgacgaccgaaggctgcactcctttgatagtacggtgctcttccatggcagggcgtccgccatagcagctcacagccttaaagggtgtattcatggatttgaaaacttggtctatctgcaaagccagttcgcgggagggtacaagcactatggcctgaacacctttcgcatcaggtttcaagctctgtaacaaaagcaacagataagccaaagtcttgccggagcctgtaggtgacaataaaatcaggtcttttccttctttccaagtatctatggccgcctcctgcattgcattcagctgctcaatctttaaatttgtcaatatattcttaatcataacctttttccttttatacaaaagtaaagaaaaagcccgataaaagttcattttaccgggcttattttctttaatcgacaaacatattctctgcatcaatccaactgatacaccaccagcgggtcatcatagtaataagtggacaataccaaacggtttgttttttcgtccaaaaccgtatatacacaaaagtcattcaacttatacttctttacaggattcccattccagtcgtatttctcaacgtacatatgatgcttccctttgttgttctccgctgccactacataaggcgttcttcccgaataagtgatatatacatagtcacgggtcggaagcacctgcatataatacgtcacattagcatccagcccatctgcgatgtgcagagtcccttcgtcaaaaccggactgctggaagttaagcgtacgttctgcattactgtccaagtccatgaactttataattctggcatatttatatgcataaaccattcgatgacgcgccggattgataccaaggcaaccggtagccggcatcttctttgcctgtttcagggtcatgtcctttatttcttctgtcctgacggaatctccttccaaagtagcccgatatatatttcgtcctttgggataaacgaaactattcttaccggcagcatagatgtgttcaatatagtcccacatcgactttgaactatatatcttttgtatcggatgtatctccagctttttatcaagcccgtaaagcattcctttaggtcgttcgaacaaataacacaaataagcaggattaagggaagctatcacataaggcgcaacaaattcatccggtccgttaccggttcttccgacggtttttatgtaagtaaactcaggataacggaatatataaaaaggcgcattccgactttgcataatcatcaggctatcctttatcaccatattcggagaagcaggtttaaaaataaacgtatccggttccactatatggtttccctgcagttccaccacttcaccgaaggggtccttatctttcagaaagacttcgccttcttccaatggaggaagtgctactatcttttcttccacaatactatcggcagcaggtgtttcctgaggttctgccgcattgttcttttttccgccgcaagctgccaggcttaaacaaagaatagaatagataaataattgtttcataatataatagatatagggtttggtaatggggtcaaatataataaaaggaaaaaggaatcaagcatataagacctaaaaagatgaaacaaagtatgcccgtgccggtatcttgcacactcccacaaaaaaacgagggatgtatcgaaacgctcatacaactaaaaatcaccctcgccacagaagttgtagcgagggtgatttcaataaaaggggaattttgtctgaacattatccgccgaagttgtcatacatgatagaagcaggctcaacacccaggctatccagcatcttaacaactgcattagacatcgggccgggaccacacatgtagtattcaatatcttcgggagcttcgtgatccttcagataagtttcatacatcacattgtgaacgaaacctgcggtatacttcacgcctgcagcatcggctgcgggatccggacggtccaaagccagatggaagtggaagttcgggaagtctttttccaattgctggaagtccggcagatagaatacttcgttcaatgcacgtgcaccatagaaatagtgaagttcacggtcggtagtgtgcagtgtcttggtcatgtgcataatctgtgcacgcaacggagccataccggcac

SEQ ID NO: 6740 - DNA, 1755 bp, Unknown
  gut microbiota DNA sequence
ccataataaccgccaaatctttcttttttcacattttttttctgtacttttgcgctcaaatttaaaaaccattttttataacccaatatggcaaatgtgattaaattacacaaaggcttgaacatcaacctgaaaggaaaacctgctcaggagattttcgacgtgaagcagccggacatctatgcgttggtgcccgatgattttcatggcgtgactcctaaagtggtggtgaaagaacaggaatatgtgatggccgggggaacattgtttgtagacaagaaccaccccgaagtaaagttcgtttctcctgttagcggtgtcgtgacatgcattgagagaggcgaacgccgtaaagtccttagcatctccgttgctgcggcagcagagcaggactacgaagagtttggaaagaaagatgtttcgactatgacaggcgaacaggtaaaggctgccctgcttgaagccggactcttttcattcatcatccagcgcccgtatatcgtggttgccgacccgaatgccaagccgaaaggcatcttcgtttctgcatttgataccaacccattggctgccgatttcgaattcgttctgaaaggtcaggaaaaagacttccagacaggactcgatgcattggctaaaatggcgaagacgtatctgaatatcagcgtagaacagaagaatcctgcactgacaagcgccaagaatgtgactgtgacagttttcgacggtcctaaccctgccggaaacgttggcgttcagattaaccacatcagtcctatcaacaagggcgaaaccgtttggactcttcgtgcagaagatgttatcttcatcggacgtttgttcaatacaggtcgtgtagacttgacccgcaccattgcattaaccggttcggaagtgaaaaaaccggcttactgcaagttgaaagtaggagcgtcgctgacagatgtatttgcaggacgtgtaaccgaaggtgcaaacttacgctacattaacggaaacgtgttgaccggtacgcttgtcaaacctaatggatatttgagcgcacgtgccacaagtcttaccgtgattcccgaaggcgatgaccgacacgaattcctgggctttatcatgccccgcaccaatcagttcagtgcgagccgcagttatttcagctggttatgcggaaataaggaatacacactggacgcccgtatcaaaggtggcgaacgccacatgattatgtccggtgagtatgacaaagtattcccgatgagtattttccccgaatatttaattaaggctatcattgccggcgatattgaccgtatggaagcacttggtatttacgaagtggctcccgaagattttgcagtatgcgagtttgtagattcttctaaactggagttgcaacgtattgtgcgtcaaggtctggacatgcttcgcaaggaaatgtgctaagtaattaaaaactaagaataaaaagttaatgaaagcgttaagaaattatctcgacaagataaagccaaactttgaagagggcggcaaactccacgcgtttcgttcggtgttcgacggtttcgaaacattcttgttcgtacccaacagcacttcgaaaacaggagttcacatccatgatgcgattgacagtaagcgtatcatgtcgattgtggttattgcgttgataccggctttgttgttcggtatgtacaacgtaggttaccagcacttcttggcagtgggccaggaggcaggtttctttgaaaaattcatttatgg

SEQ ID NO: 6741 - DNA, 10067 bp, Unknown
  gut microbiota DNA sequence
taactaattcccccaagttttcaaactgagccaaaacgatgaacaaaagttttcggctccaaatgtctaaccttcaagactcaattaatctcatatatctcaaaaaatgactctttatcaatactcaaagaaaccttctctgactccttctgtccgataaggttcacaaaaatattgagatataattcagtaaaagacaaattccaacgatcatattgcacatcaaaagtatacaaacgctcagcagtattcaattcagcaaaagcctcattgcttttacataagaacacatcttccgaaacagcaggaggataaggcaggaaagatgcagaaagcatcatataaatatagtctgtataccaatgttccgtatagtacctgaattcgccttttaatctgaatttaatcctgtatttcttagccggattatcattcatgaaaataggctgacgatattcctcggggaaattaccatcataataagaattactcattcccatctccgacttaccttctcccctaaagccctccatggtaacatccgatacagcattctttgggtcgaacttgaaagtcaatttaccgatggtcttgtcataaggatacacggcaagcgtatccagcacatacgattccaggttatgactctctgcaatcaatgtcgcattgccggtgggttcctcgctgccacctttaattatatcaacattatctaaaggataatagatggaatcttcttcctcgttacaactgccaaaaaacaatgcacacagcaaaaaaacaatgaacttattcatattttatcattttaatatcgcaaagataacaaaaaatacgtcattctacactcaatatacctattagtagtgatgtatacctcataaaaaagtactacctttgcatccctaaatcttttaatggatataacagtatggaaatgaacaaagtttttaaggatggattgtggagtaaggaaatcaacgtttcggacttcgtacataccaacattaccccctacgaaggcgatgcctcatttttggccggccctacagagagaacaaagaaagtgtggaacgagtgccttaaagcgttggaagaagaacgcaccaacaatggcgtccgttctcttgataacgtaacagtttctaccatcacttctcataaagccggatatatagaccgtgaaaacgagctcattgtcggacttcaaaccgacgaactgctgcgccgtgccatcaaacctttcggtggtatcaaagtagtagaaaaggcctgccgtgaaaacggtgtggaagtggatgaaaaggtgaaagatatcttctatcattaccgcaagacccacaacgatggcgtatttgatgcgtataccgaagaaatccgttcgttccgttcacttggttttctgaccggattgccggacaactatgcccgcggacgtatcatcggtgattatcgccgtttggctctttatggcattgaccgcctgattgaagccaagcaagaagacttgcacaacatcggcagtccgatgaccgatgcccgtatccgtttgcgcgaagaagttgcagaacaaatcaaagccctgaaggaaatcaaaataatgggagaatattacggactggatttgagtcgccccgcaacaaatgcacaagaagccgttcagtgggtatatatggcttatctggctgccgtaaaagaacaagatggtgcagccatgtcactgggcaatgtatcctcattcctcgatatctatattcaatacgaccttgacaatggcaatattgacgagacttacgcacaagaactgattgaccagttcgtcatcaagctgcgcatggtacgtcatttgcgtatgcaatcatataatgatatctttgccggagatccgacatgggtgactgaatccatcggtggacgtttcaatgacggacgtaccaaagtcaccaagacttctttccgtttcttacagacattatacaatctcggcccctctcccgaacctaatatgaccgttctgtggagtcctgaattaccggaaggattcaaagaattctgtgcacaggtttctatcgacacttcttctatccagtatgaaaatgataccctgatgcgtgaagttcgtaactgtgacgactatggcatcgcttgttgcgtttcttatcaagccatcggcaagcaaatccagttcttcggtgcgcgttgtaatttagccaaggcgctgttgctggccatcaacggaggacgttgtgaaaacaccggtacagttatggtcaaagatattcctgtcttgacaggagaccttctgaactttgaagaagtatggtctaactataaaaaagtattaatgcaagtagcccgtgtatataatgatgccatgaacatcattcattatatgcatgacaagtattactacgaaaaagctcaaatggcgtttatcgataccgacccgcgcattaatctggcatacggtgtagccggtttgtctattgccatcgattcactgtcggccatcaaatacggtcgtgtacatgccaaacgcaatgatatcggtctgaccgaaggttttgaaattgaaggtgaattcccatgtttcggtaacgatgacgatcgtgtagaccatttaggcgtagacctggtttacttcttcagcgaagaattgaagaaacatccggtttacaagaatgcccgtcccaccttgtcattgctgactattacctccaatgtgatgtatggcaagaaaaccggtgcgactcccgacggacgtgccaaaggtgttgcttttgctccgggcgccaaccccatgcacggacgcgacaagaatggtgccatcgcttctctgagttctgtggcaaaacttcgttaccgcgatgcccaagatggtatcagcaacacattctctatcgttccgaaatcactcggtgtagatatggaaacccgtattgagaacctggtgaccatgatggacggttacttcaccaaaggcgcacaccacctgaatgtaaatgtcctgaaccgcgaaatgctggaagatgcaatggaacaccctgaaaaatatccgcagcttactatccgtgtatcaggatatgcggttaattttatcaaactgagccgtgaacatcagttggaagttatcagccgttctttccacgagagaatgtaacatccatattataaatacaattatcctaggggcgggctttaaacctgcccctataagcttaaagacaaaccattatgattagagtacactcctatgagtcaatgggtacatttgatgggcccggcttgcgtttagtcgttttcctgcaaggatgcaacttccgttgcctgtattgtgccaatcccgataccatagatataaaaggtgaaagtaccgaaacgccgatagacgaaattatccgtatggctgtcagtcaaaaagcattcttcgggaaaaaaggcggaatcacctttagcggtggcgaaccgaccttacaggcaaaagcactgattcccctcttccggcgattaaaggagcaaggcattcatatttgcgtggataccaatggaagcatctggaacgaagatgtggaagaactactgaaattgaccgatttggtattactggacataaaggaattcaataatacccgccatttgcaactgacggagcgaagcaacgagcccaccctacacacagctcaatggctggaacaaaacgacaaaccattttggctacgctatgtactagtgcccggatacagctctttcgaagaagatatccatgcattaggcaaccattttaaagattaccgaatgattcaaagagtcgagatattaccctaccacactctaggggtacacaaatatgaagctatgaaaaaagaataccgcctcaaaggagtaaaagaaaatactccccaacagttggatacagccaaagctttatttgaaaaatatttcaaaacggtatatctgaactaagcatcaacaagacaataaaaaattagcattattttccataacaagcttgatatgttcttctttttgtttatttttgcacaactaaaaatatcttatattaataactactaaatagcacaaaatgaaaaaactattattattctgtttgctactattcatcagcgcagaaagtatacaaacagcagctcaggaaagtaaggaaactaaaaaagaacaaggaatattcaattcagtcgctgtaggcttaggcgtaggtactacaggtatcaacatcgatgtagcaagcccgataggaaaccattttgccctgcgaggagaggtgaacatcatgcccggattcagctacagcgacgaagtcgatgccagtgtacttaactcagccaccgaacaagtctacgcccccatcaatgtggaaggtagcttggcacgtacgacaggagccttactgctcaatgtctatccgtttaaatcttccagcttctttgtatgcggcggtgcttactttggcggtgcaaaattcataaagatagaaggacacagcgatgaacttcaacaactggtcactgaaggtaaagaagcaggtatcgaaatcggtgattattttatccctgtagacaagaacggaaatgtaaacggaggattaaaagtaaattcattccgcccttatttgggtcttggatttggtcgtgcagtacccaaaaagcgcatcggcttcatgttcgaattgggcgtacagttccacggtactcctgaagtttatgcagacaatgccgaactcaccgccattaatacagtggcagacaatgaattctcggatattatcgacaaactgactgtatatccggtacttaaattccgtttgagtggaagaatcttctaaaagctgaagaatctatttatccataaaagaggtgtacctgaagttatcagcctttcaagcaaactttcaatacacctctttctttattcttccaatcctatttgattatcaccatcacatcccgcgcaccgtgagctcccataaccaacgcctgctcaatatcagcagtcttcgacgggccggatatataagtaccaaagccatattccccggtatgtatacgcttatatgcttcatgcatattattcacaattctccctttatcaagcagaatcaccagtttttcagaaataaaataaagagcacgttgcttgacatcctgttctatccaaacggcaccattctccgccaccccaatcttcccgtcaataattgccaaatccgtgccgtccagttcggcagggtcctcaacattatcaggattgaaagtagcacatgtaataccttccagattggaagcgatacgtttggcatcgggataagactccctgatcagtttgtttatatcctgtccttcctctaaaaaaacagcctcccctcccacctgcttcatcataaaataaaactgctctaccacattaggataagtcaatgcatgctcttccaatggcttcagatcaggtttctcatatttcacgtgtgtagcacggcggatgctctgcaatatatcttctctactactcataatattctattttactttacctttcttccacatctcgttaaaattctctttggcaaatttaggcaaatcacgtccctttccccatgtcacacccatcattctcagcacttctccaccgaccggagccaaatccatcgctgtattgaaagcccaaggacggttcattgcaaactccatgccaccggacattatctttttcatggcatccgctttacccaacttatccaagtcctgacgccacaaatatatctgttctgccaaatcaacctttaccggacacacatccgaacaagaataacaaagcgaacaagcagatacgttatcataataatgcaacggagccttcagcatacccagattaatgccaataggtcccggaataaaataagtataagaataaccaccactgcggcgatacaccggacaagtattcatgcaggcaccgcaacggatgcaattcaacgtctttatgtgcttccgatcagccaatattttactacgaccattatctactataataatatgaaactccccgccttcccgcggtttacgaaaatgagaagtataagtagtgacaggctgtccggtggctgaacgtgccaacaaacgcgtaaacacagcaagcgattcacggtcaggcacaatcttctccatgccaaaagcagctatctgcaacttgggttgcgatacccccatatcagcatttccttcattagtacaaacaacaatctcaccggtagaagccacagcaaagttagctccggtcatggcagcttcagcatgaagaaacttttcacgcagatttttacgagcggcatgtgtcaaataagtaggatcagaatttcccttctccgttcctaattctttctcaaacaattcccccacctgctcacgctttacgtgaatagccggcagcacgatatgacttggtttgagatgcatcaattgcaaaatacgctcacccaaatcactttccaccacctcaatacctttatgctcaagaaacggatttaactcacattcctctgccaacatcgatttgctttttataaaatgcttcacaccgtgctgatgcaaaatattatatacaatattacaatactcatctgcatccttcgcccaatatacatgagctccattggcacgggcattagtttcaaactctaccagcaattcatccaaatgactgttgctgtacagtttggtttcacatgccatttcgcgcaattcctcccactcaggcacctccttactctgtttgtcacgcttagcccttaccagccaaagtgtttcgtcataccatgcagcctgcttcttattttccagaaacccggctgctgcttttgcatgtttcgtactcataatccagctgctaatatttcaacaatatgtaatgtttttatcggaagtttctctcgggcaatgattccattctgatgcatcaggcaggaactgtcggcacctacgatatattcggcacctgttgccatatgacgatgcaccttatcatgccccatctgaacagatacagctgtttcctccacggaaaacattcctccgaaaccacaacactcatcaggacggtcgggctccataatctctatgccttctaccagagaaagtaagtcacgcaatttattaaagtaaggaatattgagttcgctaggcgaagagagtcccattaagcgcactccgtgacaactgttttgaagagaaactttatgtgggaacttagcttgcagtgaagtaggttttatgacatcgtggataaactcgcacaaatcatatatcctttcttcactggcgcaatgatgttcttccgccttcaacaagcgcccgtaattatcgcgcacaaagaccacacaactggccgacggacctactatgtaatcataatctttaaactttctgtcaaaatgacgagccatttccacagattcactctcaaaaccggcatttgccattggctggccgcagcaagtctgatccagcggataatccacgtctacccccaaacttttcaggagtttatacgaagctacccccacctgaggataaaccgcattaatataacagggaataaataaacctactttcattgttatcagttaatatgtgtcctataagaacaacaaatttagaagaaaattgttaaggaggcaatcggtttttctttttatattccattttttatccctatcctctgccatgtaaaacgtttatccgcatcgataaacacgttaatacgtatcaagcgatgcatactaatgtgttacaccttatagaagttctacttataaaagccaaaaaacagaatgaacaagtccagccaaaagctcattcatcctgttttaccgattgccatctttctacaaagaaagggtaaatatcatgaaacagttacacacatgatcatattattttctaggcttcaaaaagctttccgggaattttacctcctgttcgatatgattatccttcaagcgaatccacgaacggaagcccttttcgccttcggtcaattcaatgactcgtgcaccattaggtaaattgttatatacggtatcaccacccgtataacgcccgtatgccaacaatacaccatgccacatcacagcatagtcatcatcatggtcgtgtcccacaaaaataccttccacatcacccatctctttcattgccgtaaaaagacctgaattgaggcggggtgcgcaagctctttctttacgaataccaaacagcacagcagtttcatccgatgcagcctgattgtattcgggcaaagcaatatggaagaaagccaatgacggaacagggtttccaccgttggcttctgtatatttccggctgttttcacgataccactgaatttggtcgaagtctatgtagtcatatccgcctatcccctttatctgtgaataagaatgtgaatcgaatacataaagaatctcagcatccttgcttccgtccgacgatttcaaggggagaataaaattggtaacacccgaaatgccttcggtagtagtggtcaggttgtgagggatgctttgaataatcttaaacaattcttcacgagtcaaaccttgctcattgtcatgattaccaaaagtaacggcaaagggaatttcacgtttggaaaccaaattcaatacagtgcgtattccctcttcggcaggctttccataaatcacatcacccgtaaaaatcaccaaatcgggtttctcggcatcaagcacttcattgattcgttcgatagaaacatcagaccgaggatcattataaatgtaatgcacatctgtaaactgcacgattttgaacttcccattggcattgaacttcaatgtttgggcattgccggcacatacaagccccagcaacaggcataaagtcagaaatagttttttcatggtttttattttaaaatttactcaatagttatcttgaattggtcgtatggagccgtgcgccaagccttatcgaaggtagtgggagacagcgcaaacaagggcgaaaaagtacgcaccgaaatcgttttcccgtcaggcaagaactccatcagcctcagccagcaatcgcctccgttgccatgccattgcccgtcggcggtctgagcattaaacatcatctgagaaacctgttttccgaatttgtttttatccgtgcggaaagatacttgcccctcatagtccacaatctcacattcgtgaccacatatcaccatacagatattctgagaaggatagaccagtttgtcccaaattgcttgtccgtaattagccggagaaactttataatcttccttgacatgacgtaccgcctccggtgacatataagaatgggtaagcaaaatcaccttatgatttttatatttgggcttcccggtcagttggcgggcccactctattgcttcatcacgtggtgcgaactccagtgaaacgaccagcaactttccccatgtgtccgtttcaaattcataagcagcattttccaaggtcggtattccctgataattacatcctacggacaccaatgactcgcgccaacaagcattacgttccgccggaaagtaatccgggaaatggcacaaacggttttccgctttctcataaccatagtcatgattacctgtacaaattacataaggaaccttgccgtccaaacgttcaaaagcacgtgaagctgccttccactgctcttcactagtctgattcccattcaccccgtcgggtatacggatttcattttgctccaccaagtcaccggtacaaagcacccctttgatgttcagcgacttcaggctattggcaatccatgcagtctgcaactcaaagagaggttgattagcatcaaacttcacatagctctgaggatcgggaatcaataccatggaaaaggaacgttcatgactcaatttcgggcgcaagggataaacttgcgccgaaattaattgagaaaggcataataatgtgcctagcagaatagagtgttttttcatatatttatattattattgaagtatccacatcttcttgttgcggt

SEQ ID NO: 6742 - DNA, 3032 bp, Unknown
  gut microbiota DNA sequence
cttcatttcgtggagtagtagataagaggttctttctgtatagattagcaaaggtgtatgcataaagggaaattaacaaatgttaatcccccaagaattacaactgagcctttaaaactccctaagtcgtttcattagtcggactaagcattttcgtcttttcgattatgcctgtctgtcagtcgaattactacagtcttcggcagtggactgtatagtccgttaccgtagaccgtacagtctgctacaatggactgtacagtctattatagcagactgtaataatcttccgtttaaaaggacttggctgaccctaagaaacggcttactcttcctttggttagtgatatgatatttaaatccccaagaaaacgatgtgacccaagaataacaagtaatcccaagtgaaccgctacttcacgatcaaccggactgttcccgttaaattgctgttgacccattgtcggccggggatatttcaccgcttcccacgcaaatttccgcatctttgtcatacagtacgccgaattgtccgggcgcaatgccctgcagaggttcatggctgtggattcggaacaagtcgtcttcccgtgtcagtatccctttcataaacgtatcggtatgccggattttgaaagaaacgtctacaggagaatttcccttccataagtcctccgtgatgaaatggaaaccacgcaaggcaaagtccgtaccgtattgcttctcagtattatagcctcgtgaaacatagataaggttttcatctatgtctttgcggataacgaaccaaggtccgccgctcagtcccagtcctttgcgctgtcctatggtgtggaaccaatatcctttgtgagtgccgatccgttttcctgtttccacttcaatgacggctccttctttctcgcccaaaaagcggcgaaggaagtcattataattgatttttcctaaaaagcagataccctgactgtccttgcggcgtgcactgggcagtttggcttgtaaggcaatatccctgacttcatttttcatcagtccgccaagaggaaacagcagtttggatacttgcagataatctatctgtgccagaaaatccgtctggtccttgaccggatcttgtgcggttccgagccatatttttccatctttttcaaggataccggcataatggccggtggctgtcttgtcatacagatgtccggcctcctgttcgaagcatccgaatttgatgagtttgttgcacatcacatccgggttgggagtgaggccacgcttcactttgtctatggcgtatgccacgacattgtcccagtattgccggtgcaggtcaatgatattcaggttgaggccgtatctgcgtgcggtagccgtacatagttcgatatcctcttctgcggtgcaggtaagatcctcgtcaccgtccattccgattttgatatagaaaaggtcaggtttatatccttgttcgcaaaggaggtgtacggcaaccgcgctgtcgactcctcctgaaattaatgcagctatgttcatttttattgttttgggtcaatgattattaggcagcggatattcttcgaacgcatagagcacagtcgacagatatctttctcctgtgtcgggtaagaggactacaatttgtttcccctcattctcaggcaatttggccagttctaaagcggcataggcagcagctcccgatgagattcctaccagcagtccttctgtggaagacaattcacgtcctgtgcggatggcatcatcgtcttttacacggattattttatctaccaggcttccgttgtatatcttggggatgaaccctgcgccgataccctgtatcttgtgtgctcccggttgcccgcccgaaagaacaggggagttgtccggctctactgctacgatttgtatgttgggattctgttttttcaatccttctgctacaccggtcagtgtacctccggtgcctactccggcaacaaagatatctacttttccatcagtgtcatcccatatctcccgggcggtggtgcggacatggaccgcaggatttgccggattgtcgaactgacctaaaatgacggctccgggggtggtcttgcgcagttcttccgctttttctatagcccctttcattcctttgccaccttcggtcagcaccaattgtgcacctgccgcttttaataaattccggcgttccaggctcatggtttcgggcatggtgagtatggtttggtaaccttttactcgggcaacccacgccaatcccacacctgtgttgccactggtgggttcgatgattaccgaaccgggtttcaggatgcctttactttccgcgtcttctatcattgcaagtgcgatacggtcttttacacttccgccgggattgaaatattccagtttggcaattacttgtgctttcgcaccctgttttttactgaagcgtgacagttccaggaggggagtgcctccaatcagttcagtcaattgtttttttattcttgccataatcttttgaattattagtgggttatctttaataatgcaaagataggggatgatgttcagacaaacaataccatatttatggtatatttcttttgtgcgtttttctttttgtgctacctttgttacgtgaaaaatgaatctaatcaattatgcgaacacgaaaaactatgatgttcatggcagcactctgtctgctatgttgcgtggcttgtacgccgcaaaaggatactcctaaaaagctgaaagttctctcatggaatgtgtggcacggtggtcactctaaaacttatccgggaaaaggatgtgaaggtactgtcggcattctcaagaaaagcggggcggatgtggtcttgatggtggagacatacggcgctgctccgatggtggcagactcactgggatatcagtatcatttaatctccgataatttatgtatctacagccgttatcccattgttgaaaagtatgcattccccgatagcatcggtacttttaactttggcggagtgaagattgatatggatggcact

SEQ ID NO: 6743 - DNA, 21891 bp, Unknown
  gut microbiota DNA sequence
ccggtacgactattgatacaatggaagtatcggggacagtgctcagtgcttcagacttggagccggtgaagaatattcaggtaggtctgcactctgacttgagtgacagtgcttttatgaagaaaccattcgaccgggtatcccgtaccgacagtcgcggacacttttccattcgcggtattgcacccggcaaatatcgtatctatgccttaatggatggtaatcagaactacttattcgattccaagaccgagatgattgctttcagcgattccattattatacctgccatggaggatgccatgcgtcaggatacgatttggaaggactcactgaccatcgataccatcaaaagtgtgggttatacccgtttcctgccggatgatattatcctgagagcgtttaaggaagagaatgaccgtcaataccttactcgcagtgaacgtgacaaagagaatcattttgttcttactttcagtgcgcgggcggatacgcttcccacactgaaaggattgaattttgacgaacgggatgcttttatcatcgagaagaccgaccgcaacgactctatctgctattggattaaagactcgttgatatatcagatggacacgctcgaaattcagatggattacttggcaacggatacgttggaccgtcttgttccgcagaccgatacgctttttctggcaaataagttgactcgtgcggagcgggagaagttggaggcgaaagcagccgaagagaaggaaaaggaacgaaaaaagaaagaaaagaaaggagaaaagattgaaccggagcctaccaagttccttacgttgaatgtggatgctccttctgctttcgaccttgatagaaatgtatatctgtcgttcgatgagcctgtggcgagcattgatacggcagccattcacatggaaataaagaaagacagcctgtgggaagaaattccgtttctgtttgtctcggattcagtgttgcctcgcaagtatgagatattggcggagtgggagcccgaaaaggaatatcagttgtcgatagactcgatggcctttaagggagtgtatggcctgcataccaacaaggtgaaacagaccatgaaggtgaagaaactgaatgaatacggaaccatcttgctgaatattaccggagccgattcgacagcagtggtagagttgctggacggaagtggaaaggtgttgcgccaacaacggataactcctcagaatacggcggatttctattatctcaatcccggtacgaaattctatatccgtctgttcaacgaccggaatggcaacggtgtttgggacaccggaaagtattcggagcacttgcagcctgaagaagtctattatttcccgaaagtatgggagatgaaggcaaactttgactttgaggagaattggaatatcaatgcggttccggttgaaaagcagaaattggatgaaataaagaagcagaagccggaagagacgaagaagatacaggacagaaacaaagaaagagctagaaaactaggccgatgaaaaagattatattcatactattgtgttcttggttcactatatgtgccgcgggagcgcagtgtgctgcaaagaatgaagccatacaagcgggcgaactgttgacttatgaccttaagttcaactggaaattcatctggaaagatgccggtgttgcccgaatggatatgcaggcagtgacttatcagggtaagccttgtttccgcactaatttggtggctgccacaaatggtatggtcgatttctttttcaagatgcgtgatacgctgacttgcatcacgaccaatcggttggagcctctttatttccgtaaaggggcggaggaaggcgaccgttatacggtggacgaagtatggttcagctataaagatgataaatgtattgccaatcagcgcaggatgcgtcgggggcgtgatacggtgagggcgcgtgacgaaagcgaaggatgtatgtttgatatgttgagcattctgatgcaggcacgctctttcgatgtcgatgattacacggtggggcagaagattattttcccgatggccaccggcactaagatagaagaccagacgttgatttatcgtggaaagaaagtatttaaggcagaaggcggagtgaaatatcgttgccttgtcttttcgttggtggaatataaaaagggaaaagagaaagaggtgattaccttttatatcacagatgataaaaaccatttacccgtgcgtttggacctttatctgaactttggctctgccaaggcattcttgaaagagataaaaggaaacaggcatccgttgacatcgattgtcgagaagaagtaggggcgaggtttgctcgcccgaaaacagtttgctttgtgtattcgggtaatccctgtcactacggagatgtgttaaaatgcacaccttctttttttgcgcacaaaggaggtgtgtcaaaaatttccttttttcgaaatcaccctcgctacaactacctgtggcgagggtgatttttagtttatgagagtttcgacacaccctctttgttattacctaaagattttgcatacatttatactatggcaaagatacactttcgtccggcgaaaaacggttgagcggaaccgtgagcgcctgatgaagaaggtgtatgttctgctagggcaaatagacgaagtcatcgtccgggagaaatcatcggaaagcaatgaggaagttgaattcactctgactatactgaccgaaatggcgggagagttacgtcatgcacttgaaaagctcctgagccttccactaaagaggaaaagactgtactgaaaaagaaacgcaaacagctgaaggagctggaagagcacagggataagctgcaggaatacgacaaccatccggacactctgcaggaccggaactcctattccaagacagacaaggatgctactttcatgagaatgaagggggagccatgcgtaatggccggacagagcccggttacaaccttcagatcggtaccgagaaccggttcattatcgattttgcactcttcccgaaccctactgatacactgaccctgatacctttcctgcaatccttctcaagcagatatgacagattggccggtacggtggttgctgattccggttatggatctgaggagaattaccgcttcatgtcagagaacggtatggaagcctacgtcaagtacaactactttcacatggaacagtggccgggattaaactgtgaaaactgcattcggatatgtcagcgaaaatgccggatacagagccgtcagatgtgaaggctgtccgctaagatgtcgatgttttaaggcaaagggaaacagaacgatagaattaatcacagacttagaagatacaggtagaaaaccaaagagttgttgtgttccaagaaaggactgaaacacggaggacagagatgtatagaaccggaagtagtgttcggacaaataaaatacaatatgaactacaaacgtttccgccatttggaaaggataaggtcttcatggatttttccttcttggccattgccttcaatataaagaaaatgtgtgcaaaaatgataaaagaaggtatgaattggctgatgaaactgttttataagcttacaactgctatttttagatgttgggaacaaacaaatcaaagaagtatccaaaatatcgcagcttaaaaaaatgaaccgatttttatagtcaacgaaaaaaagaaggtgcatcgtgcattacgacacgcctccataggattccatgtgtcttgacgctgacaagcttcaagcgggtcaggaactccgtcatccggccggcaaaggctgtgggatgacttcatccgagagttcgacagtatcaaactgcacgacaagaatggaaggacctactccccgaagaccaacctcagaggcagcaaggggacggtatggctgtatctggaatcccgaagctgagtaccgttttttcacggtgtatactgccgtatggataaaaacggttgtatcaataacgaccatgacatccacatccgggcacagcgtgcagccgaacgggtggccctgaaacggggctggacgtgttcaacgatgaatttgactaccgggagacagccaacagccgtgaccttacggacatggcagtggctctctttgtcgggatgctcgatgttccggcagtcccttccgaaggcggaggcagttccagcgaccttccctgggggcgtgaggacgaggatgaccgggcgtaaacccaagacaggacttaaatgatagaaaacgatgaacaaagacagatttgattttttagaaatagatgtggcaattccggctgctgaaaagatgcagcaggaagatcggacagccgttgtattggagaacaactgcaaggtcgtcggcattcttaatgagaaggtggaaaagcttgaaaacagacttgcggaagcctgtccgcaccggacgagactgtctcttcctttcataaggcaagcagggtgactgtcggcgaggactccagacgtgtgcttgaacaggaaggagatgccatttgccggaagacgaccgaaatgattggcaaggaaggcaagaagctgatggaccgcctgtccatgagagacaggacaatcgtctccacggttgttttttggtgcatggtggaaacggtcgtttttcttatggcgactttcatctgcacctgtatggtcaacgcacagttcatccacaacaccatgctgtggaaaatgctcggttgtgtggcaggatttctcctgctctgcattgggctgacagcttttgtctgccataaactgaaactataaccctaataaaatataattatggcaacagttaaaattcgatttcgtgcctctaccgttgaaaacaaagaaggcaccttggtttatcaagtgattcacaagcgacagacaagacaagtctctaccggttacaaactatatccacaggaatggaacatgctgtattcgactgtggattttcctccgaaatgtacggaaggtcgtcgtaattacttggctgcattacaggcaaagctaatcgtggatataaacatgctgaaaagcatcattgtgaaacttgaacatacaggcaaggactatcgggctgatgatgtgttgagattgtatcgttcaccgtcggaaaccaaaggatttgtttcctttaccgaatccctgattgcagagttgaagcgaaccggcagacaatgtactgcagagagatatgcaaccacgctaaacagttttaagcgcttcatggcggaacgcaatgacatacctcttgatttggttgagtcaagccttatggtagaatatgaaacttttctgaaatccaatgggatatgtccaaacagtatttccttttatatgcgctgcttacgtgctgtctataaccgggcggtagaaaaagaactggttgtgcaacgaaatcctttcaagcatgtttataccgggattgataaaacagtcaaacgtgctgttccgctgaaaataatccgtcagatacgtgagcttgatttgacactcacccctgaactggattacgcaaaagatttgttccttttttctttctataccagaggaatgtcgtttgtcgatatggcttatctgaaaaagaaaaatctgcagaatggagtgttgtcatatcgccgtcagaaaacgggacagcagctctttatccggtgggagaagcctatgcaggaaattgttgacaaatacgatacatccggcactccctttttattgccgattatccgagacatggaggcagacaatagaaagcagtacaaatgtgagtcttaccggataaatcagagtttaaagaaaatcggcaaacagttaggattgactatttctttaacaagctatgttgcccgccacagttgggcaagcatcgccaaaagtaagaatattcctgttgctaccatcagtgaagccatggggcacgattccgagcatacaacccgtatttatctcgcatcactcgataccacagtagtggacaaggcgaacagtctgattctaaaatcactgtaacatacaagccgctaatgacatctgttacaaggccataaatcgatactttatccaagttcggtttatggcatataatatgtcctgaaaattattgttcaacaatttggcttcagtctttttatatcttttggatggatctatttatccaatgcgttttcgtgcataactgattgcaggaagcgcaattcttattttatagccttccttcaaaatgctttttttcatagccatctcaacgaaaatgacgaataagacagaaaaaagagtaggtgaaaaaggttttggaagaataggaaaattgttaaatgaaaacatgtttctccctgtaagagatttaattatgttacaaacatataaaaaaatcccttatagggcaataaaatcaaccatattttttttcagttatttgcattttatttttcctcataacaatcgttgaacttttcgaattgcctattaaacgatatattgctaataatcaggtagatatgacttatgaaaaggctttgtaaatctcttacagggagaaatgtatagtgtgtgatattctctcttataaaaaatgaaaacacgggtgctacccaatctactgataacagcatgccggcttgccggtacgaatggaataattaagaaggaaaatatgaaaaaattaatcctcggtgttttccttgccgtttgctggtgtacaggcactgcaaacgcgcaggatatagcagcaaagaccaatttgttgtattggtcaagtacgacgcccaatttgagttttgaatttgggctgggtaaacgcacgaccctcgacctcacaggagcttacaatccctggacgctgaataaggatagtaacaagaagataaagcactggctggtgatgccggagtttcgttactggctctgtgagcgttataatggtcatttctttggtttgcacagcggttatgtcttttataacatcagtggtgtgagagttctgtttcaggataaatcaaccaaggatcaccgttatcagggttgggctacgggagccggtctttcctatggttattcgtggattctaggcaaacggtggaatatcgaagcaactatcggtttaggttacatctattcgaactatgacaaatacgaatgtgctacctgcggcaaattcaaaggtagccggaataaacactactttggcccgaccaaagcgggtatctctctgatatatataatcaaataacaatggaaaaactatgagacacatatacattatattattactgatgctggcatgcaggccgattatgttgcttgctgaaaacgaaaccggttaccttccctccatcgctattcgtcagggaggtgtagccaagcaggatcgcatggttgaactgaaaatgtctgtagatttgagcaatgccagaattcacacacagcataccgtagcactgacacctgtactcgtctcagcggatggaaaccgggaaatagcctttccgccgattgtcattgacggaaaaacacgccacaaggtttacttgcgggcacaacgtctcgaaagtgtagagcttcccccttatcataatgattctgcacaggtgattatacgccatagcagcaagaaccaacagtatgattatgcggctaccgtaccctaccggcgatggatgctcgacggacgggtggagattcgcgaagaggtacacggctgtaccaattgtggagagggaaagtcagagcaggacttgctgaatggagttttacctacctatattcctgattatcgtcttcataccatcgcgccggaacctgaaccgataaaggtacgtgcagaaacacgcacggctcgtctgcaattccggcaggacagttataagattctgcccggacttaaggataatcgctccgaactggataccgtttccaactccattgatttggtgaagaaaaatacggatgtcaagattatcggtatttacatcaccggttacgcttcgcctgaaggtagtgaggctcacaaccttaccttgtcagaaaatcgtgctaaggcactggctgattatatccgccgtcacgatgccatatcccctgacatgctccatgtggactggaagggtgaagactgggaaggcttagtccgtgtactcggtaactatccgaagttgttgaaacgtgacgagatatatgagattattaagcgatacccggacaaacgtgacttttgcgagttgcagcttcagaaactcgttccgccgaccatctaccggagattgctcgatgagatttatcctgcacttcgtcgcaacgaatatcgcattgaatacaacgtgcgcaacttcaacctcgaagaggcatgccgcatggtcaatgaacgaccggacttgttgagcctgacagaaatgtacaaggtggctgattcctatggaaaaggcacacccgaatatgataaggtaatggctacagcggtacgttacttcccgacatcgcctgccgcactcaacgagaatgctgtgaatgccatctcgcgcaaggaatatgacaaggcggtgcaactgctcgaaaggtctgaagtcgctgcacagtctgccgaactgttgaccactctgggtgtagcttatgccggagttgggcaatatgaaaaggcagaggatgctttccgtcgtgcttctgagttaggttctgaaccggcccggcataatctgaaggaaatgctacaggttatggaacaattgtaatcaccaggagatataatcaaacatttgttcaatttttaatacttaattcttatgaagcttaataagttttttatgctggcaatggctggtttggccatgaccgcatgtagtaatgatgatgagatgggtaacaacctctctggtaacggtgtggtagaggtgaagattgtcgctccgcagtcacgtgctctcgaaactccggatgcttccactgataataaagtcacagtagagggagatatctatgtgaagttgacagcagaccaaggtggtgatacgaaaaaggtcactgcagatggaggagtttacactgtgaaattctacaacgtacaaaagccatcaaaaattgaagcctggattaatgacggtgacaaaaaaggtatgggcgaagcaaatatttctgacatgcaaatagttgctaagtctattcctgcttatggttcaaatgataagtttaacttgactggaacaactgaaaccactgacggaaagacatatgaaatgtacgcaactagcgtagatttgaagattcctgtagctcgtttggaaatttcgggtattaagcacgtgcaccttgcagagcctgataaaggttgtaaatattctgttttgaccattgacggaatatatttggacaaggtttctactaccttaggtggtgaagctgttgattattcatggccggctgttgaaggtggtgccccattacctattctgagagatgagattactgaaccgggtaataatttcatggatttggctaaagtttggccaagtgcagaatctggtaaagtttatgcttacaacttctatccaagtgaaagtcaacaacctcttgtaaagatctatttcgaaaaagctgaagcttctgatgcacagaaccctgtaagcgagccgcgttatgctgtcatcaagagttacaacggagattcaaacttcaagtttgtagctggtaaaatctatcgcattactgacgtaaaattggatgacaagaacattatcggtgacgaagaaggtaacactctgtatggtgtagatgttactgtaaaggaagcccagtggagtatagaagctattaccggtcaatgggaggaacagtaaatctaccagtctgttaccctatccattaaatcgttagggcaacagattcatcactaagtaaaaacagccgggactcgtcaggtaaaccgataacggtactgccagagcggtcccgactgtttgattaacatttcccggtaaacgggaaagcatcacttggaaaatccatcaacatgataaaatgacaatgaaactgatacaaaaaataataggcttgatgctggtgcctgctctgttcaccggttgtatcaaggaggacatggatgattgtatgaacgttgcagtctgcttccaatacaatgctgatggacaagacaacgtgctgcaaaattatatccatgacatcaacctctatacctttaccaccaatggaagtattcatagccgcatacctgtcggcaaggaatacttaacgaacgagaagcgtttcaaacaaattcagctccccgctggaaactacagtctggtggcggttgccaatgcctatgacaaaacagaagtaaagacgggcggaagtagtttggagcagatttttatccagcatccccaatggcagaactcggctgcactttctggtcaagaccataactatttgggacgctgtgacctgcaaataccagactatcataccttacaagaagttaccattcaacttttcagtgcgcacatagatgcttatgtggaagttcacggcctgcagccgcccgtacgcagcggagaggctacagctccagcctaccgcatttccatttccaatgccaatgcgcaaaccaatctgctgaatcaggttcagcccggacagtggactaccgtggcacaggatttacacttcgattcggctacacagacttatcagacaaccgatatggcacttttccgcatggatagcgaaggcagtgtcatcgaatcgctctgccaccatcaggtccaactggaagatcgagacggcaacgtgcttgtatcttttcctctcagcgattatctgaaggataatgcgaaatacattgatgtgacgaagcaggaagctttcctccccatcagtatcaaatttactccggtaagcgttacgattgaagtaccgtcctggtatatcgaagacatcgacccggaatggagtcattcttaataaactaaaaggagaatattgaaatgaataaacgattacatcatataatagcctcacggcatatcctggctgctttcatgtctctgttcctgctctcggcagtctcttcctgttcggaggatgaaaacccggagacgggaaaagcgaccgtgaagatgacctttaccacacgggccggagcccagaccggaagtgtttctgcactggaagaacgggaacgcatgcagaccttgcgtgtcattatggaaaatgccgagacccacgaaatcctctataatgtcttttatgacaatctgcagaacggaaccaaaacggttacctttcaggatgtgcctgtgaaagaaggaggcaccgacttcaatttctatgcgatagccaacgaatcatcctttctcttagaaagtgaatcattggctggcaaggacatagacttggacgccctttataatcgtgatattacgattgattttaatggcaatgcactccccttgcctcaggccaagaagaatcagaaaaagattctgcctaaacctggaatacaggaacactctgtaccgttggagtttcccgtggcaaagataggtgttattttcactaatgaaatcgaaacggaacagactgtagaagacatccggataccgaatcttaaggtaaataccggaaaactctttccgcaggatttcaattcagaagatagtgcaccagacgcagaggcaaatgccggtaacataagtttcagcccttcatctttgacagtgccggccggcacgttcggaggtgacccgggcaaagcttccgtaacatcactttacgtttatccggctaaaggcagcagctatacactgaccgccaattggcccgataataatgaaaaaacagttgacttgaatcagtctggtaagttggcagacggcatccgtcgcggtatgcagctgaatatcggcattaccttgaagtacggtgtcatgcagctggataatctcacggtgacggtggataactggaccaataacttcatcacaccggaatttcagtaaccttgctttaagatgtataatttaaatcaagatgatcatgaatctgtatatgataagaaatagattttgctggatggtggcagcggtaggctgctgcctgttgcctttcagttgtgtgcaggaagaggacggagttcaagtccctgaacacggacaaggcatgagtttgcagttaaaggtgagagcgggggctgataatacaggtacggcaccgacgacagaggaaagcaatatccatacccttcgggtttatgcctttgcggatattccgaatgatccaaaagacggccgtctggttggatattattatacggatcaagtcttacagactcctcattcctttaatatggacatcacattctatcagaaaggcacacaaaacgtgaatttttacgtggtggccaatgaaaaagcgatgtcgactccaggtgatgacaagccttttacggaatctacaaccgaaagcgatttgaaccgttttacatttacaacactgacaacagatattacccgggatggactgcctatgttttacaggtcagacgttccggtagaattgaataaagacggtttgagcaaaaacttgactttcaacctgaggcgccctatgggaaagctcggtgtgtatgcagccaagcctgaaggcgaaagcggtaatctgcgaattaccggactgaccatgctggcctcgggtacgcgcacacgtaattacctcatgccacaaagtgatgaaatattgcaaggcattacaggaatcaagggagatattccgcttgatgttatcaataaggatgtggacaagactatatctccaaacctttctgatacagaaagacagaatcctgacaactataccccagtgttgaacagacctttctatccgtttgaaaatccctggggaagccattcatggaatgcccaaggtgacgaaggaggcaatgtccttcagatagattattctttcggtgaaggagatgcgcgtagaggattggtttacctgccccgtattcagagaaataatttctacgctgtatgctgcctgatgcataacgacggtaagataaccgttgaatatacggtggccgattgggatgacggaggcacggatgacctgggagagtttgactatccctcttatacgaatcccatcactccggcagatggcacttcgcttcctgaaggaggcaagtatgaccaaccgacggtttactacaatccggattcaagttctcctgatggaagttattcctttacattttccatcacagctccgcaaggagacaataaagtatggaaacctgtactatatgacagaaatatagatgatttttccgtagaggtttatcagaaaggttttctattgggagacaacaaccagtcatatgcgacatcagcggatccttacgaaattcgcatccgggcaaaagaaagagattatctgactagttcaccggatggtgagggtcaagtgaataagacggtggggttgggcattgcctatacacctgcattgctaccagacaacacctccttgctgttgatcaatggactgaccaatgacctgaaatggcaaggaagtacgctggcggaaactatcgttatcaaacaagtagacatacctaaaaattgataagctatgaaacagctattgcattatattgttttctgttgcctggcagcatgttgttttactgcatgcgaccatgaggatatattttgtcagacagagacggaaggtgacggcaacagtatcattttaaatcttgcatccggtaaactgcctttaacccgtgcaaacgtggaagctaacggagctgaaattgctgttagtcatcttgacgtgctgattttcaaccaggacggaacaaaagtctggcacgaacgtgtagatggaataaaagacggtaaagataagataaccttatctgctcaaagaagcacctttgatgaaaatgaatcgtattgggtatatcttatcgccaacagtactgcggatgtgagtattttcgaagatgaaaatttcacattaaccagcctcaatgcactaaagcaggaagataaggacatacacatgacaggcctggcatctgctaccggtgtaccgcagacttttctgatggatggcgtagcctatccgaaaggtgaacaggaaccggcaacggtcaagatggtggtactgaacagtggagataaaacgaacgatacggaattacaaaccgtgcttcgccgcgcagcagccaagattgtagttaatataaaaagcggtgagcatgtacagtttgataatggtccgcagacatatcatgccggatattatctacgtaacatgccttatagtacatctgttatcaagccggctatgatggacaaggatgacgctgagctgatgacacccgaattgaacaatggtggatatttcaaatggacaccaagtgtcattacagtgacagcctatgcctatgcgcatgtttgggataatgcaagtacactggaaaaagaagtgcggctcattgtaaatatcccgatgaactatcgccctgataacgcagcggagtggaaatttttagataacagttactatcagattccggttagtacaaagaaagaactgaatcgaaacacttgttatgaagttaatgtgactgtcgatgcgccgggtggaagcaacccttcaaaaccggttcttttaaaagatatcagttattctgtacgtgattgggatgaagaactgattaacgtcggtggtgatactgaccgtccggcctatctcacgctgaacgagtatgagatggagatgcacaacatggcagatgataacactacgctggagtttgcctcttcctcggaagtgacagctactattgatagagtctattatatcgacaagttcggacaggaaaaggagttaacccaaataacaaacggcagcgcggatgaatggggagagaatactggttctgattatcggccgaattggaaaaaccgttgcatcattaaaattacaccggatgaaaacatcactggaaaaattcaggtacatggggatgtacctggtaacaatgctgtgagatatatcatatttacggttgaaaacgaagaaggtatcaagcgtgaagtcaaagtggcgcagtatccgttggagtatatcaccaatattcaggggtggtattcttaccgttctgatttcggaggaacgacgtgggaaaattatcgtgatccatctcaaaaacgagttagtgcgtacaattatgatagcagaaatgatacttggagctattcagctacgagatatggaaatgattatatatttacttcaaaggtggcggaagaaattgaaaccggcagcaataggggaaaatcttctatatcatactattattataataggtggcaaacttcacttagtaccaatgaaatttggaatgcaggtaatgcccgaatgtatcatgttcagatcacggcaagttctggggattatactttaggccaacctcgtattacaaatggcaagactgatcctggagaagataatgcagaactggtatctccttcttttatgattgcttctcagttgggagctgttttttctatcagtgatgaggaaatggcagcaagtcactgtcgagaatatgtggaagtggctcaggatggaacagtttatgatgattggcgtcttccaacacgagcagaattggaaattatcatggaatttcaatataaagaaaatgctgcaatggatgaggttttggcaggaccatcttattggagtgcaagcggcttagtctataataataaaggctcaggaactgctaaaacaatccgctgcatccgcgatgcctacgacaagaaaaccggtaaatagaaaggaggacgtatatgaataagaatatgatacaaagattgattcataggattatggcaatggctgctatagcggtcctgttggtctcttgccgtcaggacgaatggttcgagccgtcacccgttgcccgcgaaggctacgtggcactgcggttcagtgcggatattcccgctatggagaaagtgactacccgtgcggtggaccccgacggtggcggtgtgcaagacatgacgctgttctgtttcgacagttacggacttttcatcacgaccgtaacggcagatgtcagcccatcatcagtcagcacaggtgccttccaggctgaagtacccgagaatacccggactgtgcattttgtggccaaccaggtgatgacggagtttcaacaggaccatttccgcaacaagtccgaatcggaagtaatggctctgctcgaaggttcttccggacgcatgatttactgggcacgttttgcttgtgacaataccaacgaagaaatgaagaagaaatccattgcagaccagatgacctctgcaggaaacagcatcaagatgctacgcaaccatgccaaggtgtctgtcctcaatcctaaagaaaacggacattttattgtaaccggctttgccgtttacaatactagtgcgttcggtacggtagcaccgttccatccggagaaaggctttaattttactgaggacgactggacggctgatgactttgttacgcttccgtcgaataatgccaaattgagcgacattacagatgtgaccataaatacggaacaatatatatttgagtgtgaaaacagagcggatgatcctgtcagtatcattcttcgtggacacaacaacggagaatcagaagacctctattaccgcgtcatgctggtaaacgataacggagatcaaatcctaattcgccggaaccatcagtatcagctgaacattaccgggaaactctctttcggacaggcaacctttgccgaagcattggaagcggctgctacaaataatgtgtggatttccatttccgacaaggtgaacgaggtcgaggatgacaaatatgtactctctgtatctcagactgaccatgtattgggagcagaacacgcaaacgatatctacacgatttcctatacaatcaaaggaaagggcgaagcatccattacatccactgacaaggcagaagtaacctggataaataacgatgtggcccgacaggatatagtaaataatttcgtagtgaaaaacggtgtcggtgaaggttcggttactatttccctacttccgatgggtaacaaccagaaactggaaggcaccttgctggtgaagcacggacggctgcaacgtaaggtcaaggtcattttggtgaaggaacagtcattcgctccttcgtgggtaggtacacagatttatggtggtatgaaccaacaagaccctaccaaagaccgctcgcacgtgaccgtgatgtttaccgttcctgaaaccacccctgcagagctcttcccgatgaaagtgtatatctctgtcggtggtctggatatccgtccggaatccggtatgaaactaactgtagtacgtgaaggggacaatgactggcatagcagtggagacatcacaccggaacccgattacaaatacctctatgtggtggaacagcccggtgtacagcgtgtctatttcgagaatatcctgtctcagcaggaaggctatacgggaacgcttcatattgaggcaaaacatttcgaaaccatgcagagaacttttacgtactcagcatcacgtaagtccattactgtagaaggtctgaaagcttataatgctataggtggtggcatagaaggatatcccgatgacgaactcattctctatcgtctggtacctcagaaaaaaaatgcccatgtccagtttgacctgcagcttcgtgataaggtaggtgatgacgtgtcggaagataagaagggagacccgttcaatgcagaaagtcaagatgaattcatgctttattctcggtatctggatttctatactgacgaggaaattggtcaggcaggagtagaccggtttgattgcctcttctatacggatgcatcagatgcctggtggaggaagaacaatccaaatggaggtcgtatgttgatgttcaaaccccggaaagatataatcaacaagcctgatggccaaaccggaaaatattccgtctacatgaaatccaaccggcctaagagtgccgaggtgattcgtatagcatcaaaccgcagcggtattgaggctgtgctgaaggaagatgctttatccgatggaacgtatgctggaaatacatacagaagtgtcaccttcgagctggccaattacaacccgttccgtttcggagccagactgaatcatgacaatacggattggaagggtgaggaaccggatagagaaagcaatcctgttgcagatgtccctgaactccttacatcgttggaatggccttacgaacctggaaaacaagtggatattgccattgacataaccagttttgccggaacagacggcaagtcggtagatccgtttggagaagccttcgaagtgtacattgacgctccgatgctagaattgggcagtaaccctaatctgaacggcaaactctccgaagtaagtccgggacgctttgtctataaggtagatgctgaccgtgaaaaggaacgtacttatttccggaattctgaggtcatcaacaaggacaatacccccggtacaaccgtgaatcagtcgggagagcgcaagaccctgcacttcaccacaaagagcatcgtgagtgcgggcgatatcacgatctcttccaacaaagaacaggtggtgttctattccaagacgttccgcatcataaacagtccgataagcggaaacatctattacaccgatggttctggcaatcagcagccgattccggccagtgcattcgttgcatttgagcgtgtcagcaacagtagccgtatcggttctgtaaccattgcagcgaatggccggtacgaattgcgtttgcgcaaagagtattctttcaactggaataccaaccccgtgaagttccattacgaggtgaacggtgcggtttacagttgtacctacaacagccttgcggaattgtttgacaggcaaggaaatgtggttctcactttggaaaaacaataaattgaataatacaaacggaaactccgggcgctttcacgttcggagttttttataattcacgagaagcatgaataaacagcatcttgccatttttgtttgtcttttctgcataggattggcatcctgctcgtatgcacaggagcagcagaagaagacaaaagaatttcatctacccgacgtgcctgttacattgacggcaccggaagatcgtgccgactacctgtcccttcattactgggaccatttcgattttgcggatacgtcacttatatcccgtccggaaattaccgaacaggtatttgtggatttcatcagcgtcttgccttattcctccaaagcacagacggccgttgatacgctcttttgccgtgctttggtcagcaatgaaatgatagagcatttcattgccctgactgataaatacttgtacgaacccaattcgcccatgcacaacgaagaactgcatattctcttcctgcgtgcgctggtgaacaatcctgatttgggagagttggacaagatgcgcccacgtcatcaattggaaatggcgttgaaaaaccgtccgggagacgtggcggcggattttaccgttgtctgtcgggacggaaagcaaaaacggttgtctgatatacaggcagattatgtgcttatctatttcaatgaccccgattgcgaggactgccaccgtgtgaaggaattgctatccctgtcacctgctgtgaacgggctgctgaagtccgggcgcttgaaactgctttccgtgtgtgtagaagggaaaactcccggatgggagaaaactgaatttccttccggctggattgatggttatgatgccggccagcggctgacccgcgaacaggtgtacgacctcaaggcgatgcccaccctttacctgcttgatgcagaaaaacgggtcatactcaaagatgctttattcgagcaggtagaggaaagattaatgtggatgacgactcctaaaaaaggcctatgaacatatccgaaaaaggcagtaagaaatgcaaccgcttccgaggtgtcagacccgaaatggaagcaaagtatcgtcaagcgatagaactttatcgttcgacggatttgtctgttgcggaaatcagccgaatttgcggtctgacaaataacggattgaggggttatatattcaaatatcaccgtgatctgatgctggcacgcaacaatatcttgtgtgataaggaagcagcttataaaatcaaattaaaccagctccgaggacaacagcctgtttcccggatcaaatacaaggatgcaatcgaagcttgtagaagcatggaatatatcgaattgaacgtatcacagattgcccgacaatttagtttggaaggctctaattggggacggcagttacgcacccattgtttcgaaaaaaggcttttacgaacatctgcaaagatggcacctcgacttgatatgcaaacggaagaatatttcctatgaagaagggcagccggtggactggtcccaagttaggaaatacaatccggcccaagggaaaatacgccgaagctatccgtcggctgaaagaaagcggactgcctacagaccaggttgccgctgagtttggcttacatcccgaaactttccgtttctgcttgaaagaacatgagccggaactgtgtggccaagcagggaatggtcaagttggatagtggaaaaacagtctcacaacgcagcatggagaaatacagtgaagccatgtatctttacggtacaactaccgaaagcgtaaagtctttggcaagacgattcgggttcaacgactgttcgttcagtcaattcattaagaggcactttccggaactggtaacagcttttatataatttctgattatgtttatgcgattatttgttagttagtcgtccattaaaataataatacgaggaaataattttctatactcaaaaagggattgtgtccaaatgttgataatactgtcattttgttagtaggggcgaggtttgctcgcccgaaaacagtttgctttgtgtattcttcccaaggtcgttaccgtcggttcgggcaggtaaaccctgtctctacagttaatgatttgatagaccggtttagttttgacacacctttttgtcttagtcgtcaaagagtttggcttttctggaaaccagtctcaatgtaattttcccttcattgattatccttaagatatcctctcctcctttattaaccttacatagagaaattttcggtcccatgattttatcaatgcgcacttctcctactttatcttccatataattaccgtcaatcataccatcttccattacatcaaaccgttgaccttcctttatgggatcatcatatcccagattgatataaaccgttttggcttttttcccattatcaccggcaagtttcaagatactgccataaaccttaaaataattctctataaaatttctcatttcatatgacatacccaacagtgaatgttccagtgctgcaaactgacttgcatctttgcccgaagacgaaccggtttcttcgtaaatccttgtaccgatagtggttccgtcactggtacgaatcaagtccaactgtagtttaaacttctctttaaaactgttctcgcggctgtggtaacgaggatgtgaacttccgtcgtcagtagcttcgcgtgacactatatttccgcgtagcagatagtctgcccgaaaacggcgtgcatcttccaatgggctcaaattaaggttggcacctacggaaacagcatcaatgatattcacacgattcgtttgttgtataccgtccaatacaacattccgaatggtgctg

SEQ ID NO: 6744 - DNA, 221 bp, Unknown
  gut microbiota DNA sequence
tgagctataggactgtcaggttcaacctagtctacctctgtttagactcggcttcttctttctctttataatgaataaacaaagcgcgtagtacaaggacaaaaacctcaaatggtcctctccagaaaggaggtgttccagccgcaccttccggtacggctaccttgttacgacttagccccagtcaccagttttaccctagggcgctccttgcggttacg

SEQ ID NO: 6745 - DNA, 1153 bp, Unknown
  gut microbiota DNA sequence
tgggcgtacagctgttcatgctccacaggagtggtgcagtcaatggcgtgctccaagctgacacagaggaagcggcgcgagccggtgcggtctaccagcaggtcctcccggttgctggtgccgatgaacgaggcgatgcggggcagtgccgaagcgctgcgtttgtaggccttgcggatgttcagtgcggaggcttgcatcaggttcttcagcagaggcattttagacgcgctgagtttgtcgaattcatccagattgatcagcccataggcagcgagtttggcttcggcggatgccggggagccgaggtcgtaactttctgtgtaataggatttcagtgcatcgggcatcagcaggcggcagaacgtacttttccccagtccttgtcggctgctcaccagcaggggagctacgctgttggcgcggttgatactgttagcgcggttggcgttgttggtatccggatggaactgcatccattgggcggagagccccagcatccagcggtggaaaccattcacccataccgggtcgtcggacacccggcgggcaagtgcggatacgcgatccttgccgtcccattcggggagctgctcaaagtaagcggtaaagggatggtattcgctgatgcggcgcgagcgcacaaagcgttggatatccctgtcccagcagtctatgcctgtttcgatggcttccatgctgagcgtgttcatccatcgttcgtccactttggcgtaacgcaggtgggtgtcggggatgttgtttgttacttttgccacctcggtttcctcggtcagcacgttgaagcggaagcggtagcgggaggtgagaaaagcggtcacttcctgcatcagggaggatgatttcgctttcttgacttcctcttccgaggattctaatccggcttcctttcgagtgccttccgaagatatcactccgattttcttttcaacatctttcgaggattctaatccggcttccttttcaatatctttcgagtgtgcgatattcataacctttcgagcacctcccgattgtgcggcttccttctccgttttttcaattaagactgccgggcatccgggagcttcgttcctgctttccgataaattgcccttgccgttttcagccggaagaacctgtgacttgtcca

SEQ ID NO: 6746 - DNA, 4818 bp, Unknown
  gut microbiota DNA sequence
agagacatttactgaatatccctagaaaaatgtgtcaaaagtgagttccgaaaaaaccgactttacttttgacacatttattttttatttcttagtcaggtatttcttgctcaaccattttcttaccggttcgtcatacagtttaagacaagcgtaagccagcaacacattccatgcacatacacacacagctacctcccaagtttcacccaatgtgaaatattcattcttgatgagccaagcataaaacagatacataaacggataatggatgatataaagtgggaaagaaatatcaccaaggaacttgcagatacgggtggatgttttatctgtagtgctgcccgatgctcccaaccataccaacgccggaaaaacgaagataatgcagaacatctcgaacacaccgttcataagtatcggctccgaaccttccacgaaaggaatatgaaacaaaatcagcaacacaatcgaacatatccagaaagctcctctaattttcaccggtttaaaacaacgcgacaacaacatacccatagaaaaaggaaacaacatacgcagcaatccgcccacgaaattgactccatccaatgtccagcctacaccgatacttccataaccggcggcatcagaacaagcaaacattgtcaatgcgatacccaatatcacgaccattaccgtcaatgccttggtagaaaacttatgaataaacaatgcgtagaagatattcccgatatactcgaaaaacaaagaccatgccggaccgttaagcgggaacatctcgccatttccacgcacctcatatcctgcaccgggcacagcaggaataaaaaacatggcacacaaaagagccaccattactaaagaagtggctacatgacttccgtcccactgcacactgccctgaatgaaaaaagtaattgcccccaacactgctcccaatactaccataggatgcagacgcaccagacggcgcttgaagaaattcttcaccgtgagtgtctttccccaacggtcatcatacgcatagccaatgacaaaccccgatagaataaagaaaaaatccacagccagataaccgtgattgattgtctctatagaggttcctccggcaaaagcataaccttcgaacacatgataccatactactaataaagccgcaacgcctcgcaacccatccaataagtcataatgaggcttcgaatctgcaaatgacgcagaagaagagattttttgcataataaaaccaaatgttaaataagtattttctaattaaaggttgtttttcatgttgcaaagctatgcttttttaggattaaaaaaattgttctgagacaaattagcctatatatcgtatcaatcagtaatattttccatatattcccgatgaataatgatggaattctgcacatggacgaaaagacaccgcacatacacgccactatcgtaccgatagtgaccggagagcgcaggaaagcccaaaaagaagaacagaacgggaaaaagaaataccgcaagaagaacacacaggacgtgcggctgtgtgctgacgatgtcatggcaaggcacaagcagaaacactatcaggacacctacgcacaagccatgggcaaatatggcttgcaaagaggaatagacggttcactggcaaaacacatctccaccatgcaatactacaaggagctgatagagcaacaagacagtctgcaggagaacatagaaaccctgctgggactggaagaggaatcgcaaaagaggttgaagcaagtctagggagaaatcaacacgcagaagatgaagaatgcggcggtaaacgccaccacagccatagcagacggggtgagttctcttttgggcggcagcaaggtcaagaggttggaagcggagaacgaaaatttgagacaggacatagcctatcgtccagaccgaacgcagaaagaagaagtcggaaaaactggtgaagaagaactaccgcaagaagccgagcggtgcagcacggctgtcagccaatgacatcatgacccggcataagctgaaagcctatcaggacgggtatgcactggctatggcaaaatacggattgaaacgtggcattgtcggctcggaagcccggcataccaccaccgcccaatactaccgtgacctgctgaaccagacagaggacatacaggaaaatatcggtctgctgcttgccgaaaaggaacgggcggaaagcgagctggctaaaatcaaaagtgaagccagaaccgagcaactgaaaaacaaggctacggatgccatgacagccattgccagcggggtctgttctcttttcggcagcggtaagctgaaggagctggaacaagccaacggaaaactacagggtaagatagacaaacgtgacaatcaaatccgtctgctgaacgagcacatgaggatgcaggaagagcgtcatagcacagagaaacactgccagcaggagatacaccgacaggagctgaacatgaagatgaagaaggcagtcatttcaaataaaggatgcggtctgcaagattgaggacgatttgactgaggaacacaagttggtgctgaccataaaccgacagcccatagtacaatggtttaaggaacaatgggaaaagttacagcagaatctgcgtaactcggtgcagatagaacaaaaaaacagaggattcaaattataaattcgttcaacataaagcaaaatctcgattaaatgactaattttacatttgtgtagaatcatctacccaagaatagaaatcaaagaaacggtatgttcatctggttgcttaggatgaagcataattggctcacgtttctcatcatccatttagccactcaaatggggccaatagagtatatgatacgaatatgaataaattgttcatgccttttatggtgattatctgcctgctcctgacggcttgcgacaaggatgaagtttcgccagccaattccatgaagtggtcgtatgaaatccttacgcccgcaaacgtcaaatttttaaaatccactgcagaggtttcccctgcctatttttttgagacgaatggcaagggaggtgatatggtaatgacttgcgagaattttgacgtacttaaccccatatcagctgattcttacgcatacgattgtggatgggccaccctcaaggtagaaggcaatcaggtgaaaattcattttcctccatcgacttctgacgaggttgcacacgaagagattcagatttcagccaatgatggggaaagaaaagcttatacgcttatctgtttatccagagctattaacaatgatggaccaacagacccccaaccggaggagttgcccgaagaagtgaagttcaaaatgattatggcagaatatactccctttatgagaattgaaagtccgctgccggcacctctcgatttgattaccttccgaatcacggatataaacggtgaatattcacccatagacatccctgagttcacacactattatgattctattgtgtggagcgcagatgattttcctcacacattcaaagtggctgaaaacaaagtttctgcagaaagcgctgaaacacatatcactacacaatggagttcgcacttcttcaagagcggtacggtaaagagccatctgaaaggctaccgcgatggaaaagtggaatatgaaacttcgcatcgcatcacgctttatgaccgcgattttttgggacttgaatggggcgcaattaatctacagaagcctacgaatctgacggcctattgtctgttggatcgaaattatgagtacaagttgtatgacattgttgccaagggctataatccttattctcgatttgtcccagtaaaccataaattgctgccggatgcagactttctgccgacaactaaaaaggcagtcatgatactgatggaaaacagtcttggtactggagaaaatgccaacggcaaagaaagtctattcaaatgtctgcctgaaaaaggtgtagtggctgaaaggtattgggaaaacgaaaccacccgcatgctgatgttgcatcggcttcctgatgaggagggattggcagaagaaagctattatttgcatatcgaacctaaataagtatttatgaatagagtaattatcacattcctattttttatcggaatagccgtatcatcttgcacaacctctaaaagcgttgtgtcgcaaaatgcagatttgtctaaatatgaatatgcctcaatcatcaacaatgacacctatcacattcctgcccaactgatggaatacgaaatacagttgtttgatgcagtagaaggctctcgtcttacgttggtcagtgatatgcgtataaatgagctgactgcaacacaacagtcaaaactgcttatggtaaaatatggggtagatattttagaagaagaatccattgtaactgtgaatttcatagatttcctcacgggtcgcccgatagcttcatgtcgtggtgcatacagtacattaggattgagcgtatctgcagacattagaggtgctataaaacgtgttgccaaacaaattgaagccacatttcctaagtaatgcaatgccacttaaataactaaaggttgcctatctaatgcattcgcatgtacataggcaacctttgatgtatctttttattttaagaaaaaatagtatcttgtttaataaaccccagcaaaaaatcatttcttaaataacacaaaaacacccagctttacattattgggtgtaaaactgggtgtttgttttgcaatttgctgattttcagcatttatcgcggagagacagggttttgaacctataactctaaccgcttat

SEQ ID NO: 6747 - DNA, 4708 bp, Unknown
  gut microbiota DNA sequence
aattgaataaaatctatattttctctatataaggagcttagaaaggcttttcatgcccctcagaaggtgttctgaggcccgtatcacctctgtgtaagaggtgatacaaaaagtttgattcattttattgaatcttttataaaattgccttccaaaggggtgatgacgcgaagcgtacttgaacatgacgacaaacaaagaaaaagtgcagccgatcaaatggttcgcagcgaaaacaaaattttctgcagaaaagaaaatcaagcaattcttggaacggttgggtatagagcattatatacctttccgaaccgttataaaagaaaaaggagggaagaaagtcaaagtagaaaagcccgttatacccaatttaatatttatccattcagattataacacttgtctttcattggttaatgaatataaattatccatgaattatctcctgaacttggagacccgtcaactgttggtggtccccgacaagcagatgcaggattttatgtttttgcttgatttttcggaagatgcagttcaagtgcttaatgaaaaccttcgtcagggtgaccgagtgcgcgttataaaaggagaatttgcgggtatagaaggcgaattgattcgcatcaaagggcataagcgggttgtggtgcgtttggaaggagtgttttctttagctactgcctacattccgggggcctatttggaaagaatatgattcctctttgaacttttttaattaaatcacagaactatcattttttgaatgataattaaattatatctagaaaataaaactgtacagaatatataatttatgaaaaaacgttttttaagcatgcttcttatggcagtgttgttgatgtcctgcaacacttccaaggagattctctattttcaagacatcaatgtaaatcagcctgaggttatcagtggcgcacgagacattaccgtgcagcccaaagaccagatttctatcattgtgtcaagtaaggacccgcagttggcggcattgttcaatctgacaagggctcagccgcgtatgggaatagaaggttcggtaagcagtgggggggaggtatctggctatacgctggatgacaaaggaaacattgactttcccgtattgggcacacttcatattgccggtatgaccaagagtcagattgctgctttggtgaagcagaaattgatagacgagaatttggtaaaagaccctgttgttacggttgaatttatgaacctttatttctcggtgttgggtgaagtaaagtcaccgggtaaatatagcattaccaaagaccaaatcactttgctcgaagccatcagtatggcaggtgatttaagtatttacggaaagcgtgatgctgtgttcgttatccgtgaagaaaacggagagcgtgtcactcattgggcagatcttcgttcgaaagaggtgtttaattctcccgtttattatctgaaacagaatgatgtgatttatgtacagcccaacaaggtgcgtgccggacagtctactctgaacgaaaacagcgtgaagtctgtttcgatgtggatttccattgcttctttcctcacttcattgggcgtgttgatatttaagtaatcttttacattatattataatatatatgatagaaaaaaaagctgccgtcggcaaacctaccgacgattttatacggatacaagacctgtgggggctgtttgttcccaaatggcgctggtttgttctttctctctttgtcaccatgtctgtggcagtgttgcgtctgatgagtactccttccatctatacccgcagtgcggcaattttggtaaaagacgattctaaaagcggctcttcgggtggagccatgagcgaattttccgatatgggtatattcaggtcaaataccaatatcaataacgagctgttcacgttaaagtctcccgcattgatgaccgaagtggcccgccggctgaggctgaatgaaacttacactgtgcgtaaaggacttaaaaatgtagatttatataaggtaaatcctgtggcggtgacattttgtgaagtgatggaaaaaccggtcagcttcaccattcggattgattccaaggatgctttcaccatttccggtctgaaggttgccggagcggaatcggaaaatacctttgccggcaggatgggcgactccatacagactgcagcgggaactttgttcatttctcctaccaaattctatagcgatgcctgcatcggcacttccatccgttatgccataggcaaagcagatggtgccgccaaccgctatcttaatgcattgcgtgtcgaattgggcagcaaggaagcaaccatcattaatctgagcatcaacgatacatccatagccagggcagaagacatactgaatacactgatagaggtgtacaacgaaaagtggatacaagacaagaaccagattgccgtcagcacctctcagttcataggcgaccgtttgagtgtaatcgaaagcgagttgggacatgtggacgagaatatttccagcttcaaaagcgaacacttgttacccgatgttcaggcggcatccagcctttacatggctcagtcggcagaaaacaaaaaagaactgcttacgctgaacacccagctttccaccgctcggtatattctgaaagaactgaaagaaaagagtctgagtcagccgttgcctaccaattcgggcatcgccaattccaatattgagagtcagataagcgagtacaacaatatggtgttgaaccgtaaccgattgatagataacagtagtgagaagaatccgttggtgaaagatcttgccagttctttgcagagtatgcagcgcaccattattcagtcggtagacaatctgatagtttctctgaatacccagatacgcagcatccgtcagcaggaagcaaccactaccagccagttggcttccaatccgagtcaggcgaaatacctgctcagtgtggaacgtcagcaaaaggtaaaagaggagctttatctttacctgcttcaaaagcgtgaggaaaacgaactttcacaggcattcactgcttacaacactcgtgtcatcactgccccccgcggtagcatggcaccggtttctccgcagaaaatgaacatattgctgatggcttttgcgctcggactggcagtgcctgcaggtgtcatctttctgaaagaaaacatgaacagcaaggtgcgcggacgaaaggacttggaacatctgagtcttccgctggtcggtgaaattcccttgtacggttgtgagaaaaagagcattttcggacgaaaaccgcttcgtaacaaacgtgtcgttgtggtggaagaaggaaatcggaacgtcattaacgaagccttccgtgtgttgcgttccaatcttgattttatggtatccaatactccggaagctacggcatttgctgtcacatcgttcaatccgggcagtggaaagtcttatctgtcggcaaatatggcaatcagttttgccctcaaagggaaaaaagtactgcttattgacggcgatttgcgtcacggctccctttctgcctatatcaactctccccaactgggattgagtgactacctgagcggacgtgtcggcaactgggaagaaactttggtgtcacacgataaatatgccaatctgaagatgattccggtaggtaccgtgcctcccaatcccacagagttgttggaaaacggaaagtttgccggactgcttgcacagctccgcacccgctatgactatatctttgtggactgtcctcccatagatattgtggcagatacacagattatcgagaaagcgacagaccgtaccctctttgtggttcgtgccggcttactggaacgctccatgctttccgaactggaaaatatttatcgcgaaaagcgtttcaagaatcttgccatgattctgaatggaaccgaacgtacccacggtcgttacagttaccgttacggctatcattacggttcttactatcatagcggtaaataatttttatgtggccgttctccagatacatatccgtatcttctaaaggtatcttgcagggtatgaccgattgtcacagccacctccttccgggggtggacgacggtgtgcgcactgccgaagagtctctccgtattttggaagagatggaacggcagggcattcgtaagctatggctcacccctcatatcatggaagatattcccaatactaccgatgctttaaagacccgtttcagaatgttgtgcgaaagttatcggggaaatatccggctggaactggcagcggaatatatgctggacaatctttttgtccggcgtttggaggcagacgatatccttcctctgcacgaagaaaaacgctacctgttggtggaaacctcctatttcaatcctcctatgagattgctttctatgttgaagcatattcgggagaaaggttatcatccgttgctggcacatcccgaacgctacgaatatatgcaaatggcagattataaagctttacagcaggcaggagtagcatttcagttgaatataccttcgttggcaggtatgtatggcaggcatgtgcagaaaaaagcggaagccctgcaagaggcagacatgtatactttgcgtggtaacgacactcattccttggttttctttcagaatttgctgaatgagaaaatcagaagataaaagtatataaaacgtctaggtgaggtg

SEQ ID NO: 6748 - DNA, 245 bp, Unknown
  gut microbiota DNA sequence
atgttcgccacgctcacggcatgcctcagccgttcgatgtccggctgttcggtgcctacggcaatgttgttcgcgatggtatcggaaaatatgaatccgtcctgcatcaccgccccgctctttgccctccacaggtgcgggtttatcattcccagcggcgtctctcccagcctgatgctccccttgccgggcgtgtagaatcccagcatcagcttgaccagcgtggtctttccgctgccgctggc

SEQ ID NO: 6749 - DNA, 352 bp, Unknown
  gut microbiota DNA sequence
tgcgggtttatcattcccagcggcgtctctcccagcctgatgctccccttgccgggcgtgtagaatcccagcatcagcttgaccagcgtggtctttccgctgccgctggcccccacgatggcagtcaccttgtgccgggggatgctcaggcacacgtcgtccagcacgtagtcccggtccgcgccgtcatagctgaaggacacgtggctgagcgtgatgtccctcttttcgggcagggcggggagcttggaggcgatgtcctgctcctcgtcctccttcccgtgtatctcattgagcctttcgaggcttatcttcgcatcctgcagctgctgtgcgaacccgatgaacgacg

SEQ ID NO: 6750 - DNA, 6644 bp, Unknown
  gut microbiota DNA sequence
atgaaattgttctcgaaaaaatatcccgaggttacttttagcaaaacatgtacaatcccatttgtattaccataaaaattagttttactaccggctttattcaaagcaaatgctccgccaattccagcatctgcatgccatcgggattttgtatagatggggtattccagataacaaaaagtagagtatttattggcggtgttttctttatttctgtcacgaccgaaaactatcgttgaccaagatattaaaagaggaaatctttccccacaatagtaattcaatattgcatctaaaaagcgtccggtactgtgagctttgtaattaaaaaattccttattattatatgtagcacctgttgaaaaattatatgtatcccacaaagccaaagaaaaacctttatactgaaatgaaatgtgattattaaattccttgtatgtaccctgggtattagttccaccccaaaaacctaagttaaacaatccattgcataaagagtaatttacatcgcccgtaatgaccagcccatctgctacctctattccacgccacagatggttcgtttgtaaattcgccttcatatgaagttgtgcagttgcctccaatgaaaacaacattagtaataaacctatgtattttttcataatctatcatttgataaaataatctggtaattgtggcattgccccattttgtgtacatacataagccgaaacatttactgccaaccgatgagcttcctctacagattttccctttaatattgatgcaataaaactggctgtaaatgaatctccggctcctacagtatctgccactattactttgggagtctcaataaaagaaacaactccaggagtaaagacataacttccattgactccacaagtaagtatgagcattttcaaattatatttggctaatagaatccagcacttatcctttaagtcaatacctggataaccaaacatacgactgactgcaatcaattcctcatcattaatcttcaatatattgcatttttgcatagaagtgcataggatttctttggtatagaatccttgacgcagattgatgtcgaaaatcttataagtcccttcatccggcatttcatccaaaaactggtgaattgtagtgcgcgacactatatttcgctgagaaagcaaaccgaaacagacagcttttgcacgttgagccaaccccttcattgaatctgtaaaaggaatattatcccatgccacattttcccgaatatcataatagggaactccttcgttatccagttctacttgaactgtcccggttggatattctacttttgaaatgtgatgattcaaaagcttcccatcgaaatcgctgagaatttcattacccaacttatcatggcctactgcactaatgacaagactatttaaaccaaactgagatacatgataagaaaaattagcaggtgccccacctatcttttttccatctggcaatatatcccaaagagcttctccgatacctattactaaatttttcatgatatgattatttaaggattttgcaagtgtgcctgtacttgacaggcacactctaaaagtgtattcaattaaaatttcaccactgattttacaatattagccttatcctgtacactgctatccattgcgtgctggatatcaccgaaatcgaagacattggtcacgattccctttaaattgactttacccgatgctacggcttcaatagccataggataaatatgccggtatcggaacactgtcttgaatgtgagttctttgtccaatgccaagctcaacggaagagtcatttcaccactcttggaatatcccaccaatacaatggtagcaccttttttagtcacgtgaatggcttgacgggtggttatctccattcctgctgtctcaatcaccaaatctatcccctttccgttggtaagttttgccatagtttccaacacatcttcttctttagaattgatgacaccagtcgctcccagttccaatgccttgtccaaacgtttctgcattatatcgactacataaaccttagacacaccttctgccttcaaagccatcatggataccaatccgatacagccggcaccgaaaacaagggctgtttgtccggcatgtgcattcccttgattggctgcatgaaagcctacagccaagggttcgatcaatgcaccttccaaagtagagacattttcgggcagtttgaagcaaagatcggcttcgtgagctacatattcctgaaacacgccatctaccggaggagtagcaaagaacaccacatcgggacataaattatactttccctcacgacagtactcgcaatgtccgcaagtttttccaggttccaaagctacccggtcacccactttcagatgtttcacgttctttcccacttcgaccactgttccacccggttcatgtcccaatacgaagggaggttctaccacataatcaccgatacgtccggtttcgtaataatgcatgtctgatccgcaaatgccaacatattccaatttaaccaatacttcattgtctttgggctgaggaatatctctgtttgtataacccatttgaccaatgccgttcataacggctaccttcattgtacctttcataatgtaatctcctattatttaaattaaaatgatgtcaattgttttagatagtcttcaagttccgcttgagtaggcatggctcgaatagctcctttacgagtagtttccagtgatgcagctgcgttagctcgaaacagcatttcctgtagctgatggtcagaaagctccatgccttgctccaaaatataggccaaacagcatccaagaaaagtatctcctgcaccggttgtatctatggttcgattggtgagaaatgcctcctggtatacctttcgatttcccataaatgcctgactgccggcttctcctgatgtcacaagaatcaaagaaatagaataatgtttctgcaaaaagtccactccattctgaatagtagtttgctgggtaataaatgccagttcactagcttccacttttaaaatatcacacacagaacatccatacaacatccacttgcgggcttcctcttcaccaggccataacacaggacggtaattggggtcgaaggatattaaccgatgttttgatttggctgctttaatagctttacgcgtagcttttctacatcgtttatgtgtgaacgaaagggaaccaaaatggaaaatacgagtgcgtgacagcatatctgcatccacatccccttcatccagattcatgtcggccgtacgattgcggtaaaaaagatattggtggggataagttttcgagtcattcaaaaaagccaaagtagtattccttttcttgtctttcgacagcccttctgtagaaatacccatcctaacaatgcgttgttgcaaagcatgtcccaaaaagtcatctccgacttttcctataaaagctgttcgtttctgcagattgcttaacatggccaagacattgcagggagcaccaccagggtttgattcatacaccacactatcaaaatcattggaatgcaaggcgttgaaatcaaccaacagttcgcctaaagcgataacatcatattctcgctgattctttttgcgtttcaggaacctatatttaattactgccagaattcgattatagcttcttttatcaagtttataaaagaacaacgcaagtgcagtcactacccataatattcctggtatggtactgaatgaatgcctcataatagctacaacggcttcattctgtgtggtgttagcttcatagccggcccatcctaatgacaatgccagtaacgcagtacccaatgccatgccaatcttattaccgagagaaatgaaagcatattggaaaccatcattccggatgcctgtacgccattctccatattccacacagtcaggaataattgcatagattgcggtattgaaaccggagaagaagaattgggaaagtgccgcaaataaatagaaaggtatgggggaggtcacaggactgaaaaagaatagtgcaattatggtgatacccgtaccaaaggcaaacacagaggctgcccaacccttgttggaagtcaattgaaataccttcggaaagcaggctgctccaatgatggatgggatgatgatggccatagaataataggtgaacaatacagcatcattctccacataggtaaaataatagagtaaatcggcgttccgcccgtaaaggataaatccaaacagcacctgtcccaacaacgccaacaaataaggtttgttcttagcaacggcctgcagttgcaatcgtaacggaattttctgagcaacaggcacttctaccacctcttttgtcttggcaaaacaaaagatatgacagacagcgaagatagttccataaagaattgcaatcagcagatagccttgccgggcatttccattacccaaccattcaatcaatggaatcgtaatgatgttgataattccaatagctatcatagcgctaaccgaccgggaagtattgatttgtgctcgttcggtcatattctgagtcattgcaccacacaacgttccatagggaatatttacacaggtatatcctaagaccaaaatacagtaagtcacagccatgtaaatgattttatgcgtctgactccagtccggatgtgcccagaaagtaagaatcagaactaaagcggttaacggagcagcaaacaagagccaaggacgatagcgtccccatcgggtatgcgtcttatcgcttagccctccaataatcgggtcgttgatggcatcccagaaacgggaaaataacatcaatgtagctacggcactcatactgattccaaaaacatcggtatagaatatcatcaggaaattcccgacaaacatccagctgaaattacagccaacatctcccatgccataagccaacttgcttatgaaaggaactttcgattgattcaaatcgtttttcatgtgtattgcttattagattttaatgatttctgaaacaaaactatacactggaaatcagatgaaaaataaattttatacatttatctttcgcaaccgttcccgcaaccgttcccaaaatccgcaaccgttcccaaaaacttgcttttttttcatatctttgtagcgttaataaaaaatgccgccatgaaatacactaccatcatcgacatagcccaagctttgggcatttccaaatcgaccgtgtcgcgtgccttacggggcgataagcaaaatgtcagtaaagaaacacgggaaagaatcttggcgatggccaagaaaatgggatacacccgcaatgaactggccgtcaatctgcgaaaacaaagcacgcgcactatcggtatagtggttccggaaatgctgactcctttttatatgaatttcattacctatgcccaacaggaattgaatagacagggatatcgggttacattggctcagtcacatgaaaatccgaatgcagaactggccaatctacagatgtttgaagactatcgggtagagggcattctcatcagtgtctgtcatacagaaaagaatcttgcaacttatcagcgaattatgaaaaaaggcattcctatggtcttttttgaccgcaccttgtcttctttgccaatttccaaagtgaaaatcgatgattatctaaaatcgttctttttggtcgaacagatgatacgtagaggaaaaagaagaattgttcacttggcaggacccgactatattcaaaactcccaagaaaggaaacgtggatatcgggatgccttggaaaaatttcatcttccttattgtccagagtatgtcattgatgctggagtcgatttctctggaggtgagcaggcagtggaacaattattgaaacaacacattgctttcgatgcactattttgctttacggaaatgtctgctctcggagcaaaaagcaatcttcaaaagcatggagtccaaatacctgatgaggttgccatagcttgtatttcgggaacggatttgtgcgtattagttcatccatccattacagcagtcgaacaaccagtaaaacaaatggcggaagaagcatcaagactaattgtacaaaaagtagagcacccggaactacctgataaaaccattatattagaagctgagactatttatagagaatctacataaaatatttaagcaaacaaagcaaagaaaaagaaggtgtatcgtcattcgctcaccttctcagtgagaatcctttttttgcagataaagaatgcatggccataatatgctttatacttactatatagctcagcctcacgatgattggatgttatcaattcttctacgattctgcttcctgcatgttttcttctgaatatttcttcggctttagcttgaggagcgaaataatgttctatccagcaatttccactcttttaaaaacctattttacgtttcaaataaatcatatcttttagtaaaaccccattgtcaatgataggatgatcgtagttctccgtgaaaaaaccttttatacaatgagaatattcaaagccgcaacttttataaaatgcaagaacaccgggaacgtctcctgttcccactatcatctgagtatattcttttgaataatg

SEQ ID NO: 6751 - DNA, 564 bp, Unknown
  gut microbiota DNA sequence
aaggagtgaagcacgtgcagcgctattccaccaagccgggaatgattatgacagacgacagctttcagggaatggtactgaaaggtgtttctcatgaatacgactggaggtttttaaagaatcatttgcaggaaggggaaattcctgttttctcggatactgcctctaccaataaggtattggtgtcccgcactattgccgacaagcttcatctgaaactgggtgataaaatctatacctattatatagaggataatgtgcgcgcccgccgtcttactgtcgccggcatctatcagaccaatttttccgcatacgatgatttgtttctgataaccgacttatatacggtgaaccgtttgaatggctggcagaaagggcaggtgagtggtatggaactggaagtgaatgagtatagccggttggagccggtgaaggaggaaatccgtgcacgggtggatacgcaggtggatgcatacggaggtacttactatactcagacggtggaggaagtcaatcctcagatatttgcatggctggatttgctggatatgaatgtgtgggtta

SEQ ID NO: 6752 - DNA, 2431 bp, Unknown
  gut microbiota DNA sequence
caacattccgaatggtgctgagaactttattgggaattttgatctcgctattgaaatcatcgatataaatcgtgtatttctgtgcggatacccctaaggatatcagtaatgacaggcaaattaacaggactttgtttttcattacgtcatggatttgtagggtttgtaatgcagttgtatgacgaaattaaaaatattgttgcttatttgcaaacgaatagggttaaaattacccatcaagggagttatttttgagataagatgattgagtgactgatataatgtttatcttgtatctgtaaaagcatagtggagcagataggagtaaaggcgtagattctaaaaagggagagagggcttgtttctggattgttatccccaagggtcaagagaaataatggcattgtgattacctgactgaaaatatgagtataaataaattcttaaaaatgatttatgattagacgaatagtattatctatcttttgttgtttattggcctatccttttttagttgcccggcagagggattggtcgcttcctacccccgaagcagacttgccggtggccttaattccttatccgaaagagattgtgagactgaaaggtgatttggccttttcttctttgagaattgacgaactttctatggcaagtcttcgggataaagaacgtattgtggctgagtttggagatgttcgtcgtttttggcaaatggatgcaggctcgcgcggtaaacaacctttagtgacatttcgtcagataaactcccctttgtcgagtgcggaaagtaaagaaggttatactttaattgtatctgagaaaggagtggaaatctctgcaggggagttttccggttttttcaatgcgctacagactgtccgtcagctgatacgtaaagataataaaaagtatagtatgccttattgccggataaaagacgcgccggcatttccggtcagaggattaatgttggatgtggggcggaattatatgtctgtcccgtttctcaagtctgtggtacggaggttgtcgcattataaaataaatgttctgcatctgcatctgagtgatgatccggggtggcgggtggaggttaacaaatatccggaactaacggtggaaacctctttctggcctaccagacaacccgggaagttctatacacaagaggatataaaatcaatatgcgatttttgtgattcgttgaatattcgtgtgattcccgaaattgatatgccgggacatagtgcggctttccggaaagctatcggtaaagatatgcagacgcccgaaggcatgcaagtgttgaaagaagctttggatgaaataattccattattcaaagattctctttttcacattgggtcggatgaagttcattttaaaatgaaagagtttatgcctgaaatgattcgatatgtacgcagcaaaggaaagcaggttgttgtctggtatccgggctatgcacctgacagtaatgctgttcgtatgtgttggggagagtatgaagcgggctattcgctcgataagtcggcgccgtatatcgattgcaatggcttttatatggattggatggattcgcaaggaggagttttgcagacattttttcagtacccgtgtgaagttccgcaagctgggggtaaggctttaggaagtgagatgtgtgtatggacagatggggtaatcagctctgatgaacgtattcttctgcaatatcctttttatcctaccatgttgactttctccgaacgtatttggaggggaagccgtgaaaaaaggcgtgatttagtggctaatcttccggcaaaaggtacaaaagcatgggaagcctttaatgaattcgaagataggcttatttatcatcgtgaccggtattttaaatcaataccgtttgcctatgttaaacagtcggaaatgaaatggaggcttatcggacctttcaatcatcatgggataaatgatacttcttttgaacccgaaaaggtgattaaggagaagtatatcgttcggaaagatacgctcacctggaatgatacggtagcttatgggggcgagattcaaatcagaaccctttacgcaatgtttaacatgcataggaaccaatatcgattggattttctgccgactgtaatgtcttcatcggtaggtaagaaagacggaacttgttatgcgcttacgcgtatcaaaagtccgaaaaaccaggaggtttatttaatgttcgggttgaacggaatgtgggggcactcgggaggttatcgttcggcgcgtgcaccggaacatggcagttgggattttagtggaggagatgtatggctgaatggaatacgtgtgttgccaccctctcgctggccttttgagagtctcccatggacaggatgggggaaagggcgtattgaggctcagtttgaaaacttgggggaattagtta

SEQ ID NO: 6753 - DNA, 2022 bp, Unknown
  gut microbiota DNA sequence
ggacgcaagactgcatctttttatcaaaagaaagcatcagctcttcatcaaaaagaaataaattacctacttttgcagaacaatatgaaatacaaaccaacattattataaaccaaagacagcaataatggcaaaaacagagcaaacaggtctttatgacgcaaccaacgaacatgacgcttgcggcgtaggcatggtagtcaacattcatggcaacaaatcgcatgaattggtagactccgcattaaaggtattggaaaacatgcgccaccgaggcgcagaaggagccgataacaaaaccggcgacggagccggaatcatgctacagattccccacgaattcatcctcctgcaaggcatccccgtacccgaaaaaggaaaatacggaaccggactcgtatttctgcccaaagacgaaaaagagcaagccagcatcctgagcattatgattgaagaaatagaacgcgaaggacttaccttgatgcacctgcgcaatgtgcccaccaaccccgcctgcctgggcaaggacgcacgggccaccgaaccggacatcaaacaggtattcatcaccggagtgacagatgcggacagcctggaacgcaccctctacatcatccgcaagaagatagaaaagcgcgtgcggcacacggacttctacatcgtttcgctatcggcaaaaaacattatatataaaggtatgctctcgtccatgcaagtgcgcgagtacttcccggacctgacgcaaccctattttaccagtggattggcattggtacactcccgtttcagcaccaacacatttcctacatggagcctcgcccaaccgttccgtttgttagcgcacaacggcgaaatcaataccatccgcggtaaccggggttggatggaggcgcgcgaaagtgtcctttcctctccggcattgggggatgtcaaagacatccgtcccattatccagccgggcatgagcgacagcgcctcactggacaatgtgctggaattttttgtaatgtcgggactgagcctgccccatgccatggcgatgctggtacccgaatcgttcaacgacaaaaaccctatcagtgaagagttgaaagcgttttacgaataccattccatcctgatggaaccttgggacgggcctgccgcgctgctgttcagtgacggacggtttgccggaggaatgttggaccgcaacggcctgcgccctgcccgttacctcattaccaataatgacatgatggtagtggccagtgaagtaggcgtgatggatttcgaaccgggagagattaaagagaaagggcgtctgcaaccgggcaaaatactgatgattgataccgaacaaggtaaaatatattatgacggtgaactgaaagaacaactggcgtcggcccgcccctatcgcgcatggctgtctgccaaccgcatcgagctcgataccttaaaaagcggacgcaagatagacaaccggatagacggctatgaccgtatgctgcgtactttcggcttctcgcgcgaggatatagaacgcaccctcatgccgatgtgcaacacaggggccgagcccatcgcctctatgggtaacgacacgccgctggccgtcctttcggacaggccgcagttgctgttcaactatttccggcaacagtttgcccaagtgaccaatcccgccatcgaccctatccgtgaagagttagtcatgtcgctcaccgagtacatcggggccgtgggaatgaatatactggtgcccagcgaaagccattgcaaaatggtacgcctgccccatcccgtgctgaacaacacccaactggacatcctctgcaacatccggtataaaggattcaataccgtgaaactccctatcgtattcgaggtgagcaagggaaaagccggattgcaagaggccctgaacgacctgtgcaaaaaagccgagcaatccgttacggacggagtgaactatatcattctgagcgaccgttttgtggacgacacccatgccgccatcccgtcgctactggcagttag

SEQ ID NO: 6754 - DNA, 2682 bp, Unknown
  gut microbiota DNA sequence
cgagattcgcgaggtgatgcacgccgccctgttgctgggatatggcgccagtgccatcaatccctacatggccttcgccgtactggatgaactggtgaggaaaggcgatgtgcagatgaattacgaaacggccgagaagaattatatcaaggccatccgcaagggcttgttcaagattatgagcaagatgggcatttcgactatccgttcctaccggggcgcaaagatttttgaagccgtaggggtcagcgaggaattgttgagaagctatttcggcacacagacatccagcatcggaggcatccgtctggaagaagtcgccagagacgccatcgccctgcacgatgccggattcgctgcaaaagaagtgagcgacattttaccgcacaacggactgttctctttccgcaaagacggagaacggcacgcttggaatccggaaaccatctccaccctgcaactggccacccggctgggtagctataagaagttcaaggaattcacctccatggtagatggaaaagagtcacccctcttcctgcgcgacttcttcgggcacaaacgaaaccctatcgatattgaaaaggtggagccggtagaaaacatcgtgaaacatttcgtgacaggagccatgtccttcggcgctatcagcaaggaggcacatgaggcgctggcactggccatgaacaaactgggcgcacgcagcaatacgggtgaaggaggtgaggacagcgaccgcattaccggcacctaccagggtatctcactttgcagcaagaccaagcagatagcatcgggacgcttcggagtcaccgccgaatacctggtccatgccgaagagatccagataaaggtggcccaaggcgccaagccgggagaaggaggacaactgccgggattcaaggtagatgaggtgattgccaaaacccgccactccattccgggcatctcgctcatttcccctccaccccaccatgacatttattccatcgaagatttggcccagttgatattcgacctgaaaaacgtaaacccacaggcacgaatcagtgtgaaactggtagccgaaagcggcgtgggaaccattgccgccggagtggccaaagcgaaagccgacttgattgtcatttcgggagcggaaggaggaaccggcgcgtcgcctgcatcgagtatgcggtatgcaggtatctcgcccgaaataggactgagcgagacgcaacagaccttggtgttgaacggactccgcggacaagtgaaactgcaagtggacggacagttgaaaaccggacgggatattatcaacatggccttgctgggtgcggaagaattcggtttcggtaccaccgcattgattgtactgggatgcgtcatgatgcgcaagtgccacaccaacacctgtcccgtaggcgtggccacccaagaccccgaactccgcaaacatttccgcggacactatgaatatgtagtgaattatttcactttcctagcacaggaagtacgcgaatatttggccgaaatgggattcacccggttggaggatatcattggacggacagacctgattgaaatacaacaagcgccaagtgagaagaaatcctcactattggatttcagcagactgctacaccgggtggacaacggagctaccatacaccatgtcatggaacagaagcacgacattgcccatgtgaaggatgtgaccatactggccgccgccagggatgccatagaaaacggaaaagaaatttccctggaatacaccatcgccaatacggaccgttcggtaggcgccatgctggcaggagcggttgccaagaaatacgggcaggcaggacttccggaacagaccatccacatcaaattcaaaggttcggcaggccaaagtttcggtgcgttcctgacccacggcatcagtttcaagctggaaggcgaagcgaatgactatctgggaaaaggactgagcggcggacgcattgcggtactgccccccgtgcgcagcaatttcgatgcggaaaagaataccatcgccggaaacaccctgctgtatggcgctactgacggcgaggtgtatatcaacggacgggtgggcgaacgcttcgccgtccgcaattccggtgtgacggccgtggtagagggtgtaggcgaccactgttgcgaatacatgaccggaggacgggtcgtggtactgggggaaaccggacggaatttcgctgccggaatgagtggcggcgtggcttacgtgtggaacaagaaccacaacttcgattatttctgcaacatggagatggtggagctctcacttatcgaggaggcatcttaccggaaggagctgcatgaactgatccgtcagcattacctctataccggttccaaactggcacgaacaatgttagatgactggaatcactatgtggatgaatttatccagatagtacctatcgaatataaacgagtattgcaagaagaacaaatgcgcaagctacagcaaaaaatagctgatgtacaaagagattattaacgacaaaagaaatacaacaaagatatgggaaatccaaaagcatttttaactattccgcgtcaggaagcgggctaccgtcccatccacgaccggatatcagattatagcgaggtagaacagactctgaacagccgtgaccggaaacttcaagcctcacgctgcat

SEQ ID NO: 6755 - DNA, 243 bp, Unknown
  gut microbiota DNA sequence
gattcacgcagaattcctcgtgctccgcgctactcaggatactactatgcttcgacaacattcgaatacgcaactgtcatgctctatggtctttctttccagaaagttcttctctgctgttttcatgcaatgtcgtagtcctactaccccggttatgccgtaacataaccggtttgggctcttccccgttcgctcgccactactgggggaatcattattattttcttttcctgcaggtactaa

SEQ ID NO: 6756 - DNA, 3696 bp, Unknown
  gut microbiota DNA sequence
ttgcacttgccttgtgatttttcttctcaaaaagttttaattatcaaaactttgtgtaaatttgcagcgaaaagtgtatctcttactaagagatgcactttttttcttctttctcctaaaatcttattcaccacatacccaacagattaagtaccatcaatcatttgtttcacacccaacttgaaaatcttaacagatgtcaatgtatcataatgaaaagatcttgaagttttcaaaaaagaccaaagagtttccgaaaaagaattaagtctttttcaaaaagaccaaggtctttaagaagaagatggaattatgcagatgagagaaattccgtcagtcaggaaagttgaaacaatctgctttcacacataacaggtactgaaatctcctattcatgagggttctgtgtgaaagctatttttcttccaatggcaaacttgcgttttgttttcatgagagaataagaacttcaacgaaattctccattttttaaactgaatcttgatgctatgaaacagatatcggaaaaaaaagtggtggcagcactctttccgaataggaaagaaagtactgccaccacctttttcgtccttgtttatggttttccgaagaaagaatctgttacttatctgccgggacagacagaattttagtatatccttctttatcttttaatgtttcgatagccttagtcagatctgcatcatctttcatgcgttccaatatcacgccacgctgaaaataatgacgtttcactatttcctcagcaatcgctttccttatctgtttggagaaacggttcaactcatggtcaagattatgcgtcagtttcttttccagcgctgcaaactcttcggatgctccttccatgtatccctcaaattcggcaatctccttcaagttcttcagcgacttctcactctgacggtcataggtgaaattacgcttcttcaacatttgcttgaaatcatcgtagtcggcatccgtcactgagaagtctttcacttcaccgatgttgggatgcttgatgcagtattgggtggcgtaatcaaaaatcatatcatcattcagcagatagaacatgatattggggaaacgctccgccttgacttccacatcgggacggataccgccgccgtcgcgcacctcacgtcccgctgccgtgtgaaatacagtagtcaggctgtcggggatgcgtgccaccgaaccgtcggcattgcgtttggcataatcgatggcctgaatacaacgtccgctgggaatgtaatatttggcagttgttaccttcatgctactattataagggagttcacgcggcacttgcaccaagccttttccataggtgcggttacccacaatcacagcgcggtcgaggtcttgcaaagaaccggaaacgatttcggcagccgatgccgtagcgccatccaccaacacggtcaaaggaatttccatatctatcggctcattggatgtcttataagtactgccggcttgctttattttacctttggtcactactatttcttttcctttcggcacaaagaagttcaccacattcacagcttcgctcaatagtcctccaccatttccgcgcaaatcaagaacgatagaagtggctccctgctgcttcaactcaatcaatgctttctttatatctttggaacatccttcaatagcaaaagtactgatggcaatatagccgatgttcttatctaccattccatagtaaggaacaggattggtgcggatagttccgcgggtaatcttcagctccataggaatataagtactgtctgccgtaggtcgttccaatttcaatacacaagtcgtgccggggtcgccacgcaaattatcgctcacataagaggtcagttcgttgggtgtcctgtctccctgtgccatatccttaccgtttatctccataatgatatcgccagcctgcagaccggcttcggcagccggacttccttccgacggctctataatggcaacacgcttgcggggagtgtagtaacgaatgacagaaccgatacctccaaactttccactggtcatttctttcagtgtattatcctcttcgggataatactccgtataagggtcggtttgtgcaagcatcgcctcgatactataattaattaccttctcggggtcaatcgtatccacataaaacatatccagctccttgaataccgcattgaagacatccaggtttttagctatccgaaaattacggtcatcacctttgctaaagccgaaaagagcacttcccgccaagccgacgcacgctataaataataaactcttagtattccacttcattcttttatatatttgttaaccgcaaattaatacattattctaatcaggattgcagaagcgcctctatatttaactttatttcgtcccattttttctttgataaggttgtacccaccacttgtatcacattggatgccaaaatggagccgataatggaacatttctccaaagaataaccgcacgtgagcccataaagaaatccggcagcatagtaatcgcctgctccggtggtgtctaccactttcttcaccggcggaatctccagtttgatacattccgtccctttcttgatacaggaaccttgcgcaccgagtttcacaaccaccacactgcacatggcagaaatttcattgatggcttcccatgcatcttttcctgtgtaagcacgcgcttcttcttcattggcaaaaacaatgtcgacatacttatttatcaaagtggtaaagaaatccagttcctccgccacaatattatagctggccatatccagacatatctgtgcaccggcttctttggccaactgcatggcacggagaatcaaatcatggtcttgcaccaaataaccttctatatatagataggcatatcctttaaacatatccaatgtaagattttcggctttcatagttgccgccgctcccagataagtaccaaaagtgcgctccccatcaggagatataaaggtagaagcaactcctgtaggcaaatcaccgaccaacaaattcatgtctatcccacgcttcaaaccattctttttaaaatattgcccaaaatcatcttttcctatctttccgatgaagccgggctgcgctccgaggttggccaacgccaagaccgtatttccggcagagcctcccgttgccttatgagtcttcacatcagcaaatttatttctgattttcaaaaacttagcctcatctataagttgcatacttcctttgggcaaattcatttcatccaacagtgcatcaccttgcaaagtaacaagaacgtcaaccaatgcattgcccattccaattattttatccatttacctaaaatttttctgcaaagatattgcatatttcgaaaaaacctattatctttgcaccgcaattaagaaaaaaacattcttccttagctcagtcggttagagcatctgactgttaatcagagggtccttggttcaagtccaagaggaagagcgaaagaattaattgcaaattcttccttagctcagtcggttagagcatctgactgttaatcagagggtccttggttcaagtccaagaggaagagcaaaaaggttcgcagatgcgaacctttttttatttcttataaattgtgtaccaaagcggcaacaagccatatctcatccgacttcgccacgcatac

SEQ ID NO: 6757 - DNA, 23191 bp, Unknown
  gut microbiota DNA sequence
gataatctgtttataggatatatccgttacatctcctgctgcataaatacccttcacggaagtgcggccatttttgtcggtcaggatttcgcccatacggttcgtttctaccaaatccttgaataaagcactattggcagtcaaaccaatctgaacgaaaatgccgtccaaagcaaagatttcttctttatccgaagaacggtctttcttaatcataccgaccaccttatccccatcgcccaatacttcaaccgtctgggtgtgagtaaagatatctacattaggcagactcctgactttctcctgcaaaacggtatctgctttcagagtctccataaactcgaagaccgtcaccttagagcaaatacctgccaaatcaatggccgcctccactccggagttaccaccaccgataacagctacctccttgcctttataaaacggtccgtcgcaatgcggacagaatgccactccatgaccaatatatttctcttcgcccggaacattcaacttccgccagttggcacctgtagcaataatcagcacaggagccttataactttcaccacccttaaccgacagcactttcatttccccgactacctcggctttttctatcctgcgattctcaagtatatcaatatggtaagcagccaaatggcttttcaagtcctgtgccagttctttaccggtagtccgaggcacggatatcagattctcaatacccatggtctcattcacctgaccacctatacgttcagccactacagccacccgcagtccttttcgagcagaatatatggcagccgcagcaccggcaggaccgcctcccgctaccaacacatcatactctttcgtttcaaaagattccgaaaccgatgcaccataacgcacttcaagtttttcgagcaaatcaccgatattaccgcgtcccacatgaatctgttcgccatcggcaaacactgtaggaacagcctgcactttcatgcggttcacctcctcttcattcacagcaccgtctacagcttcatggcgtatctgaggattaagcaccaccatcagattcaatgcctgaactacatcaggacagttggtgcagcccaacgataaatatgtagtcagatttatcggtccgcgcaatgcacggatacgccgggtgataaactcatcgggaaaattcttacctttgccatcagcattaagtatcgccatcagcaaagaagtaaattcatgcccgccgggtacggctcggaaagtaatacccgtatcttccccttcctttaaaagaataaatttcaaaccttcgctctcttgcaaacgacaggagagtttttcggaacaagaagccacttcttccaacaaatccaccaactcggcacggctttcatgccgagggtggacaaagatgtcgaaagtatagtgcgcatccagttgggcaaatagcccctttaactgttcttttattgcgctatccaacatatttttcccaattgctttaaattttacctacgaggtcaatgctcggtttcagtgtctcggcaccttttttccactttgcgggacaaacttccccatcatgaccggcaacaaactgagccgcctccactttacgaagtaactcatcggcattacgtccgatgctgttgtcctgaatttcagccaatttaatcttaccttcaggattaaccacaaaggtaccacgataagccatgccatcttcctcaatcatcacaccgaatgcgcgagaaagagctccggtaggatctgccaacattggataagtgattttgcgaatgctttcggaagcatcatgccatgctttatgaacaaaatgtgaatctgtgctgacagaatacacctctacacccatttccttgaatcggtcatacttctctgccatgtctaccaactcagtagggcaaacgaaagtaaagtcggcaggatagaaaaagaaaatagcccatttcccttcgatatccttgttagtcactgttttaaactctccattgtgaaatgcctgaactttaaattcaggtatttgtgaattaataataggttccatacactttctattttaaaaatgaaattaatttttaaattgtaattattacatttgcaaaggtagtgcactgcgtttccctctgcaatacctaattattaggataatatagaacaacaatcaccataaataggtacagaagattaggtgtatttaaagtttttacgtacttttgcctcggaatttataaaaaacaacaagaaatggacgattcaaacccacgaacgtacagtatagtattaacttatccggcagggctctaaacagcacgcctgcaatgcctctgcccggaattaaaacaaacgaaaggaggcaataagatgagaaaatatctttattgtgaaaacggttttgtggaaaagccgcagtggatgcccaactgctgggtaaatgtagaatgccctgataaaagcgattttgactttctgaccaaagatttaaaagtccccgaatcttttttagaggacattgccgatgtagatgaacgaccgcgtaccgacaccgaggaaaactggttgctgaccattatccgtattcctttgcagcaacaaggaagtattccatatacaaccattcccatcggcattatcacaaacaatgagattattgtcaccatttgctatcattccactgaaatgatacccgactttatcgaccatacacgccgaaaaggaatagtggtgcgcaataagtttgaattgatattacggctgatttactcttctgcagtatggttcctgaaatacctgaagcaaataaacaatgatgtgacggcagccgaaaaagagttggagaaaagcatccgcaacgaagatttacttcgactgatgaagctgcaaaagacattagtctatttcaacacctcgatacgtggaaatgaagtgatgataggcaaattgcaaagtatctttcaggaaaaagattaccaaaaccctgatttggtagaagatgtggtcattgaattgaaacaagcatataacacagtaaatatttacagtgacatcttaacaggcacaatggatgctttcgcttccattatttcaaataatgtgaataccatcatgaaacgcatgaccagcatctccatcatattgatggtacctacattgatagccagcttttatggaatgaacgtagatgtacatgtagatgagttaccgcatgctttcagcctcatcatattaatatctatcatgctatcggccatggcattcgttatcttcaaaaagataaagtggttttaagccgaaaattactttactatcgttttgctgtcgtgtcggaatatatccgccacgacagataacgatacaataaattcataattctatcggcatttcctctttctttgccctatcttacgccttatccacagataatagccggtcagtggcagacaagctccgatgagagccgcagcaaaggcaagtattttggtaaacatgccgccccaacttcccacatgcactgaatatatccatccccgaatcttccccgatggctcagcattctgatataaagatacatttgttatctcacccgaacgagggtcaaactcataacgatcactcgcacgctgattgcccaaccggtcgaaagagacattggcagtaccccgggatatggtaatctgtctgcaatcgggattctcattcttcaactgtcgataaacctgttcccaatgtgcatacggagcctgtgatttttcctttcccttcttttcctgtccatgagctgcatgcccacttccttgccgggtttctactccaaagattttatagaatccggtccggtaccaggcgaaagaccaagtcagccccgtcagtgacatcaccagcaaaaacaacaacgcatacagaccgcccgccacatgaaaatcatagcagaacctgcgaaaccccttccgcgacgttatcttcagactattcttcatcgcctgcagtgtacgcggccaccaaataatgatacccgtcaacagaataagaacaaacatcagtgtactcactcctactatcatctttccccaaaaaataccgccatcaggcttcatactgtccaacagccagcgatgcagtttaaacatggtcaggaaaaaagccggacgttcgtatttccctttcacttcacccgtataagggtcgatataaactgatgcacggcgcggtttggaaagatttacctgccacgtgcgccctttctccgaaggaatactcactccggcaacagatacactatcgggcaatgtctccgccactcgttctagaagcatctccacaggcagcggttccgcctttatctctttcactcgataaaggtcgggacggctccattctgttatttcgttctcgaaaaccagcatggcacccgaaaagcatatcaggctgacgagcagtccgaaaggcacagaaagccaaagatgcagtgtccgaaatatctttttcatttctgagatgtaagtttacctacagtactaacagactccgcaatgatagtcagcccctttgtggcagtagcagtccgagggtcaatcttataaagtgccggagtactgccatcggtagtggataccggcatatatatgtaaccgttctcgttataaggaatatttccataagcactcagaacatcttccgatggcaatccggtcaccggtttcagtgtccggtcttcacctttaaagactgccagttcagtagtatactcccctttcgactgtaacccgcgagtatacatctgaagcaggaaataatcttctgtgatatgccagcatttgtacatcggatgcttgtttccaagctcttctagattgacataataagtatcgtcaaacgaagtttctcctgccttgattcgcatcactcccgaaggaagtgttccctgcacacgctttaagtcatccgaagaagtggtaagtcgtccgtagccgggtgagaaaacataaagatcgccgttatcagccgcccaaatagtctggtaatattgagaacgcatacgtccgctggcaaagccgattttatcagtggcaacaatcgttggagtactgctgaaatcatttccgctgtaaatagccacatatgcatggtcgggatactgagtagaaggaatagaaccttctttataagcaccgctgccactgcctcccgccacggttgccacaagttgcggatcggtcaccttatccgggaacgcttttacaccatattggctcatccccatcggaattactgaagtgtaaagtttgccgtttgcctgtacaaacccggaaaaagtaacatactcaccattacccaagtagttttcacacgggtaggtcttggtacttgtagtaccgtccagtgaattcagatagttgaccaaaataccttgctccgcatatccgccggcatccgtccggtctgtatctccggtagaagcggtaatcacattatctccccacgtgccatacgtggtgatacgtttaaaagcatacgacagatgctcttcgagcttattattactgttcagaatgtaagaagaaccggttccgtctcctcccttattatacacaaggcggaagaggtaatcattgttatgaaacacccaatacgtaccggtctctgtttcaagaccgttatttttcactgtaacgcttccttcgtccaaagactcggcagtcaggagataatttaccccatcaactgtggcagcaaccacgtatgtccctgccccggtaccgggagcatccggcgttgaattttcaggtactgtatcatcactgcatgaagtcaacacgctgcctgcacaacatgccatgacaacagaccaaaacaaaaattttctattcatcattcttctatttatattttatcgattcatattctattgtccgaaataaaccctcaccttcccgtagaatgcacgcccggctttctgcaggctataattatcatacaatttctcatccgtgaaattcttgcattccaacgagaggttatagcgtccattcttgatactatacgtaatccccagattgtgtgaaaattgttccggcacacgtttcttggaagaagcctctccgatagtttcccaattcaacggaaattcgtgctgataatagctgtcatacgtgagcgacaagcgatttccttttgcaaacaaatcatgccaatagagcgaagcatccaagctggcataacggtaaggctgattgggtatacgaagtttatacttcaggctttcctgcagggagcctccctccagatatttttcattgtcacgcgtatccatgctgctataagtacctcccacactgagccagtgcgaatagctgtaacgtgcagacacattaaaacctttcgtctttacacgcccgtgattataataggaaccataacttttaccaccaaaagagctgatggtacggacgatgtaatctttcgtatcacgataaatcagacttccttccacatagagctcatgcttgcccaagcggtgcgtataactgaggttcaagttgatattgtcactattctccgggttcaggtcagccttacccgcttccaagtcctcatcaccgaacaactcttcattcgatggcaaccgataagctttctcatacgagagctttacctgtaaatcccttattatccaatatgtgcctgccgctccataccccagagcgcttacgtgcttggacatatcaatatagttccctataccatcggcattctgtgagactaatcccgaactatgctggttataatactttccgaaggcagagaagttccacctttcagcaggcatcagacgataagaaagtccggtgatattcttccttgtcttcttgggaacggtaaaatccgaaacagccgaagtggaattcacatccgaacggttactgcgctcgaaaaccgtcagtacatggctcagtgtaaaggtctgcgtcctgctgagacgataatcaaccttgaacgtcccattccagttcttattcttcgattcattgtcctggtaagattgctctccttttgaaccggtatattgcttttctccataccaattatattgataaggcaccgtatcaatattctgagtcagattataattataatttgccgtcaaactaacatccagtcctttggtaaataaatcccgcttatgatactccaatgagggcatcagcgaatgtcccttgcggtgtttctctccaaatactgcctcttggcgcactcctgtctgaatctccttgtacatattggaataagtaaaaccgaaaagcagacggtcggcaaagggtttccccacccaacccacttttccgatgacagcctcattgtggtaagtgtcattgaaacgttttacatgctcaatcttctttttgtcggtggtattgccatcgggagaaaaatgagtgacatacgtatccacataataatcattgtcggaatagttctgaaatgcattaatctcatacatcaatccgcttctgaaagtctgtccgaaattgacatacgacttatgcgtattaaacgaaccataagaataagaagtatccaaaaaccattttctcttcttcttattcgttacaatattgatgacgcctcctaaagcatcggtaccgaatcctaccggtacaactcctttatatacttctatacgctcggcaaaattcaccggaatattgttcagcccgaaagagctgcctaccccctcctgcggcactccgtcaataaagactttgacgtgctttccactgaacccatccaacatgagttgggtatcagaacctacacctcctgcctcccgcagtttcatacccggcagtttggataaagcatcactcaaattcttcgtcgagttctgcaactcctccgtatccacagccacggcattgaaagccgaacgcttcacacggcctaccccattggacacgacaacgacctcgtctaactctgtcacagacgaagctaatactacattcatttttactctctcacctcgaaagagcttcaccggcttctctatcgtttcataaccgacagcagaaacgaccagtgtatactcccctgcgggggcatgcaaatgatatattccctgctcattggtcatacaaccataattggttcctttcagatacaccgttgccaagtctatgatttctttctccttcgatacgactttacccgaaatcatggttttatgctgctgtgcatatacagatacagccgccaataaaacgatgattaaaatattcactttccgaactgctgttttcacgttttcttcttctaagtaattacattctttattcggatgcaaaggtcttgataaaactgacgcgccacaatcgctttttataggtaatttagaaaccttcctcaacagtcatttctttcatacaatcactatttataagtattctccccattgagcaggcaaatattcctttgcaccggaaataaacttttctgcacgttgcaaggaatttgaaatatttatagcctatctttgcagcattaaactaacctattaaacaccaataataaatgaaaaagctatctggttttctattgttattcgtctttctatgctgctcactgtcagcaaaagaaacgcaaatcatcatcttttcgactaatgacatgcacggcagtatcgacaactttgccaaaatagcaagttatatacaaaaagagcgtgccaagaatcccaacattctgattttgagtgggggagatatgttttcgggtaatccggtggtggaccaataccctgagaaaggctttcctatgattgacctgatgaaccggataggatatcagtatgaaatattcggcaaccatgaattcgactacggacaggaggtactgaaccggcgaatggagcaagccaacttccaattcctatgtgccaacatgattgttgatgaagaaacagccggaatcaaacaacctcagccatacgcttttctgcaaatcggtgacaccaagatatgcatcctgggccttatcgaagtgagtaagcgaagaacaggcgagctgctgcccgccacccatcccgcacgcctgaaaggtatcacattcaccgagcctgtatcaaccgcacttaaatacaagagcttacgcagccggtgcaacctgtttgtcggtctcactcataccggttataacaaagattgtgagatagccgaagcgatgcccgaactggatgttatcatcgggggacactcacatacacgcattgattctaccattgtcgtcaatggtgtcttgataagtcaggcacagagcaaccttcattatctgggcaagactactatcaccttggaggataataaagtaaaagagaagaaattcgagctgattaatatggcaaaactcaaagacgaagatacagatatcaagcagtctattcagaaattccgcaaggattgccacttagaccaagtaatagcacatgccacagcacagttcaacggtaaagagccactcggctcactgatgaccgatgccgtagccgatgtgcataatctcgactttgctttccagaatgccggcggtgtgcgcatcggacaaatggcgaaaggagaaatcaccatggccgaaatctatcagttggaccccttcggcaatactgtagttgtctatcaaatgactccggcagagattcgcactttattaatgaactcctaccgcaaagccagcaaacgtgccgatctattggtgtcgggcatgacctacaccattcatacccgtgacggcaaagccgtgagtgtcaccataaaagacatgaatggcaacccgctggacgaaaataaacagtacaaagtaggtatgaacagctacatcgcctccagttatcgattcgaccatgccgacccggggcatgaaatgactgccacctcttcggatgctttgatagaatatctgaaacagcaaaaagaaatcacgcctcaacagccacgtactagtattgtagaagaataaacagaatatatacaataaaaagaggttgtaaccgatgccggctacaacctcttctgtttttatattacctgaattaaaatatgatatttgcagacattacttagcaaatgcgtgacgataacctttcaccttattccagctaccgcgggtaaagtcgggtacagctaccggagcattaccgttttcgatagaaaggcgggtaagttctgccatgcagcaccattcagccaagtcgtatacatccatatccaaaggcaaaccgttgcgcagacagtaaaccagacggtagtccatgatgtagtccataccaccgtgaccgcctaccttcttggcagtttcttccaattcctggtgaatcgggtgtttgtatttctgcatcaaagcttttttcacgtcttcgggaacagcagcgtgcatattcagattttcgtggttgggcacttctttagcatcaacctgatcaggacgcaagcagtattgttcgataggatatttgttggcaaaaccatcagtacctgtcagctgatacatacggctgtaaggacggggattcattacatcgtgctgaatatggatagttttaccgttttcagtgcggatgaaagtcatggtgtggtcaccgttctggaattcgatagaatcgtttgccaaaccatatctcttacccagttcaggaccggttacagctttagtatccatagctaccaaagtcttcatgcggtcgccacggtgaatgtccagcaactggcaggccgggccaaggccgtgagtggcataaacgtcaccacggaattcattgttataatccaagcgccagttattccaatattcaccccagaactcttcgaggttatgaatataagaaccttctacgtgcaatacttcaccgaacaatccctgttgagccatgttcagtgtagtcagttcgaagaagtcatatacacagttttccaattgcatacagtgcttgcgagtcttttccgaagtattgattaacgcccagatttcatccaatgtcatagcagacggaacttcgatggcaacgtgcttgccgtgttccatggcataaacgcccatttcggcatgatgcttccagtctgaagcaatatataccacatcaatatcatcacgttcgcaaagttgcttccatgcatcttcagaacctgaatattcagcagctttaggaaggccggctttctctaaaataccttgtgctctttctacacatttggggcgaaggtcacacaaagctacaatttttgtaccggggatatgagtccagcgtgcaactgcaccgggaccacgcatacccaaaccaataaaaccaacacggactgtatccagcttcggggcagtcagttgaattacatcttgctgtccggcaggacgttcgggaacagcgacttcaataggagcatactcctttgcaacagcttctttctgaggagaagcacatccggccaaacagaacaatgccaagccggtcatcacagtcaatagattcttaatcttcatgtcttttcaaaataaatatttaaatataatagttagtattcatcgctcataagcgaacacctcattcggcaatcgtcacattcgtcacccgctccagccagaaacggttccggttagaatggaacggcttatagtccgtgttcttctttataacattattgcggaatattaatccatccactgatttggcatacaggataggagcatcaaaagtatcgaactcattgtcttctatcacaatgcccccttccggtcctccatgaaaatacttctgctgattctttaagtcgggtatctccggataaatcgaaatcactgcattcgtaaactggaataaattggtaagtgcatttacaaaacgattcttacgaataatcacattacggcatgctccggtttcaaaccagccgttacaatctccacacaacaagatagcagctcctgaagtatggtcaaataagttattctcaacaaccgttttacgcggagtactgaacagactacctctcgctctattattacgaatcgtatttccggcaaacaaaacttccggtgtccaggtaagattctcgatgccaaatccgctttgcccattgacagccggatctatcgcctcatcaaaagtaataatgaattcgcgtgccccgtctatttgttctttatcatgcggacggatgcttgcaatcttattctgattgccgatcaactccatggtagaggattgaacgaactgcacctcatctccggcgcgtccccattcaaatccccatgactgatcatgcatataacgtccgaccaatgtgtggtcatctatccttttcaccactttcagatatgttccatgcacattaatggcatcatccatcatgccttcatagagtccattgcaagaagttatctttcctttacaacctgaaaaatgagtcgcatctgcctgtgtggtaaaataacgcggatcatcctcacccttcaagcaaacacagaacttctctaacgtaatattttcactgaattgtgccaacaatcccattccttccgcataatgtacttttatgttttccaatgtcgtatttaaatcatgtgacaggaaaattccgggagtagggcgtccccaaccacgcatggcaacaacagttccgggaacaagacgtgcatctttccaatggggagcacgaatgcgccgcggtgctatctcacttgctcctttcgtcggacaaccgatatcactggtattgtataccaaatgtttggtatccccatcaaaagcaattccccaggaatgttttaaagtccatccttctccataagcttcaaaaatcgaatctttggctatacgatatttcacccatgaagccggttcgaatacgattccctcttgcggagtattctccaatatctttatttgtgcaatatggggattctcaaaatcaatactgaaattcttcaagctacaattctccgaccgaagaagcgacaccggcaacattctcccatgaaagacgaactgtgccccctgcccgtcaagagtaaggtttttcatgtcttccagtgcaatacctactttcttaggattgtcttggtcatggttcgagatataatattcgcgtacggcagctcctttttcatggaagtcatagcggccttcagaaaaacgaagaataaccgcttcaccatccttgcattctgcctttattttcgacaaagctttttgcaaaacaggagaagcatttttatgagtatcaggctttaagccaaacgtggaaatatcatatactttttgagcatacatatttatcgaagtgagtgcaaatattgcacctaacgctaaaatcgaaagtaatttcatacttattagacttaataaattaatcaatgcactgtattgaaatacaaagaaaggaagtttccccaatatacctagtatttgcttacgcttttttaacaaattagtgataaaaagcgggatgtgaagacaaatgccatacacaccccgtgcataatcctaacacctaaaattcatctcaactaatatcccggattctgatcatcccgcaataagggatttaaatccatagctccttgaggaataggcattaacatcaaacgatcactccatgtcatattcacaacctcataaccattaggagcataaacagtaccattcattactttgttgcaatatgcagacccataacgacgtatatcatcataacgttgtccttcagcagccaattctatacgacgttcgttacgcacaaagtccaaagcagcttccttagatggcattacagtaggtacatcaggcataccacaacgatcacgtaaatcattcaatgctttctggacttcagcatcccaacctttagtttgaatcctcgcttcagcataagtcaacaagacctcagcataacggataaccggataatcctccatactagcccaatccgaataagctgtcaaagaaagtaattttctataactatatcctgtccatgattcattaccatccgaaccagcccatgacggattccagcgataatagaaagttccaaaatctgtttcatgccatcctttaaaaggaaataacatagaagcataaagacggctgtcacgattacggaattcatccatataggcatattctttcaaattcaaagtaggaacagttttaatataagtagtttgatccattccttcaacaacagctgttattttagcaaaattctctttacgagttgctaccggaatctcaggacgtatcgtttttccgtcaatatcccaatacgcatcaatcaatccctgcatcggttcgtatgaagaataaccggaaatcaattgactaggacgaatataagtatagcgagtccaatcatagttattatcatctgccatatacccccgtgtcaccaaatactcaggattatcaggattggcattctccttatgccacaaacattcataactgaacatacctttcacaaacttatccttatcgatattctttgcttcaaaatcaatatattgttccatctcatcagcctctttctgctgagctgcattcaaagatgtcacacggaacaaactatgatgtccttcctgaattatctttccggcagacgcttctgcttctgcgaaattgccaaaatacaacgcagcacgagcgcgcaaggctaatgctccagcccgagtgattcgtcctttttcataaccttctccaccaggataactatctggtaatatctcagctatttcagccaactcacttaaaataaatgcttgaactgtttccaccggatcacgtttcacattaggtgcatcatactccatcacagtagtaactaaaggaactttaccaaacttagtagtcaaatccaaataatctgatgcacgaaaatagcgtgcttcagctttcattctttcccttaaagctgcgtccatctcacatccatcaactttttcaaggaaattatttacaatgcgaatagtcctaaagctataaccacgatcactctcagaacttactccattttgttgaatcaattcatagggaccttcccacggtttatgactatgtgcattatctgtacacatttcatcccaaatatccatgccacccatttgtgcataacaagcattcagaccataccatgcatctttttccgtcttccagaaattttcagctgcaatctctgaaggcggtactacttccatatcacatgaagcaaaagcaactgtaaataaacctaggatagctaaattctttatatttttcataattcaattcgttatttaagattatcaattaaaatgaaacattcacaccaaacgccacagatttactacctaaatagctcaagccacgtcctgaaggtgactcaggatcaaaatctttcattttatcgtcagcacgtaatgtaaataagttttcccctgttacaaaaagcttcaaactactcaatccccaactcttcactacatttataggaaccatatatcctaaagagatgctcttaatacggaaataatccgaatcaaacaactgataatcagagaaatactgattataatcatctaaactatgtcctccataaatacgaggatagatggcacgcggattaggattttcttgtgtccaacgcccccggtgaaattcacgaggattagcattcaacataaaggcagatatttgctctgattcaaaagcggtcattgtaccacttacaccttgaccaaatacagataattcaaaatttttccattgtagattcaaattaactccataagtaaaatcaggaacatccttaccaatgattgtacgatcctcaccagaaatagctgcatgagatttatcttcattcgcttccaaatcaccataatacttcacatcctcacgttgaggaacgtatttgatatcaccggcattaggaatacgaccaaaagtatagaagcgtcctgcatcaatttcttcttgtgtataaagtccatcagtcttatatccatagaatgaaccgataggttcaccttctcttaatataaaacgaattttatccccgccattactaatgatatcatctgaaccggctaagtccacaactttatttttattagttgcaatgttacctgttactgtatatttcaaatcaccgacattacctctgtatgtaagagccatctcaaaacctgtgtttttcacttttccgatattttgagacggtgcgctccaaataccagtttctactggcacattatagcccaacaaaatatcactggtatttttaatataataatcggcaacaatgcttaatttattatcaaacaaatcaatatccacaccaaaatctgtcaaagcaaccgtttcccagcccaagcctaaattggctggtttagactctagaataccttttacagcctcatcattgaagttgtaatcagaacctaaattataattttggaaataatcataattccctacattattaatattacccaatgtaccccacgatgctctaatcttcaaattattaatccaagagatatttttcataaactcttcttggctaatacgccaaccggcagagaatgaaggaaaatatccccaacggttatctttataaaaacgtgaagaggcatctgcacgaatattagcttctaataaataacgatccattaatgaataattgatacggccaaagtacgaaagaattttgtattcagtcattccaccaccattggaaagatcttttccagcattagaaccaccgctcaaatcctccaaagcatcagatggaaagtttttacgtcctgcgctcaatgcttcatatttatagtgctcataagaagtaccggctaatgcagtaatgttatgtatagaattagaccaatcatatttgatagttccagtatacaacatacgtgttacactactccaattcatactcatagagtttgtataagtaccagtaccaccaataggtgtaccagtctcgaaagtcttcacttcatcttgcaaagccgtgtaagacttacctttatactcttgtccgcggaataccccttgaccactaataaccaatcctttaaccggttttatatcaaaacctaaatcatacattgtttcttcagttttggatttactccaatttttattacttaaagcacgaagaggattgcctgtgataaaagattgggtagcctgtttaccaccggcaatacttccccattctccatttgactgttgagccaccataatagatggaaccaataaaaagtttcccatccaaggttgtccatgttctgtatcagacacattacgtatgtatttaatactacctttaacagtaaaccatttagtaatatccgatgctatattagtatccaatgtataacgagttttgtcctgccctgacataaaattaggcttatcatcatacatataccctaaattcataaaatagcgtactttatcacttcctccactgaaacttacagaatgttgagtagtcaatacatgtttatccaacaccaaatcagcccaatttgtgttagggtaatagtcaagatctgttccatttctaaatttatcaatttcttcttgtgaatatgcctgatatttaccatttgccgcattacggttatacataccttcattcaacatagaagcatactcccatgaatctacagttttaggtaaataagtaggagttttcatacccaccaaaccactatatgaaacattcatttttcccttttcaccatttttggtagttaccaaaacaacaccataagctgcacgagaaccataaatagcagaagacgaagcatccttcaaaaaggagatactttctatagagttcggattaagactttgaaaaaacgcagcatctgcaatagcaccatcaatcacataaagaggttctgaagttcctaaattaccacgtccacgaaagttgatagatggagtagaccccggacgagaaattacagtcactccaggtactgtaccttgaacagctgaaagcacattagtttgaacccggtctttaatttcacttgagctaacagaagcaacagaacctgttaaattcaccttcttttgagtaccatagccgataactacgacttcatccaatgttttcgtatcttcttttaaagttacattataaaaagaagtacccgagtgaacttttactacttggggtaaataacctatatagctaatttgcaactcatcactagaaatcgtcagtgtgtaattaccttcaaaatctgtaactgttccatttgtagcaacccctttttcaacaacagaagcaccaataataggttcaccattcacatcttttacacaaccagttatagtcctgctcttctgctgttgatgttctattacatttacagcttttactgttgaaataagaatttggttgtttactattttataagtataaccagaatctttaaacatctgatttaatacttgttcaatagaagcattcttggcattcacagaaatctttttgtccaatttgatttggttatcattataaaaaaacgtataatcactaagtttttctatttcctccatcacagagtgcatggaaacattcgacttacttagcgagataaaagtggcctgagtaaaagcatttgccggtattgaacaagtagcacaagccattaaggcacaaaaaaggtgtcgttttactttttgcggataaaacaaccgcagattactttttttcataaatttgaattgtttattagattaaaaaattaacagtaattccatttttgtggaaatataaaccttctcaaataattctatagaaaaatatttatcatagtcttgtatttctcataagcttcaatttttaaagttcaaacagtcttagtgctttagttctattagataatgattattaccaaccattttataagtcaatggagcactatgtgatatgtaatttaatattagagctaacggttcgctatgtacagtaaaagtgaaacgataatattctgctaattgaggatcacactctatcctttgtccataccacttttctaatctattcaatatcatctgcaaagtttcattcttaaaactcattctcttcccctttcgccaaccggaataagcatctgcatcaatatttgtaagattcactcccttttcttcactataagtcaacttttcatttggagctaaagtatatattttgccttccaactttttattatctgaaatcgctactttcactttccctgtcaacaaaacagcctctacctctttatcgttatcgtaactaaatatttcaaaagaggttcccatgaccgttacatccatctttttagttttcacaataaacggatgagatttatctggactcacattaaaaaacgcttgtccagacaatttaacctctctattagatcctgaaaatttttgaggataggtaagcttactacctgcacccaacatcacctttgtaccatccgctaatttcactgagtccattgattgatatccagtattcacaacataaatcacttcctgacggccgctctccacaaataataacgccgaaagcaacatacatatagctactgatacagctattccatatcgatagaaagagtaagtgaaataattagtctttcttttaacattcttcaatacactatgcaaaatacgttcttctcttaccgaatcaacaatggcaggtgcctcttcccattgtttgcgaagagcatcattaataaattcataattattcaactcccctctttctttaggttccaaagaacgttcaaacagcttccttattatatcatccctatttttgtccattttacattttgtttttgcacagataattttatacgcatttaatataaatacgcataactaataaagtacccccagccaaaagcacttttttttgagaaaatcagaaatgaaataatttaaaagataaaaataagataaaacattatattcttcttcaagaacttcagagcttcattaatatgtctctctacagttttttcactgatattcaagcgaatagatatttccttataagttaaatgagcatttcggctcagattgaatacttcctgttggcgcggaggaagctctttgaccattttttctataaattcctgtaaatctgccgcagtcagctcttcttcaagattataataaggcataatactacttaatacagtcagtttatacgcattttcattaaagctcctacgaaattgattaaaaactaaattacgggtaataacaaaaaggaatcctttaaagttatcatcctcacgcaacaaggagcgactctcccaaaccttaacaaatacctcttgcacaacctcttcaatctccaaaatagaagataagtataagcgagaaaaattataaacctttgaccaataccttctatacaaagtagtaaaggctttttcgtctccttctttcaataatatgattagctctttttcagtcatttgttattaattatatgcaaatatattacttaatagttaagaaaagaatctaatatgctattatttttttaacatctactattctttcattctccatctcccattagaaaccattcaaatgcagctttaacagaccaatcataaattatataccacctcagagacttgagcttatcatacatagctttcatcacctctttttttctattctaatgaagaaaattatataactagagcttctttaaaaaagtcccaactatgtctcttcgtaaaaatcacggaccacattctccctggcttgtttgacgctatagccctgcttgaacatgcaagaactcatatccccgaaagtgacatgctgctcgcagcaaacattagctatagaacaatggtagtctactaacagtcccaagtggtcctaaatctgtgcttttttaaagacataatgtttcgtttttatatattgcaaagatagaagaactaaagaaggacaacaatatagaatcgcagagatgcttacccgaatcacgacatctaccaataattgtattgtttcttccttcctcctttcatctaccgttgaaatgtcctgcctgtgggagctccggtagtgaatggacatgtcgtatcgtcttttcagcctcctttcatctgtaaaacttcttctggcgggacaaatgctgaaggctggtttaaaagtagcttggaaagcatgactgaaaggggaatgaggggatgttctgtcattgttaaccgattgattgataatgtgttttagttaagctgtaaggatgaacggaaaaaaaggaatgaccggcttagtgagggtgattccatcttcccttacataaaaaacatgccgagctttttaaaaaagatggtgatgtttttaagaaacatcaccatctttttggaaaacatcaaggtctttttgcagcatgggagtgtgccaaaactaaaccgacctatcccatcgtcagctgtaggggcgaggtccgctcgcccgaaaacagtttgctttgtgtcttcgggcaggcgaaccctgcccctaggaaccaaaagacagcattgtccacattttgacacatccccctgtttgtaaagtgtgtacgtacgcatcggactacacatacggtggcatcaggccacacgtatatacgtatcgagctacacgtacgtacgcatgagcctgcacgtatatatgtcattgtgtcaggctccgtcatatcctgtacccgggtttgattaatttgtctcccctcttgacaaacgctttttcatgttgtatatttgtagttcgtcaaatctaaaaaaagtgcctcatgaatgtattcgccaccctcaaaacagtcttcttcggaagcaaattcctgtcagctcctgttccttccgacggaacgccgcgccgtgacttcgtatccgccctcaacggactgatgccgctttgtcggaccatccccggtgtgcacctggcagtggatatccgcgagggtcgggtggctctggtggtggactggactccgcgtaccgacgggaatgcgctggcgggcgtttaccattacattgtgtccgatgaagacggagtgaaggaagtgagcaagtcacaggttcttccggctgaaaacggcaagggcaatttatcggaaaacaggaacgaagctcccggatgcccgacagtcttaattgaaaaaacggagaaagaagccgcacaatcgggaggtgctcgaaaggttataaatcctatacactcgaaagatgttaaaaaggaagtcggggtggtatcttcggaaggcaatcgaaaggaagccgcgccggtattctcgaaaaacattgaaaaggaagccggattagtaccctcgaaagaggcagtcaagaaagcgaaatcatgctccctgatgcaggaagtgaccgctttcctcacctcccgctaccgtttccgcttcaacgtactgaccgaggaaaccgaagtagcagacgtggcaaacataacaaacatagaaaacaacctccccgatgcccatctgcgttacgccaaagtggacgaacgatggatgaacacgctcagcatggaggccatcgaaacaggcatagactgctgggacagggatatccaacgctttgtgcgctcgcgccgcatcagcgaataccatccctttaccgcctactttgagcagctccccgaatgggacggaaaggaccgggtatccgcactcgcccgccgggtgtccgacgacccggtatgggtaaacggtttccaccgctggatgttgggactctccgcccaatggatgcagttccggtcggatgccaacagtaccaaccgcgccaacagcgtggctcctctgctggtgagcagccgacaaggattagggaaaagtacgttctgccgcctgctgatgcccgatgcgctgaaagcttattatacagaaagttatgacctcggctccccggcatccgccgaagccaaactcgctgcctgcgggctgatcaatctggatgaattcgacaaactcagtgcatccaaaatgcccctgctgaagaacctgatgcaagcctccgcactgaacatccgcaaggcctacaaacgcagcgcttcggcactgccccgcatcgcctcgttcatcggcaccagcaaccggga

SEQ ID NO: 6758 - DNA, 29551 bp, Unknown
  gut microbiota DNA sequence
tatccagcagcacaacgccctgttctacaaacacatacccgaagaagaggtgttccgcctttgcttccgctttgccacgaaagaggaccatccgcaggaagtgctgaccctttccgccacccaattattcgagcggatgaagtctgcccatccttcagccatgaggggtatgaccgcctacagcctgagccgcatcctgccacagctgggcgagcgggtacataccgccaaggggaatgtgtatagggtggtggcatgctagacaaaaataatataaaggctcaaataattacattattataatttattgcgaggcattgcaagcaaatggtgcagaattgttattcagtggtgcaaaaaccgtatatttacaccacgataaaaacggtaatatcaatgaaaggattaacactattcagaaggactatcaaatcagagggaatgattaaattgcgattccgcctgaaagacggtcgtgaggtggacttatatcacaagagtgaaaccaaggctgatattaaagacttagcaaagcttgaagacgctggagaacttcgtcctaaagtatctatctacaatcacgaactgaaagaaaagatagaccgagaaatgtcagccattgaaaccgcctatattgaactttgtgctaaaatggataaaagcctcattacagctacattgtttgaagaaacaatctgcaggcatcttcatccccaaaattatattgccgtaaccaaagaagaaactctattggaaagatatacccgattcatcaaggagggatatagagacggtacttttgcagaaaagaggatgcttcaatacaatggattatataatgagttgaaacgatatttgaccatccgtaaccagttaaatgtacttccaaagagtttttcggcagatgacttaatggaactacggcttttcttatttgaagaatataaatatgttgagaaatacccagctttatatagcgaaatcaaggagcgttgtattccatccaaagaacgtgcacagaatactgttgccatcaaacttagaatattgcaagcattctatacagaattggaagaccgtgatgaaatagatgtgtcgcctttcagaaaactagataagaaccggagaaaagttgtaatgaaagagagttacgatgcacctgtctatttattacaggaagccaaggaagcatttcttctgcaatgcactttcggaagccatattgatgattttaagtcactgaatatggataaagttttgtcagtgccgaggggattccttacttacgctatctgcctcagaaaacattgaaaagtaatgagcataaagacgaagtggaaatacctatcatgcgatatgctttagatattattaaaaagtggcagtttaacttccctattctaaaatacgtgaccggtaagagtggctataatgtaaaaatcagaaagttacttgaccaaatagatagagaagtgaaaatttttgataaagatagtttcgataatatttataacgccctttacacaatgggaagcagcaaactttgtcgtaagactcacttggatatgctgactaaagtacaagtcaatatgtatgtttccggacatcacaaggaaggtagtagcgcagtaaaacacaactcatccttgatattgaaagaccgctttatattcatgtgtgcggcatataaacaactgaatgtaatagaaaaatgatatggaaaacaagatagctattttcaaagatgcagaaaccatattggaagttccggtatcaaccgaagaaaaaacagtatggcttaaccgacaacaaatgtccgttctgttcgacagggatgtaaagaccattggtaagcatatcaacaatgccatgcgtgaagaactggaagggcaagtggtagtcgcaaaatttgcgaccaccacccggcacggtgctatggaaggtaaaacgcaaaccaaacaaacagaatattacaatctcgatgtgattatttccgtaggttacagggttaaatctaaaagaggtgtggctttccgtaaatgggcaaattctatcttgacggaatatatcatcaaaggctacgccatcaacgaccaacgtctgcaacagcttggagaggtgatacgcatcatgaaacgtacccaaaacgagcttgatgccaaacaggtgcttagtgtgattgaaaattacaacaccgctcttaccctgctcgatgattacgaccatcaatgtatgaaacgaccgcagggaagtaaagcaacatacgttctaagttacaaagaatgccgtggtctgatagaccaaatgcgctttggcgcagattccgacctgttcggacatgaaaaagacgattccttcaaaggcagcatcggcaatatctaccaaagtttcggcggtaaggatgtttaccctacccttgaagaaaaagcggccaatcttctttatttcgtcaccaaaaatcatagcttcagtgacggaaacaagcgtattgcagctactgtatttctctatttccttgacaagaacggtattctctatcatgaagacggcagcaaacgtattgccgaccatacccttgtggcacttaccattatgattgccgaatcacggacggaagaaaaagagatgatggtcagcatcatcatgaactgcatctaaaaatttatattgtctgtacattgtatctgtttatcatctgtacaaagatgtggcaatatgccattgattttgccatatcattgtctgacacggaaataaaaattatatctgcctatcatgcaaataatacacaggcggtaatcaaacaaatgatctgtctatcccccgcttttcgaaaccagttaagaggagtggctgatgtgaaattcttcatgttcaggccggctatgctatacgcttaaaagaaagcttgccaaccgggaaaatcggctgagccgctattattcagcaaagaaaaaagtttcagcaataaaaagaaaatcgcctacaactttttgatttgcaggcgattaaaggattactcttgtactcgaagcgggacttgaacccgcacagccgcaatggccaagggattttaagtccctcgtgtctaccgattccaccattcgagcatcctcgacgagagagagcggaaaacgagactcgaactcgcgaccctaaccttggcaaggttatgctctaccaactgagctatttccgcgttttgtttgacgggtgcaaagataaggagttttataatatctaccaaattttgcacccgtttttttatttaagaacgtaatattccttctatctctgctaattcgtcatttaaaaatgccaaattctccaaagcatgaaggttatcattcaattgtttgaccgaacttgcaccaacaataaccgaagtcatacgctcatctctcagtacccatgccaatgccatttccgccaaagtctgcccgcgacggacagcaatttcattcaggcgggcagctttcctcactttatcagccgttacttggtcggctttcaagaagccggtggcacgagcggcacgagaattttcaggaataccatgcaaatatttgtctgtcaacaacccttgcgccaacggagagaaagcaatgaaaccggatccatactgtgctgccaatgccaaagactctgcctcgacagcccgatcgaacatactataacgatactggcttatcaaacaaggagtgccggcagccttcatcatttcataagccaccctcgccttttcaggcggatattttgagattccgatatacagcgtttttccttgctttaccatatcaatcaatgcctgaacggtttcttccaccggagtaaccccatcataacggtgactataaaagatatcaaaatattccaaacccgtgcgacggagactctgttctatacttgccatcagatttttgcgtgagctgttgcctccgtaaggtcccgcccacatttcatgtcctgccttagaggagattatcatctcatcacgatagccctgaaagttctctttcagaatcttaccaaaatttgtttccgcactaccgggaaccggaccatagttatttgccaaatcgaaatgagtaactccattgtcaaaagcatactttatcatatcggaagctatcccgaaatcgtctacactgccaaaattatgccacaatcccaacgagatgcgtggcaaaagcagaccactatttccacagctcttatactgcattctgtcatagcgttccactgaaggttgatactccatgtctttattatttatctgtccaacagagatttttctgcctgttccatggcagagaagttaaatccgtcgaccaccttttccatcaacaggataatcttgtcgttacatagattgccgatgcttccttcgtgagtgtgatgcacttgcttgttgtgggtgaacttaccggcttcgatatccagtcccactttcttataagcatcgcggaacggcattccttcggcagccaaacgattcacctcttccacactaaagatgtacaagtaacggtcatcatccaagatatgttcgttcacctttattttatccataatataagtagtcatctgcaaacagtccttcaactcttggaacgcgggcaggaacacttctttgataatctgcaaatcacggaaatagccggaagggagattattcataatcatcataatctgttgcggaagcgcttgaatcttattacatttggcacgcgtcagttcaaacacatccgggttctttttgtgcggcatgatactggaaccggtcgtacattcatcgggcagcttcacaaaaccgaaattctgactactaaacatacaggcatcaaaagccagtttggaaactgttccggcaatagaagcaagagcaaaagccacattgcgctccatcttgccacgccccatctgtgcatagaccacattataattcatcgaatcaaatcccagcaaacgggtagtcatttctctgtttaaaggaaaagaggaaccatatccggctgccgagcccaacggattgcggttgcacatcttaaaggctgcctgcaaaagcatcatatcatccaccaaactttcggcataggctccaaaccacaaaccgaatgaagaaggcattgctatctgcaaatgggtatatcccggcatcaagacatctttatatctattactttgggaaatcagtacatgaaacaattgttccaccgcttcggccacctctttgagttgggtacgagtgaacagtttcaagtctaccagcacctggtcgttgcgcgaacgtccgctatgaatcttcttacccacatcacccaacttgcgagtcagcatcagctccacttgcgaatgtacatcttctatgccatcttctataacaaattcacccttttcggcagaaacataaatattcttcatctcggccagcagagcctgcaactccccggcagtcaacaaaccgatactctccagcatcgtgatatgggccatagaacccaagacatcatgttttgccaaataaaggtccatctcacggtcacgtcctacggtaaaacggtcaatctcatcatttacccggacactcttttcccatagtttctgagccatattctttctatattaataaggtatcattgataacatatcagccaacttctccaccccttcctgcaaaggtttcgctaccattgctttcataaacatattcacttcggcgcggatggtcactttcattttagcctcattttcatttaccggtaaaatctgtatccacagatttaaaggaatcggagatttgtctccttcaaacttgatacatttgcaaggttcacgttctataatgcgcaaagtgacattcattccttgtacggtaagtgtcagcgagtcacggtcaaatgtcatatcctgaatcttatcgccaattttttcacgcatttcatccattctctcacgtatcgctgccaaattattcaaatcggacaacttatcatatacacgctcctgactatacggaacatgcttcacattactttcatactgagccatatctcgacatttataaacaaaaagagaacggtccgaagaaataattcttcgaacagttctctcttaaatatattttaatcttaaataataattactttcctgcatcccaatgagccgggtcttttctccatgcatccaaaaccggaacatcttcttcattgatatatcctgtcttcaatgcagcttccaaaacggcttcataatttgtcaaagtcaccaaatttacttttgcttccttaaatgcttcaatagcaacggggaatccgtaagtaaatgctgcaaccatacctattacttcacaaccatcacgacggatagcctcaacagccttcaagctgctgccaccggtagaaataagatcctcgataactacgactttcatacccggacgaagttcaccttcaatcaggttctccaaaccatggtctttgggggtagaacgaacatacacaaacggaaggttcagttcatctgctaccaaagctccttgagggatagcccctgtagcaacaccggcaatagcatctacttggccgaatttctccagcacgatacggctaatctcaagttttacaaaattacgaagagaaggatacgaaagagtcttgcggttatcacaatagaaaggcgacttccaaccggaggcccaagtaaaaggattagccggctgcaattttatagccttaatcttcagtaatttctctgcgaataatttttctaaagtcttcataacttaactacatctgataaatatgttgcaaaaatatagaaatacatcgagataaagaaaaaaggaacaaggtatttttcaaaaaaataaaaggaggagatgtagcggttttaattggctgatttcatttctttgctccaatagccaaccgatgcaataaattacccctgaccggccaatgcaagggtaagtacactgatacgaatatcggcaacatctttcagcgcatcggaacaagacacgatggtagcaccggtggtaagcacgtcgtctatcagtaaaacatgcttgccctgcaatatcgccggagtgttacaaacaaaaatgtcacaaacattttcccaccgttcataaagccccttatgcgtttgagtttctgtatacttacacctttccattacatccgaaagtaccgggatggaagtcacgcttcctactcctttggcaagccattcactttgattataaccgcgcaagcgctcctttttacggtgaagtggaaccggaagaatataatctatgccttcaaagaaaccggaaggcaatagctcagccgccatatatctccccaagaaccctcctatctctttatttccataatattttagttcatacaacaactgcctgacaacacttcctttggcataatataaaaaagaagcagcacgttccaccgggaacttcccccaaaagttacgttccacctcattatttctttgtaagtgcagattcgtatgcggtaaagtcgccaaacagcggaaacacaaaaagtgttcacgcttcatcaaacgttcatcgcaaatgatacaacattcggggaaaaacaagtcccataaatcagcccaaatactccacatcggcatcaacctgtttcacacaacgaaggatctcttccatttcaaagccccggccaatagcaaaacgaatcaacttgccattgcgctcatagtccgtatttgctttgacgcttctctttttctgctcgataagccccgaaagaatggataaatattcgctctcatcaattgcttccaaacctagacttatcacatttgccggtattttcttcaagcgtaaagcctgcactattttcaacctcccccattgattaaaccgatacttatcgcgcacaaaagctgcacaatagcgctgttggtcgatatatttttcttttatcaagtgttcaatcactctttcttttatgccattatccgccccccattgttcaagttttgcctctacttcggacacgcaccgttccacagacgagcaataggcttccgccttattgcgaacttcgttttcgctacattctttcttcatcttattgcttttaccatccggtcattgccggataaatcttttcttaattctacatggtgataccccaacctttcaagcatacctaccgtagcagcaccataatcccgattgatttcaaaataaagcctgcctcctgacaccaacatttcaagtcccaattcagctatttttgtataaaataacaatggctgttcatcggggacaaacaaggcgacagaaggctcccactctaaaacattggcctccatagcagccttttctttttctgtaatataaggtggattactgacaatgatatcaaactgctcttccgaagaagaggtttgcaagacatcctttcgttccagcctcacctttacatcgtttcgtctgcaattacgccgcgcaacctccagagctccatcagaaatatcccatgaagcaatatcggcatgtagcaaaaacttagcgagagtaatcggtatacatccgcttcctgtgccaatatcaagcacccgaagcccgccctccttattatctttcagaatccactcaaccaattcttctgtttcgggacgaggtatcagcacattttcatcaacctcaaatgaaagcccataaaacatttccataccgataatatattgaaccggttcgtgtttttgcaaacgaatcagaatatcatccaattgtttctgctcatattccgaaaaacttctatctttgcccccatacagttcaatcacagtgaatccgaatacttgcgtcaacaacaattttgccaaagacgcagcctcggagtcgggataataatctgccagagcttgctttatataatatgtaataggattcattgattgtttaattatatgcaaaagtagaaatttaaaccgtatggttatgacaaaagacgaaaaatatatatccagatgcctacaactggcacgcaatggtttgtgcactaccgcccccaaccccatggtcggagctgtaattgtgcgcaaagatactattataggtgaaggttaccacatccggtgcggagaatcccatgctgaagtaaacgccatccgttcggtaaaagacgaaagtcttttaaaggaatcaaccctttatgtgagcctcgagccttgctctcattacgggaaaacaccgccttgcgccgaccttattatagagaaaggcattcccaaagtcgttgtaggatgtatggaccccttctctttagttgccggacgaggtatcgataaattgcgccaagccggaatagaagtgacagtcggagttttagaagaagaatgccgccggctcatcaagcattttattattttcaatacgcaaagacgtccttatatcaccctgaaatgggcagagtctgcagatggttttatcgacatcaaccgtacagaaggaaagccgatagttttgtcaagccccctcaccggcatggtcgtacataaaaaaagagccgaacatgatgctattttggtaggacgccggacagccctgctggacaatccttctctgactacccgcaactggtatggcaagaatcccgtccgtctggtaatagacaaggatttaacccttccctcccatctctcattgttcaatgaagaagctccgacttacatattcacacaaaaagagcctctccactccgatgccggattcgtacgcctgaacttcgggtgcgacatcctgccacaaataatagagtttctatacgaaaaaaagctccagtccctactggttgaaggaggaagtatgctgcttcaatccttcatcgactcggatttatgggacgaagcttatatagagcaatcccccatctttctaaaagagggagttgcagctcccactattcaaaaaaaatattttaaagagagcgaaagatactttggaagagattttcttcatgcctgctacccacaggctcatagacaaaatacgtctgattagcagataaaaagcggaggtttatctataaattaatataaaacttgttccaaaacttctatatagaaaaaaatcttcctacttttgcgacttgtaacaaaaagactcatttgcaaatgaaaataaagtttttgacagttatcacagggctgcttatggccgcttttatgattacatcatgtttgaacgatgacgacaacgaagtgactttaagctcggaatccagtattactgctttttcgattaaagataacatagagactaaatacaccgccaaagttaacgggaaagacacgacactgacagctaccgtgaaaggttctgattatccctttatcattgaccaggtagaaagacgtatctataatgcggactcgcttccggtgggtacgaatgtcagcaaggtagtagtggaaatcactgcagacacaccttatattcttattgtagccgataaggattctctatggacatccacagactccttaaattttgaaaatcctgtcaagtttaaggtaatggcgcaaagcatggaatatggtgcggtctatacagccgaaatcaatgtccataaacaggagccagattcattggtatggtctaatttaagcagcgacttcaacggtagtgccatccaggcacaaaaggccgtttatttcaatgataagatttatgtatttgcccgtcaggacgagggaaaggttgccgtgacaacaacaagcattaccgacggacatagttggagtgccttgcaaccgttgtcattggagaaagccgactattccactgccatgacatggggagatcatttatacattattgcagaaaatcaattgtaccagtcggaaaacggtacggattggagcaaaatagaatcagcgcccaaattgaagatgctggtatcaaatatttattcccaaaataatccggaagagaacaacaaactgatagcaatcaatactgataatgtattcgttgaaagccataacggaacagaatggacagagcaggaaagtgttccttacggttttcctgaaaccagcttgtcatttgtttcctatcctctgaataccaatagttcgatagaccgcatgttggttttgggagaaaatccgattgctaccgatacgacttcagtggtatgggctcagttaagcacagaaaacacatggggtaactatccaccggaaaaagacaatttggacttctgtcccaaattggaaaatatagccatgatacattataataatcaattatatgcatttggcggacccggtaagaaaaacggttccaaccttgcacctttcagtgcattttatgaatcggtaaacaatggcatcacttggcaacaagtgaaaagatatgtattcttccctgaagaatttagcaatttatacaagcaagccgatggcaattattcttatgttattgacaagaataactatttatggataatgtggagtaaatccggccaggtatggcgaggcagaatcaataaattaggctttaagaaaagtatataaaaccagaacacgacatgctatatagagagcaaatagacaagagccgtgtaccggcccacgtagccatcatcatggatggtaacggaagatgggctaagcaacgtggacaaatacgaagcttcggccaccaagccggtgccgaaactgtgcacatcattgccgaagaagcggcacgcttgggagtcaaatacctgacgctatacaccttctctactgaaaactggaatcgccccgtcgatgaagtagctgcgctgatgagccttctcatggactctatcgaagaggaaatctttatgaagaacaatatcagcttccgcatcatcggtgacacccagaaactaccggcagaggttttggagcgactaaaccaatgcatcgagcgaacttccataaataccggaatgtgcttgattctggctttgagctattcttccaaatgggagctgaccgaagccgtgaaacaaatagccacaaaagtgcaagacggcaaactggctattgaaaacattgacgacaaagtaataagtgcaaacctgagcacccacttcatgcccgacccggacttattgatccgtaccggaggtgaaattcgtctcagcaattacctgctatggcaatgcgcttattccgaattatacttttgcgatactttttggccggatttccgcgaagaagagttttgcaaagccatttatgattatcaacagagagaacgccgtttcggcaaaaccagtgaacaaatataaagttatataaaatgctatatcgtatttcactcatactattaacgcttacatgcctgttttgtttctcagtcagtagctatgctcaagaagcaaatattcaagaaaacaacaatccggtgatactttactctggaactcccaagaaatatgaaatcggcggaatcaaagtcgaaggggtaaagaactatgaagactatgtactgataggactttcaggactgtcggtaggacaagtaattaccgtcccgggtgacgacatcacttcagcagtaaagcgttattggagacatggcttattctctgacgtacaaatattggctgaaaagattgtagacaataaaatttatctgaagatacttttaacacaacgtccgcgtattgccgatatccgctaccacggtgtgaagaagagcgaaagagaagaccttgaagccaaattgggtttggtaaaaggtagccagattacccctaacctgattgaccgtgctaaaatccttatcaaaaaacactttgacgagaaaggattcaaaaatgccgaagtgacaattatcgaacgtgatcttgccgacaacaaagaacaggtggatgtagatgtgatgattgacaagaaagaaaaagtaaaagtacaccaaatcaccattgacggaaatactgttctgaccgacaaaaagttgaagcgagtaatgaagaagacaaacgaaaagaataagctcgttaatattttccgttcaaagaaattcattgaagagaaatacgaagaagacaaacaacttattattgataagtataacgagttgggttatcgtgatgcccaaatcgtagtagacagcgtgactccttatgatgaccgtaccgtagatgtatatatgcgcatcgaagaaggtgacaaatattatctgcgaaatgttacatgggtaggtaataccgtcttcccggctgatatgttggatgaacaattccgcatgaagagaggagatgtatacaaccaaaaacttatgaatgaacgtttgagtggagatgaagatgctattggtaacaactactacaaccgcggttatgtgttttataaccttgacccggtagaagtgaatattgacggggactctatcgacctcgaaatgcgtattcaggaaggtccgcaagcaagtatcaacaaggtgcgtatcaatggtaacgaccgtttgtacgaaaacgtagtgcgccgtgagttaagaacacgcccgggtgatttgttcagcaaagaagctttggaacgttcttatcgtgaaattgcccaaatgggacacttcaaccctgaaaatattcagccggatgttcaaccggatatgactaacggaacggttgatatcaactggaacttggaatcgaaagccaatgaccaggtagaattctctgccggatggggacaaaccggtgttatcggtaaattaagtttgaagttcacgaacttctctatggccaacttgttcaataagagtgacaattaccgtggattcctgcctcaaggtgacggacagacattaaccatcagtggacaaaccaatggtagctactatcagtcatacagtgtatcgttcttcgatccgtggtttggaggtaaacgtcctaattcattctcagtttcagcgttctactctatccagacagatatcagtagcaactattataactccgcttacatggataattactataattacctgtatggtatgaataattattatggaggaagctatggtaataactatgagtcattctatgacccggataagtccatccaaatgtatggagcttctatcggttggggtaaacgtttaagatggccggatgactatttcacattgacagcagaattgtcctaccagcgtttcatcttgaaagactggagctacttgtacatcaagctgaacaatggagaatatatgtctacaggtaactgtaacaacctgagtctgggattcaccttggcacgtaactctacggataacccgatattcccgcgtcgcggttctgaattctcggcatcagtacaactgactccgccgtattcattgttcagcaacaaggattattccacttacggaaaagacgactatgatgaagctgcaagtatgtttaactggattgaataccataaatggaagttcaaagccaaaacctatacagcattgacaggtgcctcaaaatgtccggtgatcatgacacgtgcagagttcggtctgttgggtcactataacaaatacaagaagtctccgtttgaaacattctatatgggtggtgacggtatgaccggatacagtacaagctacgcttcagaaaccatagcattgcgtggttatgaaaacggtgcattgacaccttatggtagcgaggggtatgcttatgtacgcttaggtgccgagttgagatatccgttgatgctggaaaactcaacaagtatctatgcattaggatttgttgaaggcggtaatgcttggacggaagtcggcaaattcaacccgttcagtttgaagcgttcagccggtgtcggtgtccgtatcttcttaccgatgattggtatgatgggtatcgactgggcatacggtttcgataagattaacggtagcagccaatatggtggcagccagttccacttcatcttaggacaagagttttaataacccataaaacaaagtgattatgaaaaaggctattctattatctctattatttgtggcttgtgcattcacagccagcgcgcaaaagtttgctttgattgatatggagtatattctgaaaaatatccctgcatacgaacaggcaaataaccaattgaatcaggcttcccaacaatatcaggccgaaatagaagctaaagccaaagaagccgaagcactgtataaggattatcagaaaacagcctcttcattgtctgccgcacagaaatctcagaaagaagaagcgattattgctaaagaaaaagaagcggcagaactgagaaagaaatactttggcccggaaggagaaatggctaaaaagcaacaagcgctgattaaccctattcaggacaaaatatatgaagcagtgaagcagatagcccagcaaaacggatacgatgcggtagtcgaccgttcatctgctcaaagtattatttttgcgtctccgcgtattgatatcagcaatgaagtgctctcaaaactaggatattcaaattaatttcatacatttgcatccgataatcaaatttgcaataactaataaaaaatagaactatgttgaagaaaattgctttattacttttacttatcgctccaatgagcgtatttgcacagaaattcggtcatgttaaatttgcagagattctcactgttatgccggaatacaccaaggctcagactgatattcaggctcagcaaaaacaatatgaagatgaaatgaaacgtgcttcagatgaattgactaagaaattcactgagtaccaacaagaacaggctaacttacctaagaatatccaggaaagacgccagaaagaattgcaggaactgaacgaaaaaggtatgcaatttcaggcagacgctcaacagcagttgcagaaagcatacgccgaaatgatggaacctatctataagaagatagatgatgccatcaaagcagtcggacaagaaggcggatatgtttatatctttgacctgaacagaactgatattccttttgtaaacgagtcattgtctacagacgttactccggcagttaaaggtaaattaggacttaaataattcagataaccccttcgggcgcggattacacagatttcacggacttatttataaccgtgttaatccgtgtaatccgtgcctttttatagaccattgtcatgaatcaaccatcttcttccctttcaaccggtgctatcggcgtttttgattccggttatggcggactgactattctggataaaatccgggaattcatgcccgaatatgattatatctatttaggagataatgcacgtaccccttatggcacgcgctcattcgaagtggtctatgagtttacccttcaagctgtaaacaaactctttgcattgggttgcccactggttatattggcttgtaacactgcgtcagccaaagcactccgcaccatccaacagatgaacttaccccaatcaaatgaccctacccgccgcgtactcggagtgatacgccctactgccgaatgcataggaaccatcacctatacacggcatatcggcatacttgccaccgccggtaccatcaaatcccaatcctatccgctggaagtacataaactatttcccgatatcaaagtgacaggtttggcatgtcccatgtgggtgccattggttgagaacaatgaattccggtctcccggcgcagattattttgtgaaacaatatatcgcccgcctgctggaagcagacccgaaaatcgatactattgtcctgggatgcacccattacccgttactcatagataaaatcaagcagttcactccttctcatatacaaatcatagcgcaaggagagtatgtggcacacagtttgcgcgattatctagaccgacacacggagatggatgcccgttgcaccaagagcaacagctgccgttttctgacgaccgaaagtccgggtaagtttgaagaatccgcttccatctttctacgtcaggagaatataaaagtagaaagtattactttggaataaccttttgctccccctgtctgttatagcatcattacctatttatgaaaagattatgtatgccaataaagtaaaaaaaatagctgccgtacacgatttgtccggtgcagggcgtgtctcgctgaccgtcgtcattcccattctctcctccatgggctttcaagtgtgtccgcttcccacagcagtattatccagtcacactcagtttcctcatttctctttcctcgacctgacggacgagatgcctaagattattgccgaatggaaaaagctggaagtacagtttgatgccatttatactggctatctgggctcacccagacaaatccaaatcgtatcgggatttatcaatgacttccgccgaccggacagtctcgtcgttattgaccccgtgttgggtgacaatggcaaattatataccaacttcgacaaagagatgattatcgaaatgcgccaccttatcactcaagccgatgtcattacccccaatctaaccgaactgttctatctgctggacaaaccctacaaagccgaaaactcagacgaagaactcaaagcctacctgcacgaactttcggacaaaggtcctgaaaccgtcatcattaccagtattccggtacaaggcgacccacgaaagacttcagtatacgcctataaccgttcgagcaaccgctattggaaagtaacctgcccctacctgcctgcccactatccgggtacaggagatacatttacaagcgtcattaccggttctttaatgcaaggcgacagtctgcccattgccttggatcgtgccacacaatttattctgcaaggcatccgtgccacattcggctacgaatatgacaatcgggaaggtatcttattggaaaaggtgcttcataatctggatatgcccatccaaatcagcagttacgaactaatttaaccggaaataaggagaaaagagaatcacaacaaacgacggctgaggtaacgcacaggataccagactgaaaggaagcctaccaccaataccgtaaggaacaccaacacaatgtcccaggcatgtacactgaccggataggcatccaccacaaagtttccggctgctcctgagccgcctcccaacgcaatcaagccaaactcctgttggataaagcacaaaaccaatcccaatccgaccccgatgattgctccgaagaaggaaatcatacgcccttcaagcaaaaatatccgcgttatcagtttatcatttgctcccaaattacgcaatgtcaccacatctgcccgcttatcaataataagcatggaaagggaacctatcacattaaaacacgcaatcatcagaataaaagtcagaaacagataagagatgagtttctctatctccataatacgaaatgtatccacctgttgctcatatcggtcctgtacccgaaaaccatcgcccaaaatcgcctgtatcttcttcttgacgctaccaatattgacatcagactttaatttcagttcaacagaactcacctccgtatcatattgaaacagcttacgggcaaattgcaacgaagtcagaatatatgaagcatcatatttttgctgattcacagcaaacaccagcccgctggagaacaaattggccgagttgaagctggctgccgggttagccatgttgacctttgctccccgcttgggagcataaatttccaacggatccagaaaacgaattccagtaccaagtatcgaaaccaactcaatgcccggaatggcataatccgccacttcatcatggagcaacaattcccctcgcccaaacaagatactgtctatgggagtcagacggtcaaaattatcctctaccccttttattaccgccatagtctgtctgcccttatactgaaccatcgcattttcctccaacgattcggaaaagacggctacctcaggcaacttcttcaactccagaatacgttcatcctgcccgtcaaaaacctttccggcggttgccgtaatcttcaattccgggtcaaaggcagtgaaaaaggtagctactacatcctgaaatccattaaagacggacaatgtacataccattgccaatgtagccaaagctactccacaaaccgaaatagctgatatgacattaatggcattatgcgatttcttagagaaaaggtagcgcttcgctatataaaaggggaaattcaccgttggttattttttcaacagttcatcaatacgttcgacataatccagcgaatcatccacaaagaacttcagttcgggaatgatacgtaactgatgacgtacgcgcgtacccagttcaaagcgaatagacttcatattatcattgatgttctttactatttcctgactcttctccgaagggaacacgctgaggtaaacacgcgctatactcatatccggactgatgcgaaccgcacttaccgacaccaatacaccgttcattgctttagtctgaagcaggaaaatctcgctcaattctttttgaataagacgggaaatcttattttgtctggtcgtttccatattactacttatttttatttctttcttattattgtcagtccgtcacgcaagggcagaatcactttctctacccttgagtcggttgccaccaaatcattaaatttcttgataccgatagtttgaaggtcggtatgatgcggttcttccaacacatggccatcccacaacgtattgtccgctatgatgtaaccacccggcgaaagcatcttcaataccagctcataatattcgatatacttacgcttgtcaccgtctacaaacgccagatcaaacgtaatgttcatatccggcaacaactgtaatgcatcaccgatataaaattttattttgtcagcgtaaggcgagccctccaaccacggacgagtaaaatcctcttgttcgtcattaatctcaaaggtatgcagcatggctccttcttcgagaccttcggccaaacataatgcagaataaccactgtaagtacctatttcgagtacctgacgagggcgtatcatccgcacaaacattttaagcatacgcccctgcaaatgtcccgaagccatgcggggacgcaataacttgacgtgcgtatcacgataaagagccttcagataatcactttcttcatcaatatgctgaaggatatattcgtcaatagcatctgtttctttcatgcctaccgatattataaataacggttacggttgggaagcacataatccatcgcatacttcagcacatctcccaccacattgatttcgaggaatgaagtctgcgttccctgcttaccgctactcaggtatgccaccatatcgctctcgcacaacacaccatcgtccagcaatttgcgcaaagcagcaaaatagtaagcttgtccgtttgctttttcaggcatataaatggcttctacaccatatgacaaagccaaatgacgcatggtcttttctttataacagatagccaataccggatactttccgcggaaagctgcaatattacgcgctgtacgtccactgaaactatcggtaataatagcacgaatcttcaatttgctggttgcctttaccgcctgttttgcaagaaatgcagtcacatcattagaagactcgtccaaaggaattcggatatcattttccgacaatttatctttctctgcctgagctgccactttggtcatagtctttaccgcttccaccggatattttccatatgcagtttcaccactcagcatcaaagcatccgtccgataataaatagcattggcaatatcagtaacctccgcacgggtaggacgcggattattaatcatggtatgcaacatctgggtagccacgattaccggtttcttagctaaaatacacttacggattaacatacgctgaatgcccggaatacgttcttgcggaacttcgatacccaaatctccgcgcgccaccatcacgccatccgccacttccagaatctcgtcaatgttgtcaacaccttcctgattctcaatcttggcaataatcttgatatcgctaccatatgtatccaatatctggcgaatatccaatacatcctgcttgtttctgacaaaagaatgggcaatataatcgatatccttctcgatagcatacaatatattgttacggtctttttctgtcagcgaaggaagattgatgcgaacacccggaacatttacacttttacggtttcctaaagtagcctcattctgcacctcacaaaccaaatattcatcggttttatctactacacgcaattccaaatcaccatcatcaatcaatatatcgccatccacctggaggtcatgcacaaagccggggtaagatacggcaatacattcacgggttgtctcctgattaggattaccgacaattttcacgcgatcaccaatcttataaggaataggttcaccgcctgtgatagcagttgtacgcacttcaggcccttttgtatccatcaatatagcaatgcgattggaaacctcacgcacatttctaatcaacttctcgaaaccttcacgcgaagcatgcgccgtgttcatacgaactacattcatacctgccttaaataggtctctaataaattcaacttcgcaacgctcatctgagatagacgccacgatttttgtctgtttcaacatcataatcttatcaccttttatatacgtacctaaaaattatttcttcatcaacaacgcttctatcgccaaccgataggaaaccagcccgaacccgcaaatcactcctacacaagcacacgaaatcattgatttatggcgaaactcctcgcgggcatgcacattcgaaatatgcacttcaatcaccggagccgtcacagcccgtatagcatcctgcaaagcgatagaagtatgggtatatgctccggcattcaacacaataccgtcataatcaaaccctacctcatgaatcttatttatcatctccccctccacgttcgactgataatactcaatctcaatatcgtgataagcacgtttcaaatctgccaaatagtcttcaaatgaaacagccccataaatggaaggttcacgtttgcctaataaattgatattaggtccattaataatttgtattttcatatttaatgctttgtctgaattttaatacctttgcagggaatttgggtacaaagttagaaaaaagaaatgaaaagaaccgagaaaacggacaagatattagcgaaatacaagcaatatttaaagttggagaaatccctatctaccaatacggtagaggcttatctcacagatttggacaaactaatggcctatctgacccttgaaaacctccatccattagaggtaacattagagcatttggaaacattttcggccggattacgcgacataggcattcacccccgttcacaagcacgtatcctgtcgggcatccggtctttttatcactttctcgtgctcgaagattatctcgagaccgacccgaccgagctgcttgagtctccgcaaataggattcaaactgcccgaagtgctcaccgtggaagagatagaccgtctcatagagagtatagacagaagcaccaaagaaggacaacgaaaccgagccatcctcgagacactctacagttgcgggcttcgcgtatccgaactctgcaacctgaagttatccgacctgtacttaaatgaaaacttcatcaaagtggaagggaaagggagcaaacaacgcctggttcccatctcgccacgagctgtaaaagaaattaatctatatttccccgaccgcaaccaaatgaagattaaacccggcttcgaggattttctattcatcagcaactttggaaaaaacatctcgcgcatcatggttttccacattattaaagaattatccgagcgcatcggcctgaaaaagaccatcagtccccataccttccgccattcctttgccacacacctacttgaaggaggagcgaatttacgtgccattcaatgtatgttgggacacgaaagtatcgggactacagaaatttatacacacattgaccgcaatatgctacgcagtgaaatcattgagcatcatccccgtaacatcaaattcagagaggaacataaataaagtgttcattgctatatccttttttaagatattttgaaaaaaaaggtccgcttaaagttagcatataatagagttttttctatctttgcacccaaagatgcatacaaaaacgcgactttgcacagaaattacattacaaacgttaaataattaaagtaactatgattaaaaagttgtatttgccccttgtggctttattggtccttgccctgtcatcatgcggcaagatgggagaattgtcttctgactatttcacaactaaccctgaagtgcttgaagcaatcggtggtaaagtgcctgtaactatcaacggtaagttccccgaaaagtacatgaagaaaaaagctactgttgaagtaactccggtattaagatggaaaggtggcgaagctaaaggtcagcctgctgtattccaaggtgaaaaagtagaaggaaacggacagactatctcttataaagtaggtggtagctatactatgaaagcttctttcgattatgttcctgaaatggctaactctgaattatatcttgatttcaaaatcacaaaaggcaaaaagacatatactattccttctgtgaaaattgcagacggtgtaatcgctacttctgaattgcctactgctgccagctcaaatgcatcatacgctaatgacgctttccagcgcattatcaaagacgctcagactgccaacatcatgttcttaatccaacaagctaacttacgcaacagcgaattgaattcagacgatatgaaagaattccacaagaaagttgctgaaatcaatgctgacactaagaactacaaattaaacaacatcgaaatctctgcatacgcttctcctgatggtggtgttgaattgaacaccggcttggctgaaaaccgtgagaacaacacagaaaaatatatgcagcgtcagttgaagaaaggcaaaatcgatgccaaccttgatgctaaatatactgcacaagactgggaaggtttccaagaattggtttctaaatcaaacttgcaggacaaagacttgatcttgcgcgttctttctatgtatcaggatcccgaacaaagagaaactgaaatcaagaacatctcttcagtttacaaaactttggctgacgaaatcctgcctcagttacgtcgtgctcgtttgactgccaactatgacatcatcggtcgcagcgatgacgaaatcaacgaagcgttcaacacagatgctaaagtattgagcgtagaagaattactgtatgctgctactttgactaacgataatgctcgcaaagaagctatcttcactaaaacaactcagttgtatcctaacgacttccgtgcttacaacaacttaggtgaattggcatttgctgccggtgacgctgctaaagctgaatcttacttcaaacaagctgcttctaagaatgctaacgctcctgaagtaaacgcaaaccttggtctttgcgaattggttaaaggtaatgtagctgctgccgaatcttacttaggcaaagcaaccggagctaacgctgctaacgaagctcttggtaacctgtacatcaaacaaggtcagtatgacagagctgtaaatgcatttggtgatgctaagactaacagtgctgctcaagctcagattttggctaaagactacaacaaggcaaaagcaactttgtctgctatcaagaatcctgatgcaatgactgactacttaatggctatcgttggtgcccgcactaacaatgcttcattggtaagcagcagcattaagagtgcaatcgctaaggacgcttcaatggctcagagagctgcaaacgaccgcgaattcgctaaatttgctgattctatcaaataatcagactatttaaaataactaaataaacagccgggatgtcccatttaaaggatatcccggtttttttatgcaaaataacttccatttatactgcctgttacctccaaaatgagtattttcgcagaaaataatttgagatgaaaaaattatcttttcttttccttgcgcttatactcctgctgaccggttgcagcaagaagagcactttcactttaaaagggaatatcagcagcttgtcttctgataccatactcgttttctaccaggagcctaactataaactggatacgattatcgcacaaaacggaaagttcagttacactatcaactctgatactttcaccatcttctcattgttacttagcgataaagaagttctgcccgtgtttgccaacaaaggagaaagcgtaacgtggaacggcactcccggagatatacaaatcaaaggaaaaggagacaacgaaagaatggcatatatccttcaagccatcaaaaaaacaaaagcagacagccttatgtttacggtagaccgtctcattaaagaaaaccctcactcattcgccaatatttatttaatagaacaatattacgtgcaggacagtcttcccgactattcgcggatagatgaactgatacaggggctaagcggaagcatcaaggacacgccttacatgatagacctacaagccaagctgaaggaaaagaaggaactgaaccgacaaagcctacacacaatttcctgtaccgataaaaacggaaagaccattggttggaaagagatgaaagacaagtacatccttctcgatttttgggcaagctgggacaaagcgagcatggcggcacaggattcactggtcaacgtacagaaggcattgaaaaaagagaagttcctcattgtcagcctgtcactggacttggacaagaaagaatggttgaaggcctgcgacaaagacaccacccggtggaaacaagtatgtgactttaaaggctgggacaactccatagtcaaacaacaaggcattacccgcctgcccgccaacctcctgatagcacccaataaacgagtggtcgccagagacatcagaggaaaagcattaatagataaagtaaaacaactcatagagcaagacaaagaaaaagagaaagccgcaaaagcagccgaaagagctcgtaaaaagaaaaaataaaaagaatgctggtaaaagtctatggcgcggctgtacaaggaattgatgcaaccattgtaactattgaagtcaatagttcgcgcggtataaaattctttcttgtcggtctgccggactctgccgtaaaagaaagccatgaacgtatcatatccgccttacaagtaaacggatacaagtttcccaccagtcagatcgtcattaacatggctccggccgatatacgcaaagaaggctcctcatacgacctgcctttggccattggtatactggctgccgcaaaaatagtttccgaagaaaaattatcacgctacctcatcataggcgaactaagtctggacggaagtctgcaacctatcaaaggagctttatccatcgccatcagtgcacgcgaacaaggctttgaaggattcatccttccccggcagaatgcccgcgaagcggctgtggttaaccacctgaatgtctatggagtagcaaatataaaagaagtcatagaattcttcaacggtgaacgagagctgaaacccaccatagtcaatacgcgcgaagaattttataagaatcaggagaatttcccatacgactttgcagacgtaaaaggacaggaaagcgtgaaacgcgcactcgaagtagctgccgcaggagggcacaacctgatcatgattggcgcacccggaagcggaaagtctatgatggccaaacgactgccgggcattcttcctcctctttcgctgggcgagagtctggaaacgaccaagatacattccgttgccggaaaattgggaaaagactcatctctgatagccacccgccccttcagaagcccccatcacaccatctcgcaggttgcaatggtgggcggaggagccaatccacaacccggagaaatcagtctcgcacatcacggtgtcctctttttggatgagttaccggaattcaaccgcagtgtgctcgaagtgctccggcaacctttggaagaccgccacatctccatctcgcgcgccaaatacagcctcgactatccggcaagctttatgctggtagcctctatgaacccctgcccctgtggatactacaaccatcctaccaaggcatgcgtctgcaaccccggacaggtacaacgctacctgaatcgcatctcaggaccgctgttagaccgcatcgacatacagatagagatcgttcccgtgccatttgaaaagatatcggaaaaacagcaggcagaaagcagcgcttccatccgtgaaagagtaatctgtgctagaaaaatgcaagaaaaaagatttgccaatcatccgggagtatattgcaatgcacaaatggaaagccggttgctccacctatatgccgaacccgatgaacaggggctcaatctactgcgcaatgccatgacacgactcaacctgtcggctcgtgcctacgaccgtatcttaaaagtggcaagaaccattgcagatctcgaccacagcgaacaagtaacgtccatccatttggcagaagccatcagttacagaaatctagacagggagagctgggcaggttaagtctgccacagccctttcataatagaatagaatggatagtttagttttatttcttggattatttcttcttcgatgaaagtttcacctcagtcttcagttcataagctcccgtataccagcttccgcctttttttatttgggacttttccatttgatccacccctagagtaacagattcaaattctcccccattctcctctccatccacatcatggaaaagcacttcctgactgcctatgctgaaagtatgcgccttgtcactctcgaactcaccttttacatccgtatacacagtatcataatccgacacatagtccttctcacccttcacaaaaacagcatccaagtcctttaccaccacctgtaccccttttatcggcttcccggtttggtcaagtacttttcctttcacctgataatccgccgagggagtcccatattcacataactcattaccgggaccatcactgtcacaagcagtaaagcccagcaataccaatacgccggataacagcttacgcaccgcgattttctttttcgtgttcatattttctagttttataatgtttgcaacctcttataatggcaaaacagcaaatctcccttcccgtcacgcagatgcatgccgtttcctttgcaataacggaaaaactcacagtcggcacactcccctttgcgcatccactcgcggtcacgataaggctgatatttgttattccacacctccataaagtcatccttataaatattgccttgatgatagtcggcacggatgctgggacaagcagaaataacaccgtccaccagaacagaccctaccgatacccctgcctgacaatggaagaaatgatcgcgcacatctccctcatagtttccgaggaaaccttcacagccataagccgtctttatccttccctccttgcgcgtacgtttgataaactccatcaccccgcgaaaatccctgttcgacaattgcagttccggatcttttgccgcacggccgacaggaaacacagtgaaaagccgccagcgtttcactcccaaactcagcaaaaattccttcatctcctccagacgcatataactatgcttgttgacacaagtcaccacatcaaacacaaatccgggttcttccgccatcatctttattgcctccaccgcacgttcaaagctctgtggatttcccctcatccagttatgatctgccgcaaatccgtcaaggctgaccgttgccgtatgcaatcccgatgccagtaaacgacgaaaacgttcgcgcgtcatataaagtccgttggtcaccatcccccatgggaatcctttatcatatatagcctttccacactcctccaaatcctctcgcatcaacggttcgccgcctgtaataatgacaaataccttatgcggatctgtagatgccgccacgctgtcaagcactttcagaaagtcttctttcggcatgtcagggtgtccggctatcttcttgcagtcacttccgcaatgccggcaatgcaagttacagcgcaacgtacattcccaaaacaattgcttcaacggatgttctttcagcaaatcattattcagcttccgggctatttccaggccgatgcgatgtctcagagttagtggttcattcttcatttttcttatctttcggcaaacaaaaacattttcgttttacttataaaatgtcaatttaactaaaatactgcatcaaaagaaaaatattttaccctttaaatgaaatatcccttatttccttatatttccttccactttcctccctgcttctaccccctttgaacattcaacttccatctttcaactgccgggagataaatatcaatgcttgagagacagacatat

SEQ ID NO: 6759 - DNA, 3471 bp, Unknown
  gut microbiota DNA sequence
ggtaaaccgccccattcggagaataaaaaaaggagctacattttactgtaactccttgattctcatcagtcggggtagcgggattcgaacccacgaccccctgctcccaagcaggtaagatatctttttaatagtcctgattattaaatgtttatggtaatgagctgaatcttgttattaactatttcaaattaacactctgttttaacaactctatttcacgatttagaagagctatttcttgctcttgagcactacatttttgcaatgcttcccgtagctacttccgaagagaagctatcagttcatctttatcgttcatatcccagttttgttataaaaaggttttcccacacgacttatatgatccccaatcggagtacctatattcttattgtaatcaaccacatcgaccttatacaacaatcccaaatcctctatttgaatattgatatccataagctgattaaaggtaagaccatcccctaccgcagccaggtcaatatccgacccctctgaatacgtacctttggcacgggaaccaaaaataagcaccttttctatattaggataacgccggaacacgctgcaaatatccattattaccgtatcacttaaaccgtacatatcaaaacaacgtattcatttcaagccgtagcttttcttcattgagtctattatccaaccgctgtaataaataagaatactccttatatatattacggacgatttcaatagcatcaccttcattataagtatgtgaagtggtaactctagctttcgccatcctgcgccaaccatcatgatcagtaatcataccgtcctcgaaagctttctgaagcgtaccgttcggaccttgcacaaactcatagcctttgtactttaataagtcttgaagaaccttccagccaagttcaaaagtatattcaaaccgctgtatcaacccttccatttccaattcagacaaatcatccactttcttatcagattctgttatttcttgaatccgcttattagcacgatgaaagctgtcgtatctttgaagccaacgtatatcttgttccataattaatttattatttattgaaaaaatacatcttgttcttgagtcctaccttttccagattcatcgtcccatgtaaaaatgaatttgtggctaggtttatgaccacaacataataaaacagatagctctactgaaccataaggtataagacttggtattgggaacatagtaggatcaccgattagttctatggcagaatcagcatccaatgtttcagaagtaaaatcaatattagtagctttggctttgcccttattgtatattttcattttccaaattgagtttccttttctatcagttgttctatacacattagcttctatcatagcttgtttcttttccaaagattccgctttacttttctcaatctgatattcattcagctgtacctgttgtttattcaattgttcttgctgttcatttaatttcttttgttgttgatttaatctataagtatgattaaaatacatatagatacctcctaaaaaggtcaatgcagtgattaaccagtttatattttctgcgatattttccattgtaacttatattttaaaataaatattcattatggttgtttcaaaatattatatcactaaatcatttgataaaactactggtcatattcgacatacaattatcaaaaatggaaaaactgtatatgacatgactttcaagttagccccaaatagtaatattccttttagccccattgattttctagaagcatctcttaatggtgaacaaacaataatagtacctcaatattatagagaattacagaatattgcttttgaacttcacttgttaaatgcatgcaagtctaatgatgaaaaaaagaaaaatatcatttgcaaataagataaagggtctaattaatagaattatatcgtcatttacttaatcttaaacaacttacttcctttaaaagcgttttgcaaagattgctttatgtaatcttctgcatcagcttgtatttgcccttttattacttcaatttcctcctgattatatgagagcaattcattatatcctcccaaatactctctgccacattttacacatttaatgtatgatttatcgtcattaaactcaaaagattcagtatcaccacacgtgatacagcgaagctttcctgtatattgttgtttcatagtcctttctatttattacccattaatacattaatattacattgtaagaggtatccaatagaactcttacactataagtcaatgcaataagctatcatacttttaagagattagccaatacttgagttatcaaattccagacataggcagaatctgacattacaggtatgttttttccgtttgcaataatcacacagcaaggatattcatgcccggagccagaatttatcttttctataaattctggttccttaccagtacatggtattatattctctatctggaggatatttatatctttagttccttctgttgtataaactttgatgtttgcatctgaacgtttaggagaaaaagatgttatcacctctatcaacttttctttatccttcaaaacacccatcaaacgttccacctcagcaacagcatcatctctttcatttctgtacacctccagtttattattctcccctgcaacgacagagttgccattcccacttacaacggcagagttatctttaggcaaatatttatcttcaaagaaatatgttataggaacatttagctcactgcaaaatcgttccagtatactagaatcaaaatcatcttttttatagtatttgaacacactagacacactcatgtctatttttgacgcaaactcctctattccaataccttttttactaagaagttcttttaaacgttctccctttttcatgtcttattattagaattgtaaaatatttatagtttaatggaaaaacttactgtaattatttggtaattatttggtagttatatggaaagtttttccatttacaccataaagttagtgcaaatacgcaataacagcaagaaaaagaagaataaatagattgtaaactctaaataaaaaattgaatatatggaaaatcaattagaaattatcaaatccaatcttccctggttatgaaggaatcattgcagaaaaagttggatgctcaaaaccagatatttccgctgagccagttttgtagttaccatgattgttcattaaaaaagttagcaacaagtatacagccgttttcaaactgagccgttttttttaatgattgaacaatgcgatagaaaaagaaaaaagcattataaaacaaggattatccctcatttttaatgccttttttatcagtcggggtagcgggattcgaacccacgaccccctgctcccaaagcaggtgcgctaaccttattaatatcatcattaaataactg

SEQ ID NO: 6760 - DNA, 472 bp, Unknown
  gut microbiota DNA sequence
aatagaaaaactttaaatttataaatttaaaaaactaaaattggttatacatattctgttggttccgagagcttttctctctgtccatatttcatataacgtttgggagaaacacccgtcacctttttaaaagcagcataaaacgcacttcgcgacagaaacccgcagcgttgaggcagctcctccggtggacacttgcccgaacggagcagttccttggcatattccacccgatacgtgttcaccaactctttcagatggcaaccgaagtagcggttgaccacgttcgacagataagtctggttcgtttcaatcatatcgctcagcttcttcagtgaaagcttcgggtcaagaaacacttggcgcacttccaaataatacaatacatatttatatagctcacaatcgactttccttttcggaaccacttcgctgtccgcatacttctgctcccaataaagccgggcagccc

SEQ ID NO: 6761 - DNA, 4325 bp, Unknown
  gut microbiota DNA sequence
gctatggcaaagaactgcctttgataaagaccatgacgggaacggcatccatcgtcacgaaggaaaaaagcctgctcagcaggttgctgaatttaaaataagagtttatgcttaacaaaatgggagaaacgattgccttgttccgcctctatcgcgacacaggagaagaagaatggagcatacgggcggagaaattgctggatgatatatggaacggatgtaccgaagatatgtcattggcatacggagacggcctgtgcggaataggggcaggaacggaatatctgatacaaaatggttttgtggaaggagacgcggatgaaatcctggcagaaatagacagcagggtgtttgccgccatcaatgcccgcccaccattcgatttaagcattgaacagggaatatcaggactggcttgttatttataccatcggctttgctacaggaaggattctgaggaaccggtcgtgctgaacttgaaagaatacaccatctatctcattgactggatagctgaagccttacaagatgatgctaccggcaaggattattatgaagtctatttcattctggtcttattgcacactctgaatataatgaatgccaaaatagaaaatctattggaatggtgcgacaaggaaataacagcagctcatgtaaagaaccgataatcaaacgatgacaaccattatgaaagacactccttccatgcctcctgtaagtattgtgattccgttgcggattgaatcaacggaacgtgaagcaaacctgcactgcgtattgcagtatctgctccggtcgccgtttgtatatattgacttgctggaagctgacaaagaacgccatttctttttcactcatcatgaacggatacgctaccgtttcgtgcatgacgaagaacctgttttctatcgcacccactacctgaacgaactgctgagggaggcacaacattccatagtcggtatatgggatgcggacgtactgatacctgaagctcaactgattgctgccgtatggcatgtcttagggggatgcgtcttatgcttcccttacaatgggaaattccgttttctggagaaagaaagaagcaatgccattcggaaagacatggatgagctgcaggccggagaaggttattgcctgctggggcgaccgtcggtgggaggagcctttctggtgaataaaactaaatatctggaagcgggaggtgagaacgaaggtttctacggatgggggcccgaagatgcagagagagtaaaaagactggagattctggaattgccgatagcaagaacgaaaggattgctttatcatctccaccatgaaagaaagccggatataggagtggataatagaaaaaaggcacagcataaccagaaagtacttctaaatacttgccggcaaagcaaggaagagttgacaaaggcactgaaatgccataccggaatattttcttatttagacaaccataactgaaaccattatgaatatagcattcctttcctccctgaacccgacagacatacacaactggtcgggaacattatattatatgtatcatcatctggagaaaaatcaccggctcacttggaccggtcggcagcaattggaagaagccatccaattccaccgggaaaacttcggggaagacactcctttctcaccggagaaatatgcccggctattcggaaagatgctgaccgatttattccattatgaatgctatgacctgattatctgccgggactatttctttttagcctatctgacaacggagattcctgttatatatattggtgacaccacttgcagactcttcaaccaatacttgaaaatcacagattccccaagactcgatttagccgaagaactggaagaaagatcaatccaaaaggcgacacatattgtatatgcttccgaatgggccaaaaacagtgctatcaaccactaccatgcagcacctgaaaaaatcagtgttatagagttcggagccaatatagacaacattcctgagtataccggccatgattgtacatctgcctgcaacttgctctttataggtaaaaattgggaaatgaaaggcgggaataaggctattgacgttttccgttctgtaaaacagaaaggtattccatgcacattgaccattatcggaagtacacctgcgccaatgccaaaggatgcagatattgttgtttatccttatatcgacaagtcatcagccgaagggcaaaaactttttgaacaaatactccgccaatcccattatctgattgcccctactctgtttgactgtttcggcattgtatattgcgaagcctctgcatacggcatacctgtactgaccaccgatgtgggaggtatcagccaggctgtccgtaatgggcacaacggattcttgtttgctgccgatgctcccgcatccgattatgcagataaaatcatagatttatatacgcataaagataggtatgccaatctcggaagagaatgtaggaaacattttgaaacgcgcttgaattggaatgtttgggagaagcgcatgaacgacttgcttgtttccataaaagaaagggaagaagggacttatatccccgtatacgccattaatatgaaagaaagggaggaaagaaggaaacatatcgttcgtgaatttgaaggaaaaccggaatttgaatttcaccttgtcgaagcatgcacccactccaaaggtacgattgggctttggaacagcatagtaaaggtgataaagatggctaaagaacaggaagaggatgtaattgtcatctgtgaagacgaccacttctttaccgagaattattcccccggactgttatttaaagaaatccgggaggcgtatatgcaaggagccgaactcttatcggggggtatcggaggattcggacaagccattcctgtcgggtatcatcgttattgggtagactggttttggagtacccaatttattgttatttattcatctgcgtttgatactatcctgtcctacgaatttcaagaggatgatactgccgatggggtactgtccgaaattatttataacaagatggtgatttatccgtttatctcggaacaaaaagattttggatattcggatgtcaccttgggaaatatggaatacccgggaaaaatcagggaattcttcaaaagggccaatgccagattcaaaatgatacgaaccattcaggatttatctgtgcccaagtattaatgtttgtctaaattcaaacattctcaatgggtatcttgttacattccatcacccggtacacattttccctggtgtctgcttacccataccggattgtcgtatgggatagacgggcgcaataacatatatacgtatagtcttatacatacgtatgtgtgggccgatacgtatatacgtgcaggctcacgcgtatatacgtgtaggctcacgccaccgtatgtgtgattgaccgatgcgtacatgcacattaaaaagaacaggcagctcacaccgagtgctgccaaaagaccttgatgttttaaaaaaagatggtggcgttttaataaaaggctttgatgtttcttaaaaacctccaagtcttttttttaaagcccggcgtgtttttatgtaatggcaggtggaattctcccctcattaagccggtcattcctctttttccgttcatccttacattttagtttgaacaagcggataatcaatcggttaagaatgacaggacctcccctcatcctcctttcatccgtgcctcccaagtcccttcacaatctgccttcagcctttgtctcgccagaagaagttttacagatgaaaggaggctgaaagggggatgaaacgatgttctttcacaaccaaaacccccatcggcaggacgtttcagcagtagatgaaaggaggaaggaagaaacaggtttccgcttgtagggcgaaaaaacgcagttatttttatggattcagtcattgcacgacaagccttttaggtatttcacggttactgcttattttcctccccctcttgcggtggattcaaagaaacagtaggcagcaatagcagatagagccccaaagttttttgaactcaacataccggcgatgcacgataagaacgatgcatttgtcggatgaaccatactcttttacgtgcgcatacatgcgcgcccgcaatataattatgtgtgttccatttccttcctgttctgttgttctcaaaaagtacttgtgatgtcctgttgtaaatcagcatgttacaaacaagtttcaaaaaagtgtaagaaaaatcagatgatatgtttggcagtcaggttgaaaccgccta

SEQ ID NO: 6762 - DNA, 2104 bp, Unknown
  gut microbiota DNA sequence
ccaatagagtaaatttatgcaatataaaaaaataagatatgagaacattaaagacaatattagctgcattagttttggcaattacagcaagttcttgccataaagacggggaacaggctgatgccacttcgccattaaaagacagtcctgttgtagcccaacaagtgattaccttaaacggagacacaatcattgtttgtgatttaagtttattgaaagataccattgatttgccattaagcacattcgtttctgattttgaacttgtagatttgggagaagatgaagaagcattgataaaagagaccagcggtggagggtcaatagccgtaagtcccaactacataggaatttattcgggtacaggatataaattattcgacaagacaggcaaatatatcacttctttgtctgcacggggacaaggtccaaacgagtatgccttttccatttatgacagttacattgacgaaaagaacgacagggcatatttactgccaatgaatggcaataaaatacttgtttatgatttaaaaggaaatgcacaaccatacattccgttggcacatgaaaccacgaaaggaaagttttatgtagatgaccaaaagaaactactctatgtagctaatatgcctttttctgatacagcctcaactttttggatacaagactttgaaggaaagcttatcaaagaaatcatagccggacacttaaagattgtaccacctgatttcagcaacgatataaatgtatccatgaatacagaagaaatagactactcggtattccattggaagaatactgttgacacactctatcattataatgaagcggataataggcttgcgccctcttttaccgtcaatttcaaggataatcccatcctgcacgattatatagaattgcctgattactatcttataaggctaatagaaatagagtctgactaccgttatatatatggactgattgacaaaaagacgctaaaaggaaactatatcaaattaaagctggatatgctgggaaatatagatgcccctgcatgggcaatatttgaaaggggattatatacagctaatatttacgcctattatttacagggacaatgtgacaggttatctgatttgtcctcattaccttccggcattgccaagtacattcaggatttacagcaaaatgattgcgaagatttaaataatataatcttgattgggagattaaagaagaatacagcagagtcttttatgatgaacgacaaagactatcaggagcaaccccaaatgaacaaaacagttgacactataaagaaagagaaagaagaagtttctttaaaaagaaccggtaaaaaggaagaaaccattactgaagaagatgatccgaatcgtatttacaccgggtttggcgttttctcgcatataccattattaaaaggcggactagactatttcagaaagaacaaccgctataacgattgggatagcaaaaaaccgaaagaaacactcatcgaatatgtagttgagaaaaacggaaaggcttctcatgtgtctattaaagaaagctccggtaatgcagaactggaccaagaagctatacgcctaataaaagaagctgaatataccgttgctaaattgaaaaacgggaaagaagccagggcaggaggtatgatgattaacgtaaccttccctaccaaataatgttcttatgattatcaacatcaggagatagagccacctacaggagatatgtttgacaacacgaaaaaaaatatcccccactacttccagttggatgcgatggactgcggccccacctgtctgcggatgatagccaaatattacggcaagaactattcgctgcagacgctccgcgagcgctccttcatcacacgcgagggggtatccatgctgggcatcagtgacgcggcggaatccatcgggttccgcacatcgggagtgcgtattaccctgaagcaactggaggaagacgtgccgctgccgtgcatcctgcactggaaccagaaccacttcgtggtgtgctatgacatcaggaagaaaaggaacggatacaggttccatatagccgaccccgcctcgcagaacgtcat

SEQ ID NO: 6763 - DNA, 963 bp, Unknown
  gut microbiota DNA sequence
agtagctgtagaagcaagtcccggacacgatatcggtacagtaaccctgacgggaagattggtacctttgcaaatgcgtaaggcaaacatcaaacccgatgccgaaatcaagcgtatctaccgcaaggcaaaacctgtagatatggaaaaatacgaggaggcaaaagccaaagaacatgacacaatgatccggtcccgccagatagccaagaatctgaacctagacatgaagatcggtgatgtggaatatcaaggcgatggcaacaaagctatcttttattacatcgcggacgaacgtgtagacttccgccaactgatcaaagtactggccgaagctttccgtgtacgtatagaaatgaaacaaattggcgcccgtcaagaagccggacgcattggcggtatcggaccttgcggacgtgaattgtgctgcgctacctggatgacaaattttgtatctgtatctaccagtgcggcacgttatcaagatatttctctgaatccccaaaagttagccggacaatgtgccaagctgaaatgctgcctaaactatgaggtagacgcctatgtagagtcccaaaaacgccttccaagcaaagaaatgactttagaaacgacggatagtacattctattttttcaaagcggatattttgaagggaactatcatgtactctactgacaaaaacttcatagctaatgccgtaaccatcaccgcacgccgtgcttttgaaattattaatatgaaccgacggggtgagaaaccggaaagcttaaccgaatctgtcaaaaagaacgaacctcaaaaacccgttgatttagtagaacaagaaagcttaacccgatttgacaaacgaaaaggcaacaacagcaaccgaaagaaaaaacgtaagccggaaaataacggtaataacggagaaggtactcccaatgaaaacagacgtccgcaacaacctaaagagaaccg

SEQ ID NO: 6764 - DNA, 387 bp, Unknown
  gut microbiota DNA sequence
gaatgaattaataacgaaaacagattgattatggaacaagatatacgttggcttcaaagatacgacagctttcatcgcgctaataagcgtattcaggatataacagaatctgataagaaagcggatgatttgtctgaattggaaatggaagggttgatacagcgatttgaatatactttcgaacttggctggaaggttcttcaagacttattaaagtacaaaggctatgaatttgtgcaaggtccgaacggtacgcttcagaaggctttcgaagatggcttgattgccgaccacgacggttggcgcagaatggcgaaagccagagtaaccacttcacacacttacaatgaaggtgatgccattgaaatcgttcgtaatatatatgat

SEQ ID NO: 6765 - DNA, 96910 bp, Unknown
  gut microbiota DNA sequence
ctagaagctgctgacgcttttcggggaatttcacgttcgtggattcggatactatctttctgatttcatccatattgtcttgggtgatacagattgcaaactggttttcactgatgtaatccattttacgaaggtggtcggaacaaccgtcaatgtcgttggtgataccggcagcagacccaattatccattcataagccggtggaattggaaatgaagcttttagtccttctgcatcttgtttccatgtttttatctctttactctttttgtcgtatctgaagaaccatgctttttgttccaatccgaaactgcctaacagacagtctttggtttcccaaaaacgatgaaatatgatataatttttccattcggcacagacctttaattggagcgggcgtttgtattttcccaatgataagaaatatctggggcggatggtgtcatcaaaagctgcatagatggtatccgtgaaaaaagaatagacattgggatgattcttataagcccatgcgacagcgaagcctgtattcggtctgtttctgtcatcaaatccggtataatccacatcaggagtttgtttttggatgatatttccatcaaaatcctgaatactcatatcgcacattaaatatttgccatcccaaacatcataaaatggaaagtggattatcctgttgttaacaatgtaataattctctgcagcggtgtgtggtttgttcaagggaatacatttcacaaactctccgttttttattttatgaacgaaaagttcattccgataagtagaagatatatagactaagctgtctctggctacaacaccaataggccaatgcatttctccgggtccttgccctgatttaccgattgtacggatgaacttacccgtgaaacggtcgaacataaagatatgaggaggaggtgtcgtattgccagagctggtataaaaaatggcactgtcggacacatagcctctattcattgctccaaccaaccctttttctgccgcctccagttttacatattccacatcctccacaatgtcactcagtagtaaggagtcgccacatggtttcaggttatttgccaaatctataactctgaagagcgtatcttcgttcacttccggttcgtctgttgctattgcggcagattgggaggacttattattgcaagagagcaacatgaaaaatcccatacacaaggttaacaagtatttcatagtgtcgtttttttaagaaactattttcaaaagaatagggaatggttaaatatgttatagcattaggcgatttcttattttccatcccctattcttgtttttaacgcacggcgtatttagaacatggttcgttattatataattgttctaaatagagtataaccaccatcagtaatacatccaccagttgaatttccaccgctaggaccgatgttatggttggcagttccattattatgggtagaagaacctccgctaccttcataattgcaaccgcaaccacatgtcctatcaccgccattgagagcatccatttcgcgatctctcaactcggcatcattcaaaccattcagtttgattttcttcaatgttttcataattcatttaatttaaaattatagtttattttacctataaatctcttgagagaaacaaaacgagaaaatatcctattgctcaagcgtgcgcacacttaagagccctattcctttttccggttttgtttaggcacactaaaagaattgcaagcgcttacagttcttttgtcaactttgtcacatatatatatgaactatatatctttaagcaagattcccaatcctgctttccaagataaactttctgcttttatgtcatgccctataattccttcccaaatttcttgttccgggcatacatcgggatacgtttcatacaaagtctgtctgtaactctcttcaaagggaagctctccttgcagagaaacggataaacggctatgtacgtaagccgctattccttttgccccggtttctaatgagcggtccttcatgtacagaagattgtattccattactttctcgtccatgtctttaaatgtttcttggatgtctgtttccataaatccttgtttaatgagatagagcatgccccatcctatgcctgccagccctcttttgaaagagatgggggtttcggtgtgcagattctccaatatttcatttaaaaactcttcagcaaaatcttcgtataaactatttccggtatatcgtgcataatgaaagaagaaaatgaccattcccatcttgccgttgtatagccctaaatcagagtgaaaagaaccatagaacaggtaatgattggcgattttttctaatagaacatcatcatcagccatcttcttctttcttaattagggcatttctaaatatctattttaaagtttcccgataaggaggtccctctgggggtagttatcaataaactataattccctgctgcataccggcttacatcgaagatttcagtctggaaatcattaaatgataccgtgcgtgtttctactgtacctgagtttcccacaatagagacagttacatcttctattgcatcaaaaaaggtaagggtaagttgtctcccatctagatatgcctcaagagggagaaccaaagacctgtccttatgggtttcaaataagcctagaatttctattatcgtaggttcttcttttgttgtaggttctccttgcaggctggaaccataaaccgttgaaatgctaaatgtgatacataaagcaatcatcagcattttaaatagcgtgtgtttttccataagtttttaatttttgtttctacaaagctaaatgtcttttttgacatatccaagtactctttaagaagaaatgagattcaatatataactgattattaatgcattaagtatatacaaggatgctttttgagattttccgaccctctttttgttctgtttaaatagtaagtatgtggttaataaagctctcaaacccttttttcccgctcatggggtactgtacttcttggcaaattaggctcatataccgttccactgaacgtctttttatgttacctgcgtattgagctatttcatcaatagacagacctaaagcagccaaatagcaaatatctagaaacgttttatctaacatagggtaggtcttatgtagcttatcggcaaagccgtttcttgataagttgagccaatgctttatatcctctctatcgtcggatatattacagggcttgttttgacttaagtttaatgctacttgcagggctttgatatctttttgttccacacaatcataattaccataaataagtctgaaacgattgttttgtttttctacctcttttagtttttggtttaaagcttcaaactgtgcttgcaatttttcatactcttgatgttgttctttttcattttgctctttttcttttgtcagtttatctattgtgttttgtattgccgcatattcttcaggtgacataaggacgtctttttcttgcttactttttaatgcgtttatctggtcttgaagctctttctgagtcttattgcaagaagtgctcattttatctaagacctcgaccaactcggctatttctgctcgcaatttttcattttcttcttttcttttcttcttgtattgaataaatagaaaccaaagtatcccactaacaatgaatattatgattatagaggaatatattatattcgtttgtcgggatttttggtataacaattgcatgtggtcatattttctctgcactttcaagacttcttgatgcaggtggctattgtagatggaatccgaggtgtctatatacagacgggcatattgggcgattttcttgtaattttctgctttccaagcttcatcatataattgattataaatatatgcgcgtagtgataagtctttggaaagcaaagcattttgaaacagactgtctgcgcgttctttttgccctctctttatatatagttgggctagtcctgacattgttttgtaagggggagaagcaggtgatatatgcaaggcgcatgagaaaaagctttcggcttcctcatatttttcctgatacattttactgaccgcaatgttatggtaaattttagactgaagaatactgtcctttagactactgctaaattgtaatagcttggttatacattggttaacactgtcagtatcatggaaaatatgatatagttgcaataagttgagcaaattactggtctgtgcagccgtgtcttttccatctatatttgcttgcacagctttttggtaatattctttggccagctcgaaattgaaagaacattgattgatatatcccaaactgctataaatgcgggcaacatagtgtttgtcattcatgctgggaatacatttttctgcttctttataagctagcagagcattgggaatgtctttggaatattcttccaatatgcatcccttcacataaaaggctgccccttttttatctgcatcattcttatctttataatattctactgcaaggtcaatcattgacgaatccgaagatacagggatgtagcaacgatattgggctaacgaaagcagcaaaacataatccgcctgctcttttccgattaagtgccgggaggtagggatggattccagtatatgcaatgccgaatcgggggcagtccatataagttcctccgcttgcgacaagttctctgtgacgtgacgagtggaacggtcgcaagctgtacatgccaataataatataatggtcaagttgaataggatgttctttctgcttctcatagtccgctgtctttactttgcctattgattggtgcaaagtaaatacaaagattcacaatatcaaagccttgtttcaaaaaaactgctaccttgctaaaaggtctcatgggaatatttgattcccccttcctcctttcattagccgttgaaacgtcctgttgatgggggttccggttgtgaatgaacatcctacattgtctgcacgtttagactaaaatacaaggataaacggagaacaggaatgactgacttggtgaggggggtgatgcaatctgcccttacatgaaaacatgccgagcttttaaaaaaagataccgagctttaagataaacatgccgagctttttttaaaacctcacggccttttggcaacgcaaatatacgcgttaatttttttatttcttaatcagctggaaggctttagccaaagcaccttcctgtggcactgcataatcaggcaatgtaccatgtatctccttttcgtccgcgccatattgccaaaaacgtttgaacgaaatagtgcaactcaatcccgacaccggcaacttataatagatgatatcgccgaaactcacattcatgccaccggattcctcgccgataaccgtccccatgccaaactccttgaaagcccaggcaaacgaaccggcagaagagaatgtatgatgacttatcaacagatatacactgccttcgtaatgaccttcttctttggtgagcggaggaataaaatttccttttgattcatcattataaaaagaccatccgggaaccatttgggttcttcccgtcaagcgtatggtggtgggcgtgacgcgtaccagggccttgcccatttgcttaaaaggcttgggagaaatgtagcggaaaagaacatctcctaccatcgaattacctccgccgttgttgcgcaagtcaatgattaaattcttaatgcccttttcgcgcagggttacaaacatggagtcggcaaacatcttcatccgctgcggattattaaagcttctaaaatccataacggctaccttcttcttttcatccactttgaaagaataatccggcacccgcgcctgctcttttttcttcggcatacggggaagaagttccgcccacgtagtaggatgcaaggtgacttcaagtttctttttgctatctttcatacgataaacgacatcgtatttatctgcggcatacatcatttcaaacaatgccgaaaaatcagaattaatacgttctatacggaagaaatcgcgttctccgcttgcatagtccatcatcgattctatcagttccctactctcctttccgttgatggaaagaacttccgcatcttggggtatcaggttatcaatgcaccctcttacacgcagtgtgtagtcggactttacattgagaaacaaggggagccgaatagtagatgaagtaaaataatcattaaaaggaaaacgaagcatggtgtgcccgtcgcctaacttcgtgaccaacggagccgcatacttaaacagctctaccgtggtaacagaatcgggcaactgctgcttcaccctatttaccgatttaaaccattcgctttgtctgcacacggaaaacatatcgggatggacttcgctgagagtatagaccaaggcgtcgatatcgaactgcgcctgcttctttgaaagcaatccgccggcagagcgtttcaacatatcccgcgagggttcttccaaaggatttgccgatacccattttatccgggtcatggcggaatcaccttgatgagtgaccaccacaaaatcataacatccttctttggctacattgaaccggatggtatctatcttgcttcggaatacaacttcctctcccgatgtctcaaatacatcgggacgaagagagggattaatcacccatggaatttgttgttctttaccatcgaccgtaatgcgcagcactttaccatcagttttaagtacttgcatttgttctactttctttgctttttctccaacaccctgtgcagccaatgggcttgtcgcgccggaaagacatagcagtaatgtccatctgaaaaattttgtttgtgtcatgttgtttgttaattatttaataatcccatactcaatccgtgagtatagtctgtgccaaagttatctttttaaatcaataaaacaaacggattggcgtttaaatatggacattctgcaatcttaatagcgttcgtgcatcagttatctccatccgcagcaggagcagcatcttcttttcgcatgctaaactcacaaccgcaatatctttggttgtaaaaatcatattccttaataatggcaatacgacgctcgctcaaaccgcctttacgccagttctgttcccaataagtaacatcgggatagcgggcagtggcataacgtcccgcctcttctatctgctccaggcttttccatcggctggatgccagtgtggtggttatcacggagaatccatgctcgtgggcatagcgcgccgtttccaacagacgcatcttgaaacagcggaggcaacgccctccacgctcaggctcctgctccatccccgacatttggcaacgccaagcctcatggtcataatcggcatctacaatctccaaccccaaggaacgggcatagcgggtacattcatctttccttatgttatactcttcaagcggatagatattcggattacaataatagatgacaggggtaatgctgtgttgcatcagacactcaatgatggctgacgaacagggggcgcaacaagtatggagcaacaccttgtcggctcctcccggaacttcaagttggaatttctttttcatacggcaaatttaatagatatttgccatactgaccagcggttcgtacaatttttcaatatccttggcgtccatttctatctccacttggtcgccgggaacaagtgtctcacccgcagcaggcagggttttgtggtcacggcggatgctgagaatgatacagttgttgggtaaagtcagtttatccacttcttttccatccaaataagagccatccattatttccacatacagatgataacgcgcaccctcgacttcaggaaactccgggttgtggttgcgaaacatcctgtcataaagcaatacattgtaaggcttgatttgaagaagttccgtaaaataataagtcagtccgcccactacgatagaaggataaaacacctcaaagtggcctgttatttctgttatcagcacaatggcggtcagcggagtgcgcaccactgctaccaagaaagctaccatcccgacaagcatcatataactgacattttcataccctatcactccgcgctgtaccaatacgagcccgaataattgtcccaacaaacctcctgtcaccagagtcggaataaagcttcctcccggtaatcctgaagacaatgaaagcaaagtgaatacaaaatgaatcaatatcatgacgccgagccaccggatgtcgtgcgtaccgtccattccctgcatcatcaaaaactgttctccgcctcccgtcaagttggtctcggtcagagaaatagcgtatgccgcaatcagcaaatacaacattttagtatagacagagagtttcaacgtcggcaaccatcgttgaaaaaagggaactataagcgaataaaactttgctatggcagcaatcacggcagcaaaaaggatataaagctccgcctgccgccaaaaagacaaaccgggagagacggcatttatcagatgataaggagtagtgggaaacatccaactcgccacaccgcccgccaccacgcctgccaataaagtagtaatggctgttttgggagcatcaaaccgttcaatggattcgatgaccaacagagaagaagacaagggagctgcaaaagctgctgaaagtccggcaccggcccctgccgccagcaactgttttcgttcacctttcagaatatgtccccaccgggataccaatgttccgatatatgaaccaatctgaacggagggcccttcacgacccaacgacagccctgcactcaaagctaatattcccccaaaaaactttgctatcagttccttgaaaggatggtcgtaatgaatacgtccgttgatagccgcccttgtctggggaataccgcctccggctatcaaaggcatcttctttaccatcagggcaaccccgataaggatggcccacagagaaaagaacaagacaacatgatagtaccacggataatgggcagtgaagaaggcttttcggatatcaaagaattcccataacaaataatgatagggcacggcaatcagccccgtaagcaaaccaacaaatatacttacgaagtaaaggcgggcatcaatcagttttaatctccagatacgccatttccgcagattgctcaactgtttccatttctgtttccacttgttcggttccattgtgaggaataaacaaatgaaaaagaagaaggttttggtttaaattaataagtaagatagttgattttctatttaaataatggtttcaacatcttaggaacttctatttcgttctccttcaactgattcaaacaaatctttcccttatccgataaagtaaaatacatctgccgcttgtctttatcgcccaaactgcgaactatcaactctttatcttctatcgaacgaatcactttcgatgtgtgtgaagccgataaacccgtatgctctgatatagcgctcgccgtcaatctgtcacctccgatacagcaaagtgccattgcttcattcaatgataccccatgttgctctatcaagtttgcttccagttcagagagagctttaaaaagctctctcatgacacatattgattttattttctccatacattattttaaataaacaaattcacgtttgcctgctccgcacgattcatataagtagctacaccgccaatagtcacattatccaacagttcctcgcgctttacgcccatcacgtccatcgacatctgacaagcgatgaactcgacaccgttttgaatggcctgttctcgcaacgattccagtgagtcaatgttcttcttattcatgatataccgcatcatcctactacccatccctcccatattcatctttgaaagtttcagttttaatgaactggaaggaagcatcatgccgaacattttaccaaagaaatctttcttcacagcaggcttgttcagtttcttgatggcattcagtccccagaatgtgaaaaagatagtcaccttctccccggttgccaccgcaccgtttgcgagtacaaaagtagccaaaactttatccaaatcatcgctgaacagaataaaagttttccctttgtccgctttacaagtctctgttgcacatacttgaggaatattcttttctactaccacccggtattttccgccttccgaacgggcagaaacaaaacggtttcctgtagtctgacaccatgcctcggcatcacgggggaaaccggcatccgtcgccacaatttccagacgctccccatctgccagttcttccatacttttcttcagcttcatgataggaccgggacaagatatgccacaagcatccacttttattgctctcatagaaggaataacagaagaagcaatagtataagcttcagcagaatctttactatgttcagaatgatcaacttttgaagaatcagaacttgaagagccggaatttgagaactccttcggttcgggcaaaggagtcgttgccgctttatacaatttcaaaccacctatcagattctttacttccttatatccgttctgcaacaatatattggaagccagataacctctcaaccccactccgcaatacagatagaccggcttatcccgggggatttctttcatccgatcgcgcatatcatccaaaggaatattgacagcccccttcaaagcaccgagcgcaaactcatcgggagtacggacatccaccaacgtgaccttgctccaatcggcagcctgcaactcacgccaataaagaggctgcatctttccgttcagtatatttccggctacatatcccgtcactgccaccgggtctttggccgaagaaaaaggaggagcatatgcctgctccaaggccatcaaatcatatacagttccgctatgctttatcacttgcgagaattcgtcaatgcgcttgtctactccgctatagcccacaatctgcgctccgagcagtttgccatcggcaggagagaatgttattttaatggacatctgtaaagcatcgggataatatcctgcatgcgaaccggaatggatggttgccgacaggtaatcaattcctgcctgtttcaaccgttttgccggaagacccgaagcagcaacagtcatatcaaaaaccttggcaatggaagtaccgatagctccttcgtagggtatcttatttccaaagaccatgttatccgccacaatacgtgcctgacgattggccggccccgccaagtaattcaaccacggcttcccggtcagcggatggcggaattcgatagcatcgcccaccgcataaatatgttcatcggaagtctgcaagtaatcgttcaccttgatgccgcgcatctcccctatctccagtccggcatctgttgccaacgaagtgttgggacgcacaccgatagataataacaccatatcggcaggcagtctttcacccgatttgaaaatcacttccaatccgctggctgtgcgctcaaaagaagccaccgctttttccagataaagctgcacccctttctgcaacaagtgctcgtgcaccaacgatgccatagagaaatcaatcggtgccatgacttgatttgccatctctacaaccgccacttccgcaccggcttcctgcaaattctccgccatctccagcccgatgaagcctgcaccgatgattaccgcgcgcttcacctcatgcctctgcaaatagttcttgatggcatccgtgtcattcacattgcgaagcgtgaagattccttcattgtcaatacccggcaagggaggacggacaggcgacgcacccggagaaagcaatagtttatcataactctccgtataggttttcccgtctgaagtacgaatatccactgtcttctttgcaggatggatggccacgacctcggaccggatacgcacatcgatattgaaccgcttaccgaaagcctccggggtctgcacaaacagtttttcacgctcagcaatcacgccacctatataataaggtaagccgcaattggcatacgagatatattcccctttctcaaacaagatgatttcggcatcttctgtatttctcctgatacgtgcagcagcggttgcacctccggctacacctcctactattatatacttcataagttcaactattttaattcaattaatattttcctttggaaactttatgcaaacatacatgatatttctcacaaacaaaagtttccaatggaaaacattatcaggttaactctttttaagaagaggtgacttacttccaaggtcatgacaaccggttcgggcaggcaaaccctgcccctacagttgacaatgtgataggtcggtttagttttaacacatccctacacgattcaaaccatgaattcctttactgctttttccaatctgtccaatcccaattctccggtctgccgccacaactgctctccttttcttaagaatatataagtaggaatatgcacgatggtataaaattcggcaagtgttttttcttcatccacattcacctgcactacttccaccttccctcccatcagtttcttaaactcgtcaataacagcatgcatacgactgctcttcaatgaatgaatggaataaaattcggccatcacccaatcacctgaagtcaatttctctttattccgctcttcacggactactttcttttctttcatattgattcgttttaaaagttatgtttgtctatcaacaagattatcggaagaaagtttgccacgacagaaatcgccagcaaaggcttatactctaattcttctacaaagaagcagacattcaaaaaagtgtttattacctttggggcaaaatttaaataaaacaagcacatatcatgttatccaaagcagacttaacacagggaagcatcacaggtaccctgctacgttttaccttacctatgattataggctcactgctacaacagtgttacaatatagccgatacactgattgtgggacaatgtatcggttccggcgcattggctgccgtcgggtctgcttacacactgatggtttttcttatttccatcctgctgggattgtccatgggaagcggtactgttttttccctgcaatatggcgcaggacggatgaaggctttacgacgaagcatttacgtatcggccgtactcatcggaacagtgacaatcgtactgaacatagcagctctgtctttcattcatcccattctcaaactattacagattcccgatgatatttatcagatgatgtatgattacctgtggattatcttttggggaatcgggtttacttttatttataatttctatgctgcactgttgcgtgccatcggcaatgcagtcactcctctttattttttagcgatttccgtcgtgctgaatatcggactggatttgttctttatcctgctactggattggggaatcaagggagctgccattgctacaattatcgcacagggagtatccgcactgggaattatgggatatacctacgcaaaatgtcccgaattgagactgcatcgcaacgacctgcatttcgaccgtcactgcctgaaagaaatcacttcgttctccaccctgacctgtatacaacaatcggtaatgaatttgggaattctaatggtacaaggactggtcaatagtttcggctctatggtgatggcggcttttgcggcagcaataaaaattgactcttttgcttatatgccggtacaggagttcggaaatgctttttccacctttatcgctcaaaacttcggagcaaaaaagtatgaacgaatccgcaaaggagtaaaaagtgcgctgattacaacaattgtcttctccctgttcatttctgttttggtcttcttattcgccaaaccattcatgctgatttttgtagctccgcatgaaacggagattctgaatgtaggtatcggttatctgcgcattgaaggagtattttattgtggtattgggattttattcctgctatacggatactatcgggccatccgtatgccggaaatgtctgtaatactgaccattgcatcgctaggaacacgagttgctctttcctattggctcgctgccatcccctctattggagtaaccggcatttggtggtctatccccatcggatggtttatagctgatatgattggtattatttattataaatataggaaaaagctgaggagtaacgacatacattattcggatacagcttacacagaaagaacctgaatctatccgtgtaaaccgtataatccctaaccggaaatcacgagaaaaaacttcgacagtactccaaagaataaatatatagcttaaaaggaaacagcaatgaaagtacatgtcacataaagaatatcctctttttggggcacgatactcggcgctgccaatttctgcattatcgtttcccaaaaacgatgttatgatatatcatttgcaaaattaaaaatatatctcaaaacaaaagatgaaacgtttttgttactaaaagacatcctttccaagctgtttcatccaaattttatgtatttttgtagtcctatagaaagaacagacttacaaatgagagaagaaacaacctgtaaacctgattattcgaactcaatggcagaacacttgggtatccgattcatgccgtctgccaccgatgaggtacgtgccgaaatgcctgtcgaccaccgtacttcacaaccctttggcatgctgaatggaggtgcatcattggcacttgccgaaattgcagccggacacgggtctatgtctttatgtcgcgaaggagaatatgcatgcggcatacaagtaagtggaaatcatatatcatcggttcctgtgggcggaaaagtgattgccaacggtcaattaattcatcgcggcaattcctcacatatatggaacatagatatcaccactcccgaggggaaacttgtttctaccattcgtgtcgttaacttcatacttaaaaagaaatgaatctacctaacagacatatacagaatttattggattgcctgacacgcagccgactcagttttgctctctatcggctgccctggacagacgaatgctactttgtgctacaacaatcaggcgatgtggaacagttagcggatattcgggaattaaataagaagaaagggtttgtcatggctcccttccttcagtccgaccatcatccgctgatagtgattcgtcctgatatcacagcatacgactgggatgaaatcagcgaagccatttcttctttggaatgtgccgatgccttgttgacttgcaagaaccaaaccgaaaaactgtctcctttcgtttcggaagaaacagacaaagagcgatatacccaagctttcgagcgtttcatcactccccttcaaaagaaacatttccaaaagcttgtcttgtcacgttcttccaccaagcatatcaatgacgatttttcgccattggctgcatttgtccgtgcctgcaacaattatccacgcatgatgatttatttgtgtcatactcctgtttccggtacgtgggtgggcagtacacctgaaatcttattgagcggacacggcaaagaatggcacaccgtagccttggcaggcaccatgccgatgcaaaacgaagtcatgccaatggactgggacaagaagaaccaagacgagcaaggttatgtggcagattacattcgtcggattatcaagaaatttggcaataagatgaatgagaaaggcccctatacggcccgtgccggacaattggtgcacctcaaaaccgacttttattttttattaaagaacacagataatatagggaatctacttcaggaacttcatcctactcccgctgtctgcggattgccgaaagaagatgctttccgatttatcctggaaaatgaaggatatgaccgtagctattattccggttttataggctggctggacaccgaaggacatacagatttatatgtcaacctacgttgcatggaaataaaaccgggtgaaaccactttatacgcaggtggaggaatccttgcttcctctgaaatagaatcggaatggacagaaacaggagacaagatgaatacgatgaaaagcattctttatcctgagtttataaacagatagcctgtcaccgtaggggcacatgattgcgcccgtccaatagcatagcaacatgcattcggaagaattcaattccctacggagcaaagacgataaaagagaaatatatttatattaaagtaaaagaattatgtattcagacaaaaagaacatacttcagttggcggcacttctcaaggcacacggtgtgcggaaaatagtgctttgtcccggcagtcgtaatgctgccatcgtgcatacactggccaatatagaggacttcacctgttactctgtaaccgacgaacgcagtgcaggattctttgctatcgggttatcgttacaggggggaggtcctgctgctgtatgttgcacttccggttcggcactgctgaatctgcatcctgccgtagccgaagccttttaccaacaagttcccttaattgtcatttctgccgaccgccctgctgcctggataggacaaatggatggacagactttacctcagccgggggtattcggtccgttggtcaagatgtcggtcaacttacccgaagtgcaaaccgacgaagacgaatggttctgcaaccgtctgattaacgaagccatactggaaacaactcaccacggtaaaggtccggttcatatcaacgtacctatctccgaacccatctaccgtttcacagtcaaagcgcttcctgaagtacgcgtcatcacccgctaccaaggattgagtgtatacgaccgcgactataaaatactgattgaacgtctgaataaatataacaaacgcatgatagtggtcggacagatgaatctgatttatctgttcgaaaagaaatatgtgaaacccctgtataaacatttcctttggctgacggaacatttgggtaaccagaccattcccggcattcctatcaggaacttcgatgcagccatctattccatgagttccgaacgtcagaacgatatgactcctgagctattgattacttacggcggacatattgtatccaaggaattaaagaaatacctgcggaaacatcctccgcgtgagcactggcatatttccaccgatggaaagatagccgacttatacggttgcctgacgaccatcattgaaatggacccatttgaatttctagagaaaattgcttttcttttagacaacaaaccgacaaactatccattgatgtgggagaattactgtaagaccgtgccgatgccggaactgccctactcggaaatctcagccataggaaaactcattcagtcattgccggaaccctgtgcgttgcatctggcaaacagttctacgatacgttatgcccaattatttacaataccgccaagagtagaaatttgctgtaaccgaggtgtgaacgggatagaaggttcactttccaccgccatcggatatgccgtagcatccactaaactaaacttcatcatcataggcgatttgagtttcttttatgacatgaatgcactgtggaatcagaattatggtgcaaatatccgtattctgctattgaataatgaaggtggagagatcttccacactctgccgggcatggacaaatcaagtcgctcacgggagttcatcacagccgaacattacaccactgccaaaggttgggcagaagaacgcggctttatctatataaaagtaaccgatgaagaagaactggaagatgccatgaagcaattcaccaccccggaaacgctgatgcaacccatgttaatggaagtctttacagacaaggaaaaagataccaccctgttgagagaatattaccacggacttaaaaataagccaaatgaataattctatcatgagagtgcgtcaaaattgattcatacgggcataccgcccgtacggtaaactcacaaaaaaaatacataaacaaacaagaataatggaaacaagagaatggaaaaccatcaaagagtatcaagacatacttttcgatttctataacggaatagcaaaaatcaccatcaaccgtccgcgttaccgcaacgcattcaccccgactacaacctccgaaatcagtgatgccctgtattactgccgcgagtgccgggatatcaacgtagtggttctgaccggagcaggcgataaagccttctgcagcggaggcgatatgcacgtaaaaggtcacggcggttacatcggaacagacggtgttccccgcctgaatgtgctggatgtacaaaaacaaatccgttccctgccgaaacctgtcattgccatggtcaacggttacgccatcggcggcgggcacgtgctccatgtagtttgtgacttaaccatcgcttccgacaatgccatcttcggacagacaggtcccaaagtgggcagctttgacgccggcttcggttcatcatatctggcacgaatcgtaggacaaaaaaaggcacgcgaaatatggttcctttgccgtcagtactctgcacaagaagcactggaaatgggattggtcaatacggtcgttccttttgagcgcctggaagacgagacagtggcatgggcagagaaaatgatggaacacagtccgttagctcttcgtatgattaaagccggactcaatgccgagctggacggacaagccggaatccaagagcttgccggagatgctaccatgctttattacatgacagaggaggcacaggaaggaggaaaagcatttctggaaaaacgtaaaccacgattccaggattatcccaaatttccgtaaaaacgaattgtaatttcaaagacatgaacattgaagtattcaggaaatactgtctttcattaggcaatgtttcagagaagatgccatttggcaaatttgcagcaagatatgattcaatccttgccttttatgtttgcggacacatgttctgttttatagacattgacaatttcacttttgtcaatgtcaaatctactccagatgaaattgaagatataaaagagagacatgtttcaatcggcactcccatcaaccaaagtctgaagcattggcttcagcttaattttaacggcgatattcctgacacagacatatacacatgggttcaacgcgcctttgaaattgtcagagataaatatacaaaacaaaacacatataaaaaagtatgttccaaacccgcattataaagaaacaattacacttcaagcaaccggcaggtacatcgagaggagtatataccacccgaaacgtatggtatatactcctcaccgataccgacaaccgttattatggagtaggtgaatgcgcccctctccctgccctgagttgtgacgatgttcccaactatgatgaactattggccatcgcttgcaaaaactttgagaagaccggagaaatagaccgggaagccctgcttccctatccgtctattctgttcggtctggaaaccgccctacttcatttccgcgcatgcagcctacaattttggcacactccattcagcaaaggaaaagcaggtatccctatcaatggacttatctggatgggaagctttgatgaaatgtatcggcgcatcgaagaaaaaatgcaaaaaggattccgctgtatcaaactcaaaatcggggctatcgattttgaaaaagaactggaattactggcacatatccgccggcactttactcccgaacaaatagagctacgtgtggatgccaacggtgccttcactcccaccgatgctcttgataaattacagcgtctttccgagtttcaccttcactccatcgaacagcctatccgtgccggacagtggaaagagatgagcgcactctgtgcttccgcccccttccccatcgccttggacgaagaacttatcggcattaaccaacgcagccgcaagatagaactgcttgaaaccatccgaccgcaatatatcattctgaaaccctcccttcacggcggaatcagcgggtcggaagaatggatggaactggcagcggaaagggggataggttcgtggattacctcggccttggaatcaaatatcggactaaacgctatcgcccaatggtgcgctaccctgcaacctacgctcccacaaggccttggaacagggttactgtttacagacaacataaattatccgctacatatcgaaggagactgcctgtggtttcatcccgaagagcaagaacctgatttattacaatggctggcacaatgaatacttactacacagacataaccacccagcgtatccaaatagaaggaatcttttatacccattgggaaatagcaatgatacgcatgaatattcctaccgacaagcaaagcttccggcaagaactttttacttttctctccgaatggttcaaccatcaacccaccgttcttgtccatacctccggttcgacaggcaagcccaaaccaatgcgtgtagaaaaagaaagcatgatggaaagcgcctgcctcacctgttcatttctcggactgaaagaaaatgacacagcactgctgtgcatgcctctgcaatatattgccggaaagatggtggtgatacgctcactggttgccggactcaatctccttccggtcacaccttcgggccatcccttgaaaaatctgaagaaagcacccgtatttgctgccatgattccgatgcaggtatacaattccctccaagtgcccgaagaaaaagaattattgaagcaaataaaacatcttatcatcggtggaggtgcgattgacagcgcgctggcacaagctttaaaagattttcccaatcaggtatggtctacctacggaatgacagaaacactttcgcacatcgccttacgcagagtaaacgggacagaagcttccgaatggtacaccccttttgaaagcgtctccatccggttgagtcaagagaatacactgattatcaatgctcccaaagtgtgtgataaagtattatacactaatgacattgcagaactgaatgaccaagggcaattccgcattttaggaagaaaagacaatataataaatagtggtggtgtaaagatacaaatagaacaggtggaagccacactgaaaaaacacttccatactccatttatgattacctctgcacctgatgcaaaatttggtgaaatagtagttctgctcattgaaaacaatcccggaagcagagatacttatgaaagaattcagaagatttgtgaggatgtattgcctgcctattggtgccccaaacgcgttataccggtagagaatctacctcttacagaaacaggcaagcccgatagggcaacagctaaattattagcacaaacataatcaataaagagaaaaatgcagataaatcaccagaacttattgttctcttgactatattcaaaccctacggagttcaattttcgtatcaaagaatccttatctacattcatatcttcacaaagttcatcaagcgaagaataacaatcgcgaagtttcatattcaccatgctgaacagcatcatcgggtcttccggtagttccatactttacaatcttttattcattttctaaaatcgggtgcaaaggtacaaaacttttgctttccggttatagttatgactgaaaaaagatataggatcaagtcaaaaagtgtgtagatgataagggagcagtcattattcctggggatttaaatatcatatcacaaacaaagggaagaataagccgtttcccaaggtcggccaaggtcttttaaacggaagattattacagtctgcggcaatggactgtacagtccactgtagcagactgtacggtccactgcaacggactatacagtccgctaccgaagactgtagtaatccgacggacaggcaggcataaccgaaaggacgaaaacgcttggtccggctaatgaaacggcttaggaagctcaaaaacgcatgcaggggttgaaaaccggaggaggcaacattaggagacaggtgtttgattgatatattaaatccccaagaataatgactgtccccttattatccacagaattttcggattgatccgttattttctctttattgaaatcgggataaggctgctgtgcggtcatggtataccccataccgatgcttaaaaaataacaagagtttgtttttcatttcttgatttattataactaacaattttgtatactgataaacggtgcgtgaagatataaaaaatagaagaagaaagcgaactttcctcttctatttatcaacaaacattcacagatgttatacttactcacaagtatgcctcatcaatcaccgctatttccattcaggatgctgttccaacatcggattggtatcaatttcactttgcggaataggccataccaagtcttgtccaccacgtaaattgccacgtgtcacagcgccgaagccatagaatgacaaatcatgctgcatacgtttctgagcattctcaaactcattccaacgatacagatcggcaaagcgcaagtcttcaaaagccagttccacgcgacgttcgtgacgcacaatggcacgcaactcttcctgcgtcagattggttccttccacatcttccacagcaggcatacctacacgtgcacgcacctcattgatatatcttgtaacttcgggctgcgggtaaccacctttctcaatcattgcttcagaaagagacaacaacacttccgcataacgaataatgtagaagtcaagacttccgtcatattcgttggccgtatcttcaggagtataccatttgcggatacaggcagtagaactagccggcaaattattggtataaagtttgccgttccattccataccgggcaacatcaatgtgcctttcatacgagggtcacggttttcataacgtcccatatcagggttttcctttgtatgtgcacctgactccaagctgcctttaaacagaggcgacttatcaatcggcagtccgtctatgcaataaaagtcatcacaaagattcattgtaccttcaatggcattcatcggacccgaccagcaaacaccgaagcaactgccctcgcccagtccgggacctttatagtgaacactcaacaagacttccgccgctgtctcatttttctctttaaacaaatcggcaaaattagcagcataatcagaaccatctcccgacttaaataattgcaccttacctatcacattctgataagcagctatcgcatcatcccagcgctggttaaagagagcgatacgccccataatggcatacgccgcttcttgagtcatacgtcctgttttggctttgccaatcaccggaattttaggaatccatgttttcaaatcttccaatacagacgaaacgatctgtgcacgttccgttttcggagcctgagcctcagccagagtaagcggttttgtcaaataaggaacatcacggaacactgaggtcaagttgcagtacatcaatgcccgcaaagcaatggcttctgctttataaccatctatcttgtccgcttccatcggaacacggtctatgttatcaatcaacatattgcaacgcttaatcacttcataattagcattccagtacattgaaaaacattcgtccgttgtagatgacgtacatttggaaattgtacttcccaacatccagtctccccacgtatggtctccattatccgtacaagtctcacgacagaggaaaccataattccaaccgtcgatattatcgtcatacagatttctgctctgcatggcatcatagcaggcagtcagagccatcaaagcgtccgactcagtttgccaataggtactctgtgaaggttggttcggagaatctgtctgcaaaaaactgtccgaacaggcaccggtagtcaacaaagtaccggacaataataaaatcttgaatatattttttgtattctttaccataatctgtatcctccctattattagaattgaacatttaaaccaaatgaataagtgcgcatattgggatgcacgtcatttcgagcatcacctgatgtcttttcaggatcccagttcttcaatgaagtaaacgtcagaagattagttcctgcaaaataaacacggatactggaaacaccaagttttgtcagtccgggctggcggaaagtatagccgaactcaagattcttcaagcgtaaataactggagttctccaaccagaatgatgagtattggtcattgattgtattacccaaagcaggcattgaaccatttatattttcggctgagtaacgatccaaccaacggtcagtgaagttaccgcgaatatctgtggttgtctcccaactataacgataaattcctgcaactccctgccagaaagtagacaaatcaaaattcttccaagaagcacccaaattgaaactgtaagagtatttaggaaatggattaccgataatgtcacggtcttcggctgttatattaccgtcatcattcaggtcagcatacataatatcgcccagttttggagctacaccgttttgttttatcacttcaccttttgaattagtgcgctgcaagtcagcttctgtacggtagatgccgatagatttatatccaaaataagctccgataggctcacctacccgattgattgaattaccgctaatggtttctttcaaaccacccatttcaagaatttcattgtttacatgagaaatattaaaacctgcattccaagaccagtcacctttactgtccgaatagttcaggttccattcccaaccacgattacgtacggctcccacattctgataaggagcagaaagagaaccgaggaaaatacccggcatggacaaacgcatcaaaatatcagatgtctttttatcaaaccattcgaacgtggtttgcactctgttattaaagaagccgaggtcaatggcaacattgactgaacgggttgtttcccatttgatattttcattgggaacagaggtctgcaccataccagcctgcttgtctgcattctgatcgaaaaagtaattgccactggcacctaatgtagctgcatacgcataattacctatttcctgatttcccaacttaccccaagacaaacgcaactttccgagtgacaactctctgaagtcttccataaatttttcgtttgagaatacccaacctgccgatacagacgggaatgtggcataacgattggctttaggcatacgtgaagaaccatcgtgacggatattgaattcaaacaagtaacgttctccatagctgtaattcaaacggccgaagaaagattgtagtttatattcttccgaatttcctttggcactcggattaattgtaccaccattgagttcatagatattttcggtgggaaatccttggatagctgctgttgtcgtataataacgtgaaccgataattgaatgtcccagtaatacactaatattatgttcattaaattgcttattataagtaagcagattttcatttgtccatgttgcatttctataccaatagtcacttgattggttagtggcaccctctaccttctttacattaccctcagcgtcataacgagccggagacttgggattgtatgatttcgttgcattcaggtcgaacgcataagcgaaatttgtctggaactttaatccgtctatcaaatcaattccggcaaatgccttaccgttaaaacgccaatattcgttagaacgataccccaaagacatcagttccaccgggtttttcacatcctctgcattagtcatcgatccgtccacgtatccgtagtgtccgttagagtacatcaccggaatggtgggacgagtaaaccatgaaacaaagcgcataataccaccttcaccagaaggagctacagcaggagccgttacatcattcttattaccggacaaattcaaaccaaaagtaaaacgtttgtaacgcgtatccacgtttgaacgaaaagatatacgctccacacctgttttcatcataataccatcttgattggagtaagctacagaagtcatgaaatgtgtattttcactaccacccgatacagacagatggtgttgatgcatactggcattacgcaatacagcatccagccagttagtgtttgcataatggtcaggatcggaaccatcctgcaatttctgtaaagcctcttctgaaaaagtacccgctttgacttcatttctcatcaatgcccaattatagctgtcgatataatcgggaacgatacccggagtctgcaaggtataacttcctgaataagaaaccttcaccttacttgatgcttgcccacgtttagtagttatcaaaataacgccattggctgcacgaacaccgtaaatagcagccgaagccgcatccttcaaaacagaaatactttcgatatcagcagatggaatttccgcaatttgagaaatagaaccttctattccgtctatcaataccatcggattgttattgccgaatgtaccgataccacggatacgtatttcggggttgtcattaccagcttgtgcaccgttttgagtcaataccaatcctggcaagcgcccctgcaacaaagtggtggtattggccaccggaatatcctgaatatctttggctgacacagaagagacagaccccgtcagattgaccttcttttgggtagcataaccaaccactactacttcgtccagtttttccgaatcttcttccaatacgattttaaagttcgttttagtaccaatggaaagaatcatatccttataacccaaaaaactgataactaaagactgagaaggatcagcctttaaccgaaatgctccttccatatcagttatcacaccttgtgttgtaccttgtatgagcacattagcacctatgataggttcacctgccacatcatacaccttacctgttattgtctgttcctgcgcatttaccgtaaatgtgaacagcagcattagaatgctcaccaaaaacatacggaataatttttgcatttgtccattcataatatttaaattaatgattataggtttttatattagattttgagagattcaaatagattgacttcagacagttttactcccactgatagtgtctcacccaatcaacttccatttctaccggtaagtcagtcgggtctaccgctcctacccaagtaccgcccaactgcatatcaatcaacaaatattgtgcaatatcgaaagggaactggccttcctgttccgtttctattctcggataagcaaaatgacgtttgccattgatatgaaaaaccagactgtccggccagaagtccacaccatacacattgaagtcgtcacggttaatgggagcaatacctccatgaggcggattattctcaatacccaatgtatatgtataatgtgagtgtaccgtctgataggcaatagaatcattattcaaacgctccattatatccacctcaccccctgtaggccaatggtacttatccgtctcataaggcaaagtccaaatagcaggccatgctccacgcgctccatgcagcttggcacgtacctcaatgcgtccgcgatgaaaagcatgtttgcctttcgtccatacacctccggtcagataagcggctgtatccgcctcccggttatcatttacaataccttttaggatgagaagtccgttacgcatttcatagcaacggtcatcgaaagattgtgtgttctgccagtctgccctgccccgagggatacggctccatactgtggtatccagttccataccgtcaaagttctcttcccacaccaatttccatccgggcttatggctgcaagagagcataacgaagactgtaaacaataaaagcataatttttttcataatactttaatttagattcacaaattatcactttataaattatggaacaaacgtagctgttttgtaccaaaaaggactcaaaaatcgtatcaaacgagtcaaatcttgtccaaaccttccattattcacctctaaggcacccttttccacaaaaaatcagaagaggatgattgcacaactgaaagaaaaatgtatttttgcctaaaaatacagtgaccatgtatcggaccttaattattatactattcctgttttttggaaaaaccgtttctgcaaccaaccacaacaccggttattcatttacccaactttccatacagcaaggcctctcccaaccgaccgtgcaatcaatcttattggatgaaaggggaacgctatggataggaactaaaaatggattgaacatttatactcaagaaggattaaaaacgtatcttcatcattcagaaaacccatattctctgcccggcaactatatcaatcatattgccgaggactctatcggcaacatttgggtagctacccaaaaaggattgagtatgtataattatgaacagaacaatttcacaactgttacccccgacgcaatgtattcttccatttgtgtaaaagggggcatctggtttggcggcgataacaccatctgctattacgattataaagacaaaacgctgaaaaatatcccgataaagaaagaggataaagaagccaacccggtagactacagagtgcaaaaaatgctctacctcgaaaaagacaagatactgataggcacacggagaaaaggaatgtacctatatgattgccgcacacaacagctaaccgacttcatttcggacaagcaatatctgcttacgtcactctacatcactgcagacaaacacatctatgcagccttttacggacatggtttatactattatgactccaatggaaatatgcagggacattatgataaaagcaattcacagttacaaaacaattatatcctcgacataacggaacataacggatacttatggttggcaacagacggaagcggaatattcatgcttgccccccaatcccaccaattttcccaattatatcacattgtcggtgactactcctctctgcctgtcaattccattaccgtattatataaggataaagaagacgaactatgggcaggaagcgtacgtggaggcatattcagtatcaaagaaacttatataaaaacttataaagatgtagctttaggcaataccaatggactgagtgaaaaatcggtcatcagcctttatgaagaaaaaaacggtaatctatggataggaaccgacggaggaggaatcaatctgtatgatgcgcgaaccgacaagtttactcattttccatccacctatggagataaggtcgtttccatttcgggattttccgagaacgaactattagtgtccctctacacgaaaggactattcacattcaataaacagacaggaacctaccaccctttcattattgtagatcaagctacaaactataaagaatgcttttacggttatcttccactggccaatcaggtggcaaacgacaaaatatatatcatcagtagtaacgcttatgcttatcacacccctacccgcacatttacccgaatgtggatggataaggaatacaacctgtcaaatgacgctctgtgcctttcctactccaacgacaaattctcgctgttgaagtgcgccaaccaagctttcatcgtcaaccagaaaaatgacagtatcaaactcctgtttgaattggacaaaaaagaaacaatcacgtcaatgtcttatgacggtgaccgcatgatatggatcggcacagacaaggggctaggctgtttcgacatggaaagaaaagagtaccacattatccataccaaattattcaataacatatcttttctgacaactgatggcaaaggacggttatggatttgcgcccaaaatatgctgttttcatacatcatcaaagaaaacaaatttaccctatggaatagttccgacggttttccgtccaatgaaatcctgtttgcctatcaaaagcctttcaaccgtgatttcatctatttgggaggagctgaaggattagtcaaaatcaatacaaatatcccttattccgaagtaaaaacaccggaaatatatttatccgatattctcttcaatggcagcccttatataaaagagctccaaaacaatacaatcgagattccttggaattacaattcactctcggtccattttcgaataaaaaagaaagatattttccaaaagaacctgttgcgatatacggtttcaggccggggaaatcaagaaatagaatcatacgacccattcttgaatctgtcctccttatcgccgggaaaatatgcgatatgggtatcatgcaatatgaaaaacggaaactataccactcctaaacgcctggttgacatcatcgttacacctccatggtacaagaccggatggtttataagtataattatcctcattttcatatctgtaaccacaagtacaggatatatcattttccgacggaaagagcaaagcatgaaaggcagtatgagccattttctacaagctatcctaaatgatattctaaaaaataaagaagaaaagtttcaagcaacagaagaagaacttcaaaacactactattccattaacagtcttatcggaacaagtgaaagaaaataataacgaaccgacgcaacagaagcaaactgttactaaagaggatgaagattttattgataaactaaacaaactcatcaatgacaatatggcaggtgaagaactctctatcaaattcctgaccgataatatggctatgagcagagcctctctttatcataaggtaaaaacactgaccggactgggtgtgaatgactacataaaccgattacgtatagagaaatcagtatacctactcacaaataccaatctcaatatcaatgaaatatcctatgaagtcgggtttacatatccccgttatttcagtacctctttcaagcaaataaaaggaatgactcccacacagtttaaggaagaaaagaaaaagaacaatgccgactcaaaataaaaaagagcgattttcggtcgctcttttacacatatattatatatacaatcgctattaacaagccttgaaactcatatccaatcctttcacagaatgggtcaatgctccaaatgatataaagtctacccctgcctgtgcataaggtaacatcgtctcataagtgatgccgccggaagactccgtttcacaacgtccacctacaatctctactgccttacgtgtgtcttcaggagtaaagttatcaaacataatacggtctaccccttctgccaatgcctgattcagttcatcaaaattgcgaacttccagttctatcttcaagtttttgcctttggccttacaatattctttagcacgagtaaccgcattgtgtatgcctcctgcaaagtccacatgattgtctttcaacaaaatcatgtcgaacagaccgatacggtgattgcatcctccacctatctttacagccattttctccataatacgcatacccggagtagtcttacgggtatcaaggacacgagttttggtaccttccaactttttcacatatttatgggtcatagtagcaatgccgctcatacgttgcatgatgttcagcatcaagcgctctgtctgaagcaaggactgaactttaccttcaaccaccatcgccacatcacccggtttcacgtgacttccgtcctgaatgaatacctctaccttcatggtaggatcaaaacgatggaatacctccttagctacatcaataccagccaatatgccttcctccttaatcaataattttgattttcccatagcatccgcaggaatacatgacaaggtagtatggtctccatcacctatatcttcggcgaaagacaggtctatcagtctgtctatcaaatcttttactactaattcatccattgtgttattgtttttttgtaaattgataggcaaaggtatagattttccctatttttgcaaagtaaaccggataaagatatgaaacttgaaaacgaaaaagcacttataagaacaatagccgaaggaaacaccaaatcttttgaagtgcttttctattcttattatcctcgtttgaaaggtttcatctgcgacttattacaatcaccggaagaagctgaagacatttctcaagatatttttactactttatggcaaaacagaacatcccttgataaaatagacaatataagcgcttatttattccgcatcgccaagaatgctgtatatcggcacatcgaacgaaacatgctattcaaaaattatcagcaaaaacaaaccgaatctactccaaatgtaattgaagataatgaaatttataaatatattgatgctaaagagttagagctgctgatagcaattgctgtggaaagaatgccaccacaacgccaaagaatttataaaatgagccgcgaacaaggaatgagcaatgatgaaatagcagcatctttatgtatcaataaacgaacagttgaaaaccatctgactcaagcgttagcagatatccgaaaattattatcactgattttaattatatttttttaagttacgactgtgtgtttgattagtctcacgtatcttatataccagaacctatcaaaaacacgtatatgtcaaatgcatataaaataatacattatttcatttccggcgcatccagccgagaaataaaagaaaaagtatggaaatggcttattgattcacacggacaaccggagaaagaagccgcattaaaacaagtgtgggatgaatccagctacaaagcagatcaaagcactgcagagtcttatcgtaacttctgccgcaaagctgccttagtgcctccttccaagataactcataaccgtttctatagaattatacgggcggctgtcgtcctgcttattccattattttccatgctagctgcttatctatacacagatacctataccaagaacatagaacaagtagaatatctggtacctcaaggcaaaaaacatgaaattatattgcctgacggttcgcatgtttacttaaatgccggaacactattagtttaccctaagaaattcatcggcaaaatgcgtacagtatatctaatgggagaagggaattttcatgtgaagaaagaccaaaaacatccttttattgtaaagacgtcctcactaaagattaaagtacttggcacaaaattcaatgtatgcgcttacggaaatgaagacaagaccgtaacgactttggaatcaggatcggtcatgattcaaaaacctacagaagaaccaatcactgttctctctcccaacgaacaactagaatatcacaatacaacaggagagtttcaaaagagaaaaattgatgcttccatttattcaggatggaccaaaggagagttgaattttgtatcccaatccttaaaagaaatcgtcaaatcattagaacggacttataatgtccgcatattacttccaccgacattgaatacaacagacctatatacaataaaattcaagcatcaaagtagtatcaatgatgtactgaacattatcacaaaaaccataggcaatctgtcatacacaatagaagatgataatatcatattagaatatttacctaaaaagaaaggaggaaaataaaaagaaaaaggaaccggaagatagcgagtaatccggttcccgaaatcaatcaaatcacttcatttaaacatttcaagacacttaaatttagtattaatgattaatttacaaaattatgaaatttagaaacttatcgtggctaaacacacccgtaaaaattcataaattttatgtattgctgttggctttatgtttttataacattgcattcggacaaaatcaacctgtaacggtatcagtaaaaaaccaaccgctactaaaagtttttgaaagtattgaaaaacaaaccaaactcagcatcgcatacaatcaaacaaagttgaatgtcaatcaaaaagtaacggttgatttcaaaaacgaaagtacggcaactgttttgaatgcagttcttaaaaataccggattctcttatagaaccgaaggggaacatattatcatcattccccaacccgcttctgttacaaacggaaaacaggaaaattccgctcctaagaaaaaaattcaaggaatcattaccgataccaaaggtgaagcattaattggagctaacgttcaagtaatcggcagccaattggccaccataaccgatgtaaatggaaaattctctatggaagtgcctgaaaacggacaattatctgtttcgtatataggttatcaaccaatagaaatcagccttaaaaataagtcaaccttccatatccaattgaaagaagatacccaattaatggacgaggtagtagttatcggtttcggaacccagaagaaagtaaatatgaccggtgcggtgagtgccgtcaatatgaaagagtctttgggagaccgccctatatccaatataaccgctgccttacaaggggtagtccccggcctgaaaattgaagcaacaacaggtactccgggcgaagatatgtcctataatatccgcggtacgacctctatcaacggcggttctccactcgtcttggtaaacaatgttccaatggacataaatatgattgaccctcaagatattgagtccgtttctattttgaaagatgcagcctctgccgctatctacggagcccgtgctgcctttggcgtcatattgattaccactaaacaagggaaaaaagacaccagacctcaattcaattacaataacaatttctctttctctactgcactagagctaccccaaaaggccagtccgttagaatcggtgttggcatataaaaagatggggtgggaaaacgatacatacgtggacggaaagaatatcacccaatgggaaaaatacatcacagactataatgcaaaccctgccaaatatccgaacggatatatctatgatgaacagggaaatttattcctgatgcgtgaaaatgatatgtttgatgatatgatggacaattttggcttcatgcagaaccacagtttttctgtctccggcggcagcgaaagaacaagttaccgtatgggactcggctataccggtgaagatggcatacttatcacagacaaggataaattcaaccgtgtcaatttctccagcttcatcagtgtggatgtaaacaaatggcttaccacacagcttgacgtccgttatgccaattccaatcagtacaaagtggaacaaggtggtagaaacggtgtgtggggaagcgctatggcattgccatcatatcaaaatatttcgccttatgaagtcgacggtatcacctatcctgccgaaacttcagctacttatgtacgatatggtgaaccgcgcaatatcaaaaaaaccgatatgcgtgtattaggacgtgtcattatatcacctcttaaaggcctaaagattacaggtgagtatacttacaaccggactacgaaatacaataaattttatgcaaacaaatatcagtacgtaggatttaatttcaccggcatcatgaacagtgtagaaaacaccagatatgcactgactcaagactttacaaactataatgccatcaatatctttgccaattacgatttctcgataggcaaacacaatataagcgtaatgggcggattcaatcaggaagaaagccattatgaatcccaatggtcggaaaagactgacgtgttgctgagcaatctgccctccttgtcaggtgccaccggtacggcctccactaccgataagtttgaggaatatgccctccgaggaatgttttaccgcatcagttataattataatgacagatatatgttcgaagctaacggacgctatgacggaacatctcgtttccccaaaaacaatcgtttcggattcttcccatctttctcagccggctggcgtatctcggaagaaagcttcatgaagggcagtaaaggaattatttccaacttgaaattacgagcttcttatggttccattggcaatcagattttattagatggcaatggcaaccccatcaattatccatatatcccggacatggctccttacctgagtaactggctggtggatggaaaaaagactaccactctgaaagccccgctcatggtcagcagttctttctcttgggaaaaggtatacactttggatttcggcattgatttcggacttttcaataatcgtctgagtggtacttttgactggtatcgacgcgacacaaaagacatgcttgctcccggcatggatttgccttgggtagtcggagccagtgctgccaaacaaaatgcagccaatctgaaaacctatggttgggaactggaactcagctggcgcgacagaatcaaagactggagttaccatatcggattcaatctttacgattcgcaaagcgaaattaccaaatataacaatgaaaccaacttgataggtgacaaaatctatcgaaaaggtatgaaactgggcgaaatatggggatatgtaaccgaccgtttttatacagaaaatgattttaatgctgacggaacgttgaaacaaggtattcctatccctcatggagttggaaaagtatatccgggcgatgtgttatacaagaactttgatgacgaccccacagagatatacagtggagccggaacagcagacaatccgggtgaccaacgaattattggcaattctactccacgttaccattatggtatcactgccggagtaggttggaaaggttttgaacttaccgttttcctacgcggagtgggcaaacgcgattattggcgcagagaccagatagcatggcccacaggaagttggggaagcttgttcaaagaaacactggatttctggtcaccggaaaatacgaatgctttctatccgcgcgtatacgccaataatggggtaaacacggataaaaatcattgggtacaaagcaagtatctggcagatgcatcctatctgaaactacagaatatcaccctgtcttatacgttacccaaagcatggtgtacaaaagtgcattttgaccagattaaagtttttgctacaggagaaaacctctatacatgggatcaccttcccgaaggacttgaaacagatatgttgaccaaaggcgcttgggaatatccttttatgagaaaattctctttcggtattaatgtaacattctaaatccagataaattatgaaaaattatacacttatactatgtatgtttctactctccggctgtctgaacaatgattttatggagaggtatccgttgggaaatcctacagcagaaacagcttttgtctcttacgacaatttcaaggcatacgcatggggactgtatgaaacatttcccgcattaggatatggctctgagaatgccacagatgacatttcctacaatcaaacccgagaaaccagtgaaaccggctggattagaggtatcgttactgttcctgataaaaaagaaaatacttcatgggaatattacagtttcatccgccgcgttaatttaatgctcgaccacatagacggttcacaaatgaccgaagcagaaaaggcccattggcgcagtgtaggatatttcttccgcagctaccggtatttttcattgttatgcgattatggtggcgtaccttggattgaccatgtattgagtgacagtgaaactgacctgatacaaggaccgcgagcatccagagatgacatagccaaacatatcctggaagatttgcaatatgccgaacaaaacatcaatgtaaacggtgacggagaaaacagcataaccaaagccgtggtacaaactttcatgtcacgcttctgtctgtttgaaggcacatggcggaaatatcacggtctgaatgatgcagaaacctatttaaaggaatgcaaacgcgtatctgccgaagtgctccacacctatccgaatgtatgcgataattatgatgacttattctgttcattggacttaagtggtgtaccgggaattattttgtataaaccttattccaatgcagaaaacgtggttcatgcagtcagtatcggaggaaccactgccacttctttctataaccccacccgtgacttagtggacagttacctgtgtagtgatggaaaaccgcgttggaacagccctttgttcttgagtgacaaagatatatatgaagagttcagcaatcgtgaccaccgcttgtggttgcacgtcaccccaccttataacattgaccgttccgaatcaacaacagcttgggacaacaaatggaaattcactgacaatccgaaagacagaagcttcattgacagtttgaacatcagattaggaataggatatggcagcagcaaggaaagacaaaaaacattgccgttccgtcagggtttcagcggaggtattttaggcgctgttcctcattatgatttctatttgaataaccagccttggtacaaatcggctttcggatacaataactggaaatatttctgtacttatctggaagtgggaagcgcacgtaatgaagaaaccgacatgcctatcttcagagtggaagaagtgatgctgaactacgccgaagcaatgtgcgaactgggagaattcactcagtccgttgcagaccagaccattaacaagttgcgtcctcgtgccaatgtagctccgatgaaagtggccgaaatcaatgagtctttcgacccgaaacgtgaccttggcaacccggcttacagcggcgattatgccgtcaatcctctgctatgggagatacgccgtgaaagacgcatcgaactattttccgaaggattccgcttcaacgatttaagaagatggaagaaatgtcactatgccatgaagaaaaaactgggacaatatgtgcgtaagtcagacttcccggccggaacaaatgtgaccatcgacggtggcggaaacgaaggttatttggagttccatccgcaacccacccagctttggccggaatattattacctctatccgataccacgtcaggaacgtgttctgaatcctcaactcgagcagaacccgggctggaatgacggagtaggtaaataaaccgtaaatatcaattccaagaaaggatgtgtcaagatttcaattttacttttgacacatcctcctccaataaaagcaacaactcaatcagactatttatacctatatatccatattacctaaacaaacctgttatgataaacaaatcatccattatctttttgatattactcttctgccgtgcactgacctgccagggacaggtgattatcccttcccctcaacagataactttgacaaaaggttgtttcagtataaaagacaagggggtgacagtgtatgcagaagattcaacagcgacttacctatccctgcttattgacgaggtagttccccacattcaaatgtgcgatgcaaaagaaaaagccgacttgtgcttcgttcgcaatcccgcttgcccgcccgaaggctacaccctgcacatcacacccgacaatataaaaatagaagccgccgacaatgccggatttacttactccgtgcaaacgttgcgccagtgggtacaaacgggtcccgacggagaaatcttattccaatgtgtcgacatcgtggatgcgccgcgcatcaaatggcgcagcttcatgctcgactccggccgtcaataccaatcgacagccaccatcaagaaatacatcgacatggcttcactcctcaagatgaattatttccactggcatctgaccgaaggacttggctggcgtgtcgaaatcaagcaatatccgttgctgactcaaaaaggagcatacgctgccgttggggaagaacaacagggattctacagccaagaagaaatcaaagcccttgtggactatgccgccgcacgcaatatcacgattgtccccgaaatagacatgcccggacatgccgaagccgcactccactcctacccggaattggggtgcttcaaccgccctgtcgaaattcccaaactcggctttactccaaacattttttgtgcagggaaagaaaatacattgcaattcctcaaaaacgtgttagatgaaatatgcaccttgttcccctcgccttacatccatttgggaggagatgaagctcccaaagacaattggaacaaatgcccggactgtcaaaaaagaattgccgatttgggtctgaaagacagccatgacctgcaactgtggttttcggcacaaatggcggaatacttgaaaagcaaaggaaaaaaagctatcttttggggagatgtggtttataatgacggctatccgttgcccgacaacatcgtgatacaatggtggaactatcgcggacacaaagatttggcactccgcaatgccctccgccatcattatcccgtcatttgcagtaccaactactacacctatctcaattttccactcactccctggaaaggatatgagcaggcccgcaccttcgatttaaaggatgtctatatagacaatccctcctacaaagccacacaagaaagcaatccgctcatccggggaatgggatgtgcgctttggaccgatgacggcgtgaaagaatacatgatagaccgccggctgtttccacgcatcttggcattggcggaacaaatgtggcacaatgggccgttaacggatttcgataccttttaccaacgtatcctccataaaaaagagtggtttgaaaacagaggttacggcttcggaccggcactgaccgaagagacagacaacaattataaatgggaataaaagcttagtatatcatgaaaaagacaaacttcatattaggcattaccgcattaagcgcgatgcccgctttgggacaaacggcaagcagccgtcccaacattgtttacatcttgatggacgacttgggattcggtgacataggctgctatggacaggaaaaaatagagaccccccatatcgaccaactccggcaggaaggaatgcgcttcacccagcactacaccggttcgccggtatccgccccggcgcggtgtgtcttgatgaccggcatgcattcgggacacgcacagatacgctacaacaacgaaatggcctatcgcggcgccatcaatgaccacgattccatgtttatccacaaagaactggaaggacaatatccgctcaaggcaaacaccatgaccatcgggcggatgatgcagaacgccggctacaccaccggatgcttcggcaagtggggactgggatttcccgactcggaaggtactcccaacaaacagggattcaaccaattttatggctacaactgccagcgccaggcacacacttattaccccgctttcctttacaaaaacgaagagcgtgtatatctgaaaaacaaagtcattaaccctcaccttgcccgactgggaaaagatgaagacccctacgaccccaaaaactataaaagattcgagcaggaagaatatgccaacgacttaatattcgacgagttaatgtccttcgtggatgagaacaagcaaaagcctttcttcctgatgtggaccactcccctgcctcacgtctcacttcaggcacccgaaagatgggttcaacattatgtcaagaagtttggcgatgaagaaccttatacgggaaaagccggatacgggatatgccgctatccccatgccacttatgcggccatgattagctacttcgacgagcaagtgggcaaactaatccaaaagttaaaagcagaaaacctgtatgacaataccttgattatttttacttccgacaacggccccaccttcaatggcggcagcgactcgccgtggttcaacagcggtggctggttcaagtccgaatatggttggggcaaatgcttcctgcacgaaggcggcatccgcgtcccggccgtcatggtgtggaaaggcaaaatcaagcccggttcggaaaccgaccatatctgttgttttcaagacgtcatgcctacacttgccgaaatcgcatccgtcacttgtccgcccaacgacggcatcagtttcctgcctaccctgctcggcaacaaagccggacaaaaggaacatgagtatctttactgggaatatcccgacccgaaaatcggcaataaagccatccgaatgggcaaatggaaaggaatcataaccaacatcaggcaaggaaacaccgaaatgcaactctatgatttggatgcagacctgcgcgaagagcacgacgtggcagcacaacatcccgacattgtagccaagttcaggcagttgatggaagagtcttccactcccgaccccaacagagtaggactataaatttacgaccatgaatacagcttttcactgcatactgcctttggcatgcttctccggcttggccgcccacgccggagggccaaagcaaaacacgcccaagcccaatgtcatcctgatttatgcagacgacttgggatatggcgacttggaatgctatggagccaaaaacatagagactccccacgtaaaccgccttgcctccgaaggaatccggtttacgaacgcccacgccactgccgcaaccagcacaccgtcccgttactccctgctcacgggtgaatatgcctggcgcaaaccgggaacggacatagcagccggaaacgcgggaatgattatccgtcccgaacaacacacgatggcagatatattcaaaagttcaggctatgccaccggtgctttcggcaaatggcatctggggctgggtgacaaaaccgcacaacaagactggaatgctcccctgcctacggctctcggcgatttgggattcgattattcctatatcatggctgccaccgccgaccgtgtgccctgtgtcttcatcgaaaacggacaagttgccaactacgacccttccgccccgatagaagtcagctatacgcacaacttccccggcgaacccaccggaaaggataacccggaattgctatacaacctgaaaccgagcaacggacacaacatgtccattgtgaacggcatcagccgcatcggtttcatgaaaggaggaggcaaagccttgtggaaagacgaaaacatagccgactccatcaccgcccatgccgtcagcttcattgagcaacacaaggatgagccgtttttcatgtactttgccaccaacgatgtgcatgtcccccgcttcccacacgaccgtttccgaggaaagaacccgatgggactgcgcggagacgccatcgcgcaattcgactggaccgtcggccaactgctggagacgctcgaacggaccggattggcagagaacacactggttatcctgtcgagcgacaacgggccggtagtggacgacggttatgacgaccaggcagaaaagttgctgaacggacacaagccaagcggcaacctccgaggcggaaaatacagtgccttcgaaggcggaacacgcgtacccgtcatcgtgcgttggcccaaggtcatcaggcaaccggaagtttcggacgcacttatttcgcaaatagattgggcggcctctttagcttcgctggtcggggcacgccttcccaaaggaagtgttcccgacagccaaaaccgaatgaacacgttgctcggaaaggacaagacagaccgcccgtgggtaatagagcaagcctccaaccatgcactgtccgttcggaccaaaaactggaaatatatcgagcccagcagcggagtgccattcatgtattgggggcccaaaatagaaaccggttatctggaaacgccacagctatataatatggaacaagcaggggaaaaagaaaatctggcaacgcagcaccccgaaaaggtcttcgaactggaacaaatcctaagagaagtacgcaaagaaaacagataaggaatcataactccactcacaaaagtctccaaacactttcccaaagatgtcaccattatttaggaaagtgttttttcattgctcagcaaagctaccttcatcaaaaaatgtcaatcattcttttttatcaattgatagatatagtaaatattttccttatttttgcatgacaaatcagaagataaacgcatgaaatttacattattagtcgtaggacgcacagtcgagaaacactatatcactgccatcaatgattatgtggaacgtaccaaacattttatttcctttgatatggaggttatccccgaactgaagaacacaaagagcctgagcatggaacagcaaaaagaaaaagaaggcgaactcatatcgaaagcattacagccgggggatgtagtggtactcctggacgagcatggaaaagaatttcgttctgtcgagtttgccgactggatggcaagaaaaatgcatacggtaaataaaagactggtctttatcattggcggtccttatgggttcgctccgaaaatatatgatatagcaaaagaaaagatatcactgtccaagatgaccttctctcaccaaatgatacggctcatttttgtggaacaactctatcgggccatgacaatcttgaacaacggaccttatcaccacgaataaagaagcaaatttatcaaaccttaaaaataatatctatggctgaaaacaacactccattaaatatagaaaaagtggtttcttttatcaaagaagacattttctccaaagagtatcattgcccgtatacagacgcagcaattgttttggaaactctcagaaagttacatgaagagcatgatttaaaatggattgaacaagcagcccgatattatgctttatatagccacaatctccttcaagacgaagaagaggatcctcaatatcatcaaacagcctaccggctatacacttggataagcgaaggatcacgctatctgcaaacagtctaccctgaacagttagctgccaaacgagaggagatggagcaatatatagaaagtttacgtgccagacgcaatgcgctgaacctcattaaagacaatcaggcagactcttttatccgtacaatgctttataaattgcaagcaagtgattatctgctatacgcctctcataaaatagaaatgtttctctattttctggcctatgacaaatccttattgagaaagcaattacccataattgccgaaacaatctatctgctaaaaaagaatggggtgataagcgacaatcacaatgctaccctgcaaaacatattgaaactggaaatagaacaatatgaaattattatttcggaactttggtatacgaatgcacaatgtgtattgcaaacaaagatagaggaagcaatctatctcattgttttatcattgctcagcaataaagtacctttcgaagaaaccgataataccagaatcctatcagcacgcatatacagatacctgtcaaggctggacactccctttagttctcagctgaaaaacaaagcatacacgatgctcaccggtgaaagctctttggaaaaaagacttgactgggaacacctgttaaacttcgagctgaaccgatttatagctcaaatggtaaatatacgcattgacgagcttaatatgcctgccgaaccgcaagataacaaatggaaacaatatagcaatggacataatacactgacgctcgacaaagacggatttacactcagtaccctgtttccacatagcgcacatacatggaaaggcagaaaagaaagagctgcgttgatggaaaacagagtttttattgccttattcagtaaacctacttacctattcaataattgtaaaagcattgccgaactgcaactttactggcatcaactgacggaagactatcctttatatgagtgtaaccaaccggagtctcttcaaaatagttctatcttggaaacttctttcacagaaaccaaagatagcaatacaaaatatccttctgcaaatgaagaaattaccattggaattatcggaccggaccgcaccaggcaatatctggaaggagtcatactggatgaacaataccgaggagtgaaggctattcttccattaacacaaatcaatgcctgttacttttgtattgagaactttgaaaactacttctcaagtaatgatacttataaagtaaaagtattaagcagcagtaatgaaggagtcagggtttcactggcatcgcgctacaatgaatttgtatatgcggaaaatgtaaaaagaaaaaaaataccggctatgattgccgattgtgaagggaataaaatcaaatggcttcttattacaggagctacttctaccacccctatcaatagatggattaaaccccgggtaggagatatataccaggtagaatttccggataacaacacttttctaaacaataatatcaatataggaaaagtaaaagctgatatctctgcggaagcgttctaccaagaagtacacactcacctacaggagtttttcacccatctgagagaatatcagaacaacacccttgaacggcaaattaaagaacagacactgaaactaaagaataacccttttgttaatgctctgcaaaagatagatatacaatctgttctcagctcggatgtagcggaaacctacataatggaagaggagcaagaaacggaagaaaaaacaaagaagtcaggaaaagcagaaaataaaacatggccgattaacgaagaagttgccaaagagttgattttctgtctcgaccaactatccaaagagttaaatgagcccaatgagcaatttaatgcttataactttctgcgactgttgtgtctcttctccggtgaaaaagaaaaagccacttattatggactgtgtgccgaatacatttataatattaaccaaatagctatcctgccatccagcgaacgtttttcgcatgacaatattcagcgattcaatattctattggcacgtatggaacaattaggcatcaaacaatatggaattacgtttgaattctgtcaaaaaattgtctatattctctctttaatggcagataataacaccgaccgtctgaaacagcttatgcaaagtgaagacctgactattgccgaactggcccgctatttttgcatgagtacactcctttccaaagaagataccgaactgcaacatatcatctacaaaaacatcaattccctacttggtatcaaggaacagaaaaaagaagaagctccttccatccctgtttatttcggacacgaaggagtagagcgcgaatttaaatcatcggcatttggtcacgccaaaaaagatgcccgcgaagatcaaagtatggtgttggctcgtgttatcgcttcatttatgaataccgatggaggtactctttatatcggtgtaaacgataaaggatatctgactggaatccaagaagacctgaagctggtacacaacgactgcgatatctatctgcgcacagtaaaccataatattatctgcttattgggtgaagggaaagaagattataaccgctatcaggaatacatacgttgcaactttcaagaatacggcaaagaacgcattgtactggctttccgtgtagcacccatcaacgaggtagtaaaagtcagcggtaagatttatacccgttcgggaagttcgtgcatctgcaaaccggaacaaaatatccatgaattcatagcagcacgacgtaatctgaaattagactctgtagctcggaaaccggaatttccaaccctgttctctgccgaaagaaacgaatatatctttgacgagtctgctccggtaacagctactccggatatcactgagaacaattcccatgagagcatttcactttctctttttgacaatccgcaagaagagagtataaatgcgcccggcccagtcattgcagtccccactacaaagaagaaaaaggctactttcaatattcagacatcagtcttacgtcccaaccctctacaaaagaaaacggaactaggctataacagtaatttccaattcatatcattcttcaataatggcaaaatagccggttccaccagtcccaaaatcggaatatggggagaagatagtggaaaagtaatctgttcgtatgatacagaaggagatgaagagctattggtcagtgtctttaaaacaggagaaatcggcatttccaacttaaagaaaggcttttcacaacttaattctcctatcgtctttgtcgataatgtcaatgaattgttcttttgcagcccggcatcaaaagacaaattcctgcttttgatagccgaaaaagacggagtcaaacgctatcgcattatccgcctaagtgattttgacaagcctttgggaatacaacccaaactatataccctcttggtaccggataaaggaaactatatatttgctgagatattggacaaaaatataatggaaaaaatagaagatgacaagataacgctcaatagttttgaccaatacaatgccggacactactgggaacatacctcttataaaaatggtttggataccattagcaaattatgcaaccttccctactaaaagggaaaggttgcataacctttatttttttcctatttcaaaatctacacataccggtaagtgatcgctaaaaccaccatgatatttcctcccccaataagtacggaaaggaatgtcaccgccgtatttttcgtcttcttccaataagaatgggaatctcacgatctgtgctttgtcataagaagtccgaataccggcatgtccctgcaacaggaaaccggacacaatcaattggtcaagtattccccactcaccacggtaacggtaagtcccgtctttacgtccatccatcagattgtataacttcgtagcctgcacttctcctttcggagcaacggcacccagtactttagctatcgaattattggtaggataatcattgaaatcacccataatcaaaatattgggatgccggcggacgttcatcagggaatcaaccgaagcatgcagtatctgtgcggtgaacaaacgataaggttcactcttttcctcacccccggaacgtgagggcatatgacagacaaatacatccaatgtatcacccgacaacacctgccctgtcacatgaagaatgtcacgggtaggcgtcctgtcaatctcttcgttcggaatacgaatggagtttttgccaagcaatttaaagcttccacgctgataaagcaatgccacatcaatgccacgctgatcgggagagtcagtcatgacataccgataaccggcttcacgcaaaggcgaatattcagtaaggtctttcatgcaatggtcattttccacctcgcacagaccaaccaaatccggcacatccttcacacctgtcgctacaatcactttggctatctttgccagtttatcattgtatcttgcccgagtccatcctttgggagcatcaggtaaaaactcataatcgttttttaatgtgtcatgctgacaatcgaacaagttttccacattgtaaaacatgactctgaaaggttcttgagcataagcaaccccgaccaaacagcatacgcatagaaataggatgattttcctcatgtcttatttattagaattatttttcgggtacatgtaccaacacatccagcaaatgacgccagaatttgtctaccgtcggtatcagcatacgttcatccggtgaatgaactccacgcaaagtcggtccgaaagaaaccatatccaacgaaggatatttctccaggaacaaaccgcattccagtccggcatgaatagcttttactttcggctccacaccaaacaatttcttatagctgtctacagcaactttcagaataggtgaagacggattaggtttccaacccggatatccctcacctgtagtcacttcagcaccacccagcataaaagcagaacgaatcatttcggacatatccttgcgagaggacaaaatagcacttcgctggcttgtcacaatctttatctttctgtctgcctgcttgacagaagccagattagaagatgtctccaccagtcccggaatatcctggctcatcgcatacacgccgttatgaacagcataaaccgctttcagcagacgaccggcggttaccatatcaatagcctccttacagggagcttcggaagacagctcggttttcagattaggttcggtcactgcaaattcattctctatctcagccgtataaatatttaaatccacacgcaccgactctttatccttcatcggaaccgcacaaagtgcccgtgcttcacgcggaatggcattgtgaagatttcctccgtctatttcacacaaatacatcggatatttagcagccagctgagtcaggaagcgaaccaataatttattggcattggctcttcctttatttatatcatcaccggaatggccaccggtcaagccctttactgctacactaaaataaaaataatcttgtggtgcaggaaccggctgataagcaaattcagccgtcgtgttagctcctccggcacaaccgataaacaattcaccttcgtcttccgagtcaagattaatgagaatatctccactcataaatccttccttcaacgcaaatgcacccgtcaatccggtttcttcatctacagtaaaaagacattccaacggtccgtgctcaatatcgtcagatgccaatatagccaactcggtagctacccctattccattgtcagcacctaaagtcgtaccttttgccttcaaccattctccgtcaatcacagtttcaatcggatcggtcaggaagtcgtgctccacatcgctgttcttttcacaaaccatatctatatgtgactgcagaatcaccgtcttcagattctctctacccggagttgccggcttcttaatcaacacatttccggcttcatccgtcttggtttccaaaccgtgtttctcaccaaatgcttttaaataagcaattattttctcttcccttttagagggacggggtacctggcatatttcttcaaaataatgaaaaacagaggccggtttcaaatcctttttatccatatctataattggtattagtgcaaaatctaattgtagttttgcaaaaattagttaaatcaatatatttaaccgactccttcctcttttttaatggaaaaagagaaagctaagtcacttcaaaagtctatatttgctctgcaaatgtagagttctgttcggaaatgctcaaataaatttggcatttcgctcaccttacactaactttgcaccacaaaaataatagaaatgcttgatactctctttataacagtgttaatagttgctatatgtatagcattattatgtataggaatcttcataaaaggaaagttccccaatacacatgtcagtggtaataaagcacttcggaagaaaggaatcggatgtgtacagtcacaagaccgtgaagcacagaaaataaataaaagagcgattcccgaagtagagaaacaaggcaaagaagaaaaataactaataaaaacatacgtaaaaaaagattatgaaaagaacaaatttcatcctgaatggatttttagcgttggccaccgtgctggtatttgcacaatgtaccgacaaaaacaacaatgcttctactacttctaatgttgctcccgttgcgggtgttgccggttcttccaacatgaagattgcttacgtagaaatcgattcactgctcaccaaatataatttttggaacgacttgaatgaagccatgataagcaaggaagaaaacatccgtactaccttgaatgaaaaaggtaaaaaactggaagccgaagccagagaatttgaacgtaaacttcaaaacggaggttttgcaagccgtgaacgtgcagaacaggaacagatgcgtttaatgaaacagcagcaggatttgcaggctttgcaacagaaattgagtgcagaacttgcagatgagaaccaaaagaacagcttacaattgcgtgactctatcaactcattcctgaaaatatataaccaaaacaaaggttacgatttgattatcagcaataccggctttgacaacttgctatatgcaaaccctgcatacaacattactcaggaaatcattgacggattgaacgcacgttatacttcgtctacaacaaagaaataaatcgggaatatcccaatcaaaaaaaataagaatccgaaatggtcaggctgtttcggattcttatttttttagcctgtcattcaacaaaaagctttctacaggcgtttattatataaaagaaattaataacgaaaggagattaatatggaaaaattcgatgatttaattacctcaaatatccctgtactggtagatttttatgccgaatggtgcggtccgtgcaaaatgatgaaacccatcctggaagatgtaaaagcgatgaaaggtgaaaaagtaagagtagtcaaagtggatgtggacaaacaccaagaactggctgcttactaccaaatacaatctgttcccacactcatgattttcaaagatggcaagcagttgtggagacaaagcggtgtgctacaagccaaagagctaagcgaactgttggcacaatacgaataaccgacgaagaaaaacaataaaaaagaccgtgcaaaacaaatctgcacggcctttttatttataataaacttattatttcttgaaatatctattgtacaagccttcgaagcccttaccatgacgagcttcgtctttagccatttcgtgaactgtatcgtggatagcatccaagttcagagcttttgcacgagtagcaatacgcttcttgtcagcgcaagcacctgattctgcattcattctcttttccaagttagtcttagtatcccatacgcagtcgcccagcaattcagcaaatttagaagcgtgttcagcttcttcccaagcatagcgtttgaaagcttcagcaatttcaggataaccttcacggtcagcctgacggctcatagccagatacataccaacttctgtacattcacccataaagtggttgttcaaatctttaatcatttcttcgtcacaacctttagcaacgccaattacgtgttggtcagcaaattccaaaccaccttctgtttctaccatttcgttgaacttagaagcaggtgctttacacaacggacacttttcaggagctgcatcaccttcatgaatataaccacaaactgtacaaataaactttttcataatttccttttttattagttagtcaatattttatttattagttgatcaccatattatcagcctacttcttttccctgctcttttgcagcacaagccggacatacccctttgtaatattgatgtatttcttcaataaagaaaccattcatgtcaatacgttccacctgtttcgtttcgccactgaaaggcaaatcatatattttgccacatttcttacataaaaagtgagcatgcaaagaggtttccgaatcgaaacatgcatttttttcatcaatcgtaagcattaaagctgcaccatgttctacaaagagcttcaatgtattataaaccgtagttttcgacaatgtaggaatatcgtcacacaaagccatataaatctcatcgatacacggatgagttttatgagccaacaaatagtccataatagctattctctgcacagatggctttatattataactgagtaaataatcataagtcttcataagaactctctttcatatttgtaattgttacaactttatttcacgtgcaaagatatgtactttctagtaactaacaaataatttccttacttttttttattttttttctttcatgcaataaatcaatcaggaatgattatttttgcacctatatataataaggtataattatgaaatatggttttgtaagagtagcggcggctgttccggcagtgaaagtagccgactgcaagtttaacgcacaacaaattgaaactcaaattgccattgctgacgggaaaggtgttcaaatcattattttccccgaacttagcatcaccggatatacttgtgccgacctgtttggccaaacattgttattggaagaagcagagatagctttaatgcagattatgaataatacccggcaaatggatattatctctatcataggcatgccggtcgtcatgaactccactttacttaattgtgccgtagtttgccaaaaaggaaagattctgggtattgtgcccaaaacttatttacccaattataaagaattctatgaacagcgctggtttacttccgctttgaatcatcccgataccaatatacgcctttgcggacaaaacgtgccggtcagcgccaacttgcttttcgatacgcccgatacttgcttcggcattgaaatctgcgaagacatgtgggcgcctattccgcccagctcttcattggcgctgcaaggagcggaaatcatattcaatatgtccgccgacaatgaaggaataggaaaacatgcttatgtacgttcacttatcagccaacaatccgcacgctgtctggcaggatatgtgttcagttccagcgggtttggagaatctaccactgatgtggttttcgccggcaacggacttatctacgaaaacggcagcctattggccgaatctgaacgcttttctttcaaagaacaactggtaatcagcgaaatagacgtagagcgcatccgtggcgaacgcttgaccaacactacttttgcagccaatatcggcaattgtcccggtcgtcctgccatccatatcaacaccgaatttgtcaatacacgcgatttaacactaacccgccccatcgagccgcacccctttgtgcctcaaggaaatgaattagaccaacgatgcgaagaaatattcgccatccaaatagcaggtttggccaaacgacttgtacataccaactgcaagaccgtggtagtcggcatttcgggaggactggattccactctggccttactggtatgcgtcaagacatttgataaactggaacttccgcgcaaaaatatcatcggtatcacgatgcccggtttcggcacaaccgatcgcacctataataatgcactccacctaatggcttcattgggagtcactatcaaagaaataagcattaaggaagcctgcatccggcattttaaagatatcgaccacgacatgaccgttcacgatgtgacttatgaaaacagtcaggcacgcgaacgcacgcagattctgatggatgtggcaaaccggctgggaggtctggtcatcggcacaggcgacctttccgaacttgcattgggatgggctacttacaatggcgaccacatgtccatgtatggtgtcaatgccagcattcccaagacattggtaaaatatttagtaaattggattgccttgaacggtgtggacaatgaatcacgcatcaccctgctggatattgtagatacacccatcagccccgagctgattccggcagacgagcaaggtaatatcaaacaaaagacagaagatttggtaggaccgtatgaactgcatgacttcttcctctatcagttccttcgcttcggattccgccccggcaagatattctatctggcaagcatagccttccgcgatacgtacaatgaagaagtcatcaagaaatggctgaccacattttgccgacgcttcttccagcagcagttcaagcgttcgtgcctgcccgacggtccgaaagtaggttccgtctctctcagtccacggggcgattggcgtatgcccagcgatgccagtgccgcaatgtggctgaaagaatgcgaagaattataactttttcatccttttaccgggtcatttgcaaggctccgcttatgcgtatatacgtgcaggctcacacgtacgttcacgcagggccgcacatatatacgcgtaggcctatacgtacgttcacgcaggcctgcacgtatatacgtgtggacacctgcatattatcgacatttccggcatactcaccatcgctaaatacaccctttgctggacggcacctcaaaatgatagatatctcttctcaccgccatcttgatggcacgcgccaaggccttaaagattccttctatcttatgatgttcattatttccttctgccttgatattgagattcatacgtgctgcatcactcagtgatttaaagaaatgaagaaacatttcggtaggcatctctcctatcttttcgcgatgaaactccgcatcccacaccaaccaggcacggccgccaaaatccagagctacctgacaaagacaatcgtccatcggcagacaataaccgtaacgctctattcccctcttactgcccaaggcctgataaatgcattcacccaatgcaatggccgtatcttcgatggtatgatgttcatccacctccaagtcacctttcacgcaaacggtaaggtcaatgccgccgtgcttgccaatctgctccagcatgtggtcaaagaaaccaagcccggtggaaatatcgcaccgaccaccgccgtccaaattgaggcggacaaagatatccgtctctttcgtcgtgcggcgcacctcggcaatacgttctccggcgaacagaaactcagctatccggtcccaatcggtcgtggccaacacacaatatgcttccaggttcttttccttcagtacctctttatcgtcttgaagcaaaatagccttgcagcccaaatttttggccagttctacatctgtagcacggtcgccgatgacaaaactgttcgccaggtcatagtctcccgtcatatattttcccatcattccggtacgcggtttgcgggttggggcattgtcttcgggaaagctgcggtctatcaggatatcatcgaatgtgataccctccccttccaatgtcttcaacaccagattatgcaccggccagaaagtatcttccgagaaagaatccgttcccagtccgtcttgattggtaaccatgacaaactcataatccagcttgctccgaatgaagctcagattacggaacactttgggacaaaactccagtttctcgaacgagtcgagctgataatccaccggcggctccaccaccagcgtaccatcacggtctatgaataatgcttttttcatctgttacaatctttttatttgccggactgcatgccaaaagcgttcagtgcctccagcaacgtatcattttcgggacgagtgccaatagtgatgcgaaggcagtcacgacacaaagaaacattggtgcgattacgtacaatgattcctttacttaccaagtaagcatatattttcttcgcatccgtcacttttgccaaaaagaaattggcatctgtcggataaatcttctcgcagcagggcaactgtataaactcatcgataagacgcgcacgctcttccagcaatgacttcacccaacgttccacttcataatggcgatgcatcatggcaatggcctccttttgagtcagcaggttcacattataaggatactttatcttactgaaaatcgcaataatttcaggagaagcaaatgccatgcccagccggatggcggcacatccccaggctttggagaaagtctgaaaaacgatgagattgggatgtttctccaagtcaagcagaaacgaaggtgcatccgaaaaatcggaataagcctcatcgatgacgaccaatccctgaaaagcagacagagtcttttccatttcctcacggtctaacgcattcccggtcggattattgggagaacagagaaatatcaatttggtattatcatccgtcgccgccagcagccggtctgcagtaaactgatagttttcgtccagcaataccttacgatactccacatcattcacctcggcacatacctgatacataccgtaagtagggtcgatagccactacattatccacccccggacggcagaaagcacgataaaccaagtcgatagcctcgtcgctgccgtttcccaaaaagatattctccggtttgaccttcttgacgggagctatcagattcttcagctctcgctgcatcgggtcgggataacggttgttcggagtattatagggattctcgtttgcatccaaaaacacagaggcttctgccccgctatattcatcgcgcgcagatgaatatggctttaaagcccggatattgggacgcgtcaattcttttaagtctttcatatagtctctttttttattttgcttttaatctgacggtgacggcatttttatgcgcactcagttgttcgttggctgccattacttcgatggcgggaccgataatttctatgccttcgcgcgtgatttcctgaaaagttattttacggataaagctatccagacccactccgccataagctttggcataaccgtttgtgggcagcgtatgattggttcccgatgcgtaatcgcctgcactctccggcgacagggaacccagaaatacagagcctgcattgacaatacgctcggcttgctcctcataatcccgggtttcgattatcaggtgttcgggagcatattcattggttaaagcaattgcctcatccatatctttcaccaatatcagcttgctgttggccaaagatttctccgctatttcccaacgggagagcaaggccaattgccgctgcacttcatattccacttcttccatcagcttttcggaagtagtcaccagcatcgcctgactgtctaccccatgttctgcctgcgaaagcaagtcggcggcaacaaagacggggttggccgtttcgtctgccagcacttccacctcggaaggaccggcaggcatgtcgatggccacatcacacagggaaacctgctgcttggcagccgtcacatattgattgccgggaccgaatattttataaaccttcggcacactctccgttccgtatgccatcgcaccgatagcctgcactccgcctgccttgaatatcttattgactcccgctagctttgccgcatagaggatggcaggatgaatctttcccgctttatcgggaggagtgcaaagaactatttctttgcaaccggctatttgtgcaggagtagccaacatcagcacggtagagaacaacggagccgtgccgccgggaatgtacaaacctactttctcgatggcaaccgctttctgccagcaggtcactcccggaacagtctgtactttctttccttcaaaacgctgcgcagcatggaaggcatgaatattcttctgtgcaagcataatggccgctttcagttcaatgggaacatctttttctgcctccgccatctccgcttcggtcacagccaaggcatcaagtttcactttgtcaaaccgttcttcatattcaatgacggctttatctccttccgattttacacggtcaagcacttccttcacggtatcgcgaagcgtttcggtatggaggacaggacgacggagcatatccgcccattctgctttatcgggatatataattttcttcatattctttatttctttaaagaggaaacacctcctccggacccactataatatcatcttctctatgggcaataccaaaattccttccgcacccaatgctttcagctttccgataatctcccaaaaacgtttttcatccagcaccgtatgcaccgagcaccaaccttcttgtgccaaaggcatcaccgtgggactcttcatgccgggcaatacttctataatctctttcagccggtcggcaggcgcattcatcaatacatacttcttatcttccgctgctttcaccgcttcaatgcggaacaataattcattcaatatctccttcttatcctcggacatatgcttgtttccaatcaacaatgcctcgcttttcatcaccacttccacttccttcaggctgttgctgaccagtgtagaccccgaactcacaatatcaaagatagcatctgccaggctgattcccggagcaatctccaccgaaccggtaatgacatgaatatctgcatggataccattcttctgcataaattccttcaagatacccggataagaagtagcaatcttgcgaccttcaaaccaagacaatcccggataatccacatccttgggaatggccaaagacaaacggcatttgctgaatcccagccgcttaatgacttccgcatcttctttgcgttctacaaactcattctcgcctacgatacccaaatccgccacaccaccggctacagactggggaatatcatcatcacgaagaaaaagcacctcgatggggaaattggatgattgtaccaataaaattcttttagaagaggaaattttgatatccgcttcctgtagcaatgccattgtctcttcaaacaaacggcctttggactgtactgcaattctaagcatattttctatcttttgattattattcaagcaaataaaaaagggcttaccgcatcggcaagcccttatatcagtatactacaatatcatcacagcccaccgcgttattcgttaggaaaatgatgatgatgtgtagctgttctaaccatagtttttctttttatttgcgacaaaaataaagtattaaaatgaatacagcaaataattatcataaaaactttgatttttctttcaaattaaaggaagctgttcgtcactctccacatcacaatgcaaaaagtgcatctcttcttttgccttctcttgcgagaaagtaaagtaagtacaaagcgctttggtacacaattcctccttattattatagatagccgcgtccaccagaatgatattgcgcttcacttccttgatagaagcacgcagcacgatatgcgaatcattcgtactgataggtttcatatagcgggtttccatcttcgaggtcactccggtagtctgcatcttacgcaaaatcacccacgcacaaatctcgtccagcaacacagcctgtatgccgccatgcagtgtgtcaatccatccctggaattgtggctgaggtttccaaatgctgataacctcatcgccatcttcataaaattccatcttcactccggcctcgttattgggcgcacagccaaagcaattatatccttccatccctttccagggattgattatctttttcataggctacatcttaaaattcgtaatccacgcaagcgcgtccttcttttgcatctttcaggatgccggcagcagccacatggtcaggatgaacagcatacgcattgacgtctgccaatgtatcaaactcactctccaaacaaatatcccatgcttcggcagaattgatattcagaccgacaaatattttacgaatgaaaccaatctttgcaggcaatgcttcaatggcagccttaaaatcattcatcactttcagtttttcttcctgcggaagtgtttctttcaatttaaacaaaactatatgctttaccatacttgatattttaattaattattctacttttgtaattaacatcggccaatacaagtagcctgatgcaaaagtaacagttttgttttaaaatacatcctattattatgataattattggtatagccggaggaaccggttcaggaaagaccactgtagtcaagaaaataatagagagcctgcccgaaggttccgttgccgttattccacaagattcttactacaacgaccaatcttccctccctttggaaaggcgcaagcagactaacttcgaccatcccgatgcattcgactgggcacttttcgaacaacagatagccgaattacgccaaggacgttccatcgaacagcccacctattcctatatagtatgtacacgtctgcccgaaaccattcatatagagccgaaggaagtcattatcgtagaaggtatcatgagtttatatgacaaggaattgcgcgacctgatggacttgaagattttcgtagacgcagaacccgacgaacgcttgttgcgtgtcattacccgtgatatggtggaacggggccatcctttggaaatgctgatagacaagtatcgcaacgttctgaagccgatgcatgatgaattcatcgagccgaccaaacaatatgccgacatcattatccccaatggaggcaacaatcagaaggcgattgaaattcttaagctatatatcgaaaagattttgggcaaatgaaactagtccggctactgctcctcgcctgcatctgcatgatggcatgccgccaacaaccgcaaagcaatgaagtgacaaactacgatttgccgcaaatgaaagacagtggagaattggtggtgctgaccctcaacagctcgacttcttatttcaattaccggggcgaacccatgggattccaatatgaattggccgaacagtttgcccgctcgcttggtgtgaagctgaggatggaaacagccaagaacacacacgacctggtacataaattactgaccggtgaaggcgatttgatagcctataacctccctatcacgaaggaattcaaagacagtgtagagttttgcggcgaagacatcattacccaccaagtactggtgcaacgaaacagcaacaaagtcccccctctgcagaatgtaaccgaactgattggcaaagaagtatatgtgaaacccggcaaatatcttgaccgcctgataaatctggacaaagaactgggcggaggtatcctgattcataaagtagagaatgacagtgttaccaccgaagacctcattatgcaggtttccaacggcaccatcgattatgccgtctgtgacaacgaccttgccaagctcaacaaaacatattatccgaacctgaatatctctatgcccatcagtttcgaccaacgcgcttcgtgggcggtcagaaaaacatctcccctgctggcagcagcagccacccaatggcatcgggaaaacatgacttccccgtcttaccgggcaagcagcaaacggtattttgaaatcagcaaacgaataccgcacggttccatcctgtccatacagaaaggaaaaatatcccactatgacgaattgttcaaaaagtacgccaaagaaattgactgggactggcggctgctggcttcgctggcctacacggaatcgaacttcgatacgaccgccgtctcatgggcaggcgccaagggattaatgcaactgatgccgcgcaccgcacgtgccatgggcgtccctgccggaatggaacagaacccggaagaaagcatcaaagccgccgtgaaatacattgccgccactgccaactctttccgccgcattcccgaccccgatgaacgaatcaagtttatcctggcagcctataatgccggcatcggacacatcacagatgctatggccctggccgaaaaatatggaaaaaacaaatacatctgggacaataatgtagccgactatattctcttgaaaagcaacgaagaatatttcaacgaccccctctgcaagaatggttacttccgcggagtagaaaccttcaagtttgtaaaagaagtgataagccggggcgaagtctacaagagcaaaatcaagcactgaaacggatacggaaccgtgtcagtccgtcggaataggtgcgcaaagagaacgtgcatccgtgcttcatcagcacttcacgaataaatatcagaccgataccctgtccgttgggtttggtagaaaagaaaggactgaataatttcgcttccacctctttgctgatgccggctcccgtatcggcaatctcaagcatggtaggaaagacagaagtacgaataaaaatattgccttcctcaccgatactctcggcagcattctttatgatattcaccaatacctgttcaaacagggaagtatccatgcgtacatgcggattttcatcgcacaaagtcaagtgcagcgttatattacggttgcggcaaacagtctccataaacattttacaagccgccacacggtcgttcagagagaccaattgcaattgcggttcaggaattttcaccacattggcaaagttagtaatgaaacggctcatgctataacagcggtccacgcatactttcatcacctcacgaaggtcttcggtatcatccatacactccaaagcaccatccactgtatcaagagtggaagtaatgcccgccaccgtattgttgacttcatgcgcaatcatgcgaatcaccttttcgtaagccttcttttcggccttcaccacttcggaggtcagactttctatcaggataaacggatgcgcaaatccccggtctacaaacgaaagacgcgaacaacgataaatcatggagtcactcagacgaaccgtcttgctggcatctttcggtatacgctctatctcttccgccaaaggcgaggtaagttcacaaagcaaacatcccttcacttcatcgtctgtcacataatccagataacggagcgcggcagcattaatcatggagacatgtccgtcaagagtcagaatgatcagccccataggagatacgctgaccagcaaatcaagaaaatgattttgctcgcgcaagcgcagtcgttcgtctttcaactgttccatcatgcggttgaatacaagcacaatgcggtcggcttccttctgccccaccggagtgaggcgactgctgaaatcctgttcgcggagtaaatccataccattgccgatagtatccaatggtttaatcaccttgcggtaaaaaaagataagaaagatgagactgaaagtgataattccctccaccatataaaagagcatgccgcgttccttgaaagaaagtaccaacaggactccccaaaccgccaccaacaacaatgatagaatgaagaaaaagaacttcagtttcatttttttatttaatcgtttatcataatattatatttttccaacctacgataaagagcagcgcgactgataccgagtgctgttgccacctgtgacatgttattattgtacttctccaatgcctgcaaaatcgtctgcctttcaatctcttccaacgtcataccctgcagattagaggtcactttcggctccaccgggcattgatattgcgctttgaagtcttcggacatcaacacctgtttgccgctcaccagcaacgtacgctccaccaggttcttcaattcgcggatattccccggataaggcaatctgctgagatactccatcgcttcgaccgtaaaatccactttaggcaaaccgttggcttcacattgcttatcggcaaagtaacgcaccagcaacggaatatcctcacggcgctcgcgcaaggcaggaagatgtaccgttatcagattaatgcgataaaacaaatcttcacggaaagtatgttcccgaaccatccgggaaaggtcggcattggtggcactcaccacacggatatccacctttcgcggacgactgtcgcccaagacctcaaaggtttgctcttgcagcaccctaagcaatttgacttggcaactcaaatccaaatctcctatctcatccaagaaaatagttcccttgtccgccagttcaaaacgccccatacggtcggaagtagcatccgtaaacgctccttttttatgaccgaacatttcactctcgaacaaagtatgtgaaatgccgcccaagttcactttcacaaacggtttcttggcacgggaactgttgatatgcactgcttctgctatcaactccttgccggtcccgctttcaccggtaataagtacggaagcattggtacgggctatccttttaatggtagccagtacatccatcagcggtttactctttccgatgatatggctgcggtcaaagccatcattatccaccaccggagcttccggtttctgcttatcggcagtcagttcgagagccgtttctatacgttgcatcaaagcgacattgttccacggcttcgtaataaagtcaaaagcacctgcctgcataccctgaacagccaactgaatgcttccccatgcggtcatcaatatcacaggaacatcgggccggaatatcttcacttgctttaaaagcgtcaatccttcttctccggtggtagacaaggtaaaattcatatccatcaatatcaattgaggagccacggaacgcacaatctctatcgcttcccgaggtcctgcaactgcctgaacctcatactttgccctcttcaacatgaagctgagagaagaacggatggcactatcatcatctataatcaatatcataatgatgcaaaaataaaaattattattcaattactgcttgataatcttctcaaaatcggcatcaatacccgtattgtccgtaaagtcccacaaagtaagactgcgaatctgatagtaataagaccaataggcatacaattcattgatgtgtttctgtcttgcctcatccttcttcaactgagaatcgttcaggtcgagcgtggaaatctttccaatcataaaagtctccacattggtattataacgcttctcggcaatcttatctgcttcatttgctatctgaagctgcatctgctgattattaaactgctctacgaggataaaaaggtcttgattgaagttcatggtttcctgacgcaatctgctttccaccacatcgcggttactctttgcaatcttcacctttccccgacgtttcccccagtccaggataggaatcttgaaaccgacttccactatctgattatccttcagattatgataaacggtattcagttcattattcgttcccgtaaagccgacctgcgcatacaaggttatctcacgaagatcacctttcgcctttgctacttcataatcagcctccaactgacggcggcggatattctgggcaaaagagttattggtcaacgctttatcgagcacatcatcataattaagcaaaaccgaaggaatactttccggaaccaccggctccaaatcttcatcctcactcaatgccaaaaaagaacggagctgaaacatacggcttttcagagtactctcattatcagtcagagtagaacgggcatccagcacattcaattccaactgcaacaaatcattttcactaatttgccccatgctgcgcttggccttcgccacttcatgcagcttttgtgcattttccaaattctgccgggctatattcacattctcttttgccaacaaaagattgaaaaaataattaatggtcgttcttgtcacattctcggtagcactgaggaatgaagcttttgcttcagcatatctcacaggctctatgcgacgatcccacttaatattatttacaccgaaaataggctggttcaaagtcagggcaataggcacggacatatagcgtttggatttatcgccatccaactgtttcaagaaatcaagagaagagttcaacgaaagcgtaccacccgtaaaccaaatactttgatcaatggacagttcgccactcatctgcaaattattgttacggacatacgtataagtaccatcttcctgctggtatgaattatatttcttattatagctaggcagtgttgccttcaaattcatttccggcaaaaggttggcgcggaatgtgcggtattcccaataagcagttttcaactcattcaatgccacagctgcatccacactctgagtgcgggctatcacaatggcctcgtcaagcgtaatggaacgtcgatgttctttaacttgcgtctgcgctccggcagtcatcgaaagagcgatgaccataaacaaagatattacttttttcttcattgtcttatgcttcttttttgcaagagagtaaacaaatggtatgccaaaaacatatatcactgaataataacaagttaatataaaaatagagtgtccgatttcggacactctattcatatacgaacagctgattatttatctttgtcattgcctcttaacactactctcttgattcaacaagaaaggaatccaagttaagcgcattacctttaccattagtccgggttcttaatttcttgcactttcccgctacaaccaaattacttgcggcattcaagctgatatttaaataattggcatcgactgcaattgctccatgcgaagaacccaaagttatattcagtgaatcaaccgtgaacgccttctccatggccaataccgaatagtccatccttatctctcggatagcattggtatacacgatgacagtatccttgggcatttttccttccgcatctatcaacttcagacttaatgcatttccctttatcttcttttctcccaattccgggtgtttgacatcgatacggaattcttcagatggtataaacacaactctatagccggcaaagtagaatttagtaatattctgagccatacttaccacacaaactatggacaagaaacaaataaaaaataattttcttttcattacatatttatatctaataatatcaataaatcattgtgtttgtcttttcaaaaaaagaccttggtctttttaaaaaagactttgaagttttttggaaagaccttgaagttttttaaaaaggtcaaggtctttttaggaaaggagaattgatgaaatctcctttcacacataacggtgctcaaacgtcctattcatggggactttcgtgtgaaagcaaccttcattgtttctcttcacatcaaaccccgatgaacaaaggaattcaatgagtgcgatgcgtgaaagcaacttttatcaacttccttttcatactcttattccccatgcaaagcctcagccggctgaatcttcatggcctggcgagccgggaaccaaatactgaacaccactactaccaacaaaaggaaataagtaagtattcctccgacaataaaacgtcccaagctccattctaccggccacgtattcaccaaatcggcaacgcctaaattgtaagcaacaatcaatgccggaatataagcgaaagtaaccaacaaaatcccctctcccatcaagagccgcataaggctgtgaggagtagctcccgaagtgattcggatggcaagttcctcccgacggtgttgggtacggaaccaaaaagtgccaagtaccgccaagaatgcattaatcaagaagaaaccggcaatagcaaggtaagtataaagttcactgcgatagtccgacaattgctcattgcggaactcactcatcggacgcatatctgccaaataaagattgcctacacgaagctgtttcttcatctccttgcggaaagcctctacaaaaccggggcgatcggcatccgcctttacgcgaataaacaagtcctgataaggaatgctggcataggtgcatttaaatccatcattacggacataataaagcgctgcttgttgcgaggtgtattcattgtacttctgattttcacaaacagcagatacccggacagaatcacttccgtctttattaaagctcacaagcttacccaccatttccacacctttacggggcgtatattctttgcttccttttccacttatcaggtaacgggcaagattgtccgtcatcaccatttcttcgggacgggcacgttttgaaagttcttcgggagagcatccgtctgccccctttactccaaacacagagaaataaccggggctgaccatgcgcgtataagcacctgcctgcaaagtatcataaaaaacagtctgagtactattcttccacacataatgaaaatgcatgcgggtatagcacaaatccttcacggcaggatgacgcttcaagcgattacagaactccagatattcaccggtcatcatctcgggagagcgagtggttgtatctcgttccagactctcctgaggtaatacgcccacttggatgtaatagacattttcccattcaaagccaagagatttctgtccgttgaccgccacggcatatacatagtccacagcataccacaaggaagtggcaatcacaaatattccggccaccaaaagaagattggcacgaaggttgttctttataatttttaatatatgtatcaacatggtttcagagtttttcattcaacgaatctacaattggagtatgcgccactctccatgcaggcacgtatgccgaaaacatattgagtatcaagcaaaagccaaatgcaatgagaaatatcacaggacttaccatagaggcattcatcgtagcagtggctccccatacggtttgcaacaaccagtcgctcatcaaccacaagaacagataagccaatgccaaccccaataatccgcccataaccgtcagtaccagattttcgttcagcacttgccataccagctcattgcgagtcgcaccaaaagccttgcggatgccaagttcttccaaacgacggcgcatacgggtattggtcagtccactcaaattgatggcaggaaccaaaagaataatcagtatcataataccatatttccagaaattggcattcagattctcgtattgattggcaaacttacgattgagctgcatacggaaattatcaggttgtcccatcaattgcaattccatatcacccaatgtcgtgtttatctgcgccacaccgcgagccacttcattgcgaatagcatcgaaatcatcggtagaacgggcaagaatggtaataacattattaccaccggtttgacctgcctccgcttcactggcaatagcgtttgaggtataaggagcatatacttcactccatgtaaactcacaaaaacgattcacgtcatccaccactccacatactgtataggcagcaaagttaaccagaatatcctttcctatggcattctctgcccctccgaaaagccggcgtgccacactcttggctatgacagcttgcttcatccccgattggaaatcagcttccgtaaaaggcttgcccgccaagaaacggaattgatatactttccagaaggcggcatcggtcaacataagcggagtattcatttcttcgtcggaaccgacggtacccacaagaacctctcctccctcgtaagtggcagtaactgcttccggagtagtcaatggataaaatatctcctttaccaaccacaacgaaggacgggaatgctctgcactattggagtcttttttatcataaacagtacgttcccacttgacataaagcgaacgggaacggttcacttcgggggcataatctgccgtctttgcctgatacacaatcaatatcaccataatcagagctatggcaagtgcggtgcccaaaacggttatcacactcaacaaaggttgattacgcaactgaaaaaaggcttgttgtattatctttttcatttacactaaaatttatttcatcattttatttatatatattcttattcctcatgcagcgcttcggcaggctgaatcttcatagcttgtgtagcaggcatccaaatgccaaaaacaatcattagcgccatcaataaccaggtaacgctaatacctgccacaaaccggaatgtactccattctaccggccatacggctatcaacggactattgccgacagaaggttccatcaatgccacattcaggcatacaatagtagcaggaattgcaacaaccgtcaacaagataagcccttcgcccagcagtaaccgcctcacttgtctgcgacagcttcccacactcatgcgtaaagctatttcactacggcgccgacgagtgcgataccaaaacgtaccgacaacgcccataaaaacattcaccaacaggaaaagcgccacaaaagaatgggtctgcaaacggtcacggctgccatctgctgattcatggcagtccacaatcttttcatagggcaccagattcatcaccattacattatccacctcaatggcaggagctatttctttcaaaaaataagccgaaaagtcacttctgtctgcttcgggaagcacacgtatcgtcaccgtaaacggcatatttatcgtagtaatgagattgtcatcaatacgtttgataaaccaaccttgtgatttttcaaatcgccccggacggaaatcttccaacacagaataaattcgtatgccgcgctcatcgtctttgccggtacggagaatggaatctttggtaaaggccggattacgcttctgcatccaatgaatcagcatacgggtaaccataccataagaatccgacacaggcatcgaagcaaagtctggttgtccggactccggatggaaacgaaaaaccttcatcatatcattgtccatcatggcataacgtacagaaaccgaagtcgaatcattacagaaaaaagcactccaacgattggaagctcccatcggatcggaactatagtgcaaacctaccgcttccaccactttgtccatccggcgaagacggtcacgaaccatcaatactttctctatataagagtgcgtggtatcacgttcctcacctccggcatccaattgcaactcatacacatggctataatcgaacccaagcggacgagtaagcgtataggtgaaacacccaatggaatcacacaaaaaccacaggactatgaacaccacaaaaagctcacccaacacccaaccattgtaacgtgtccgattcatcaacatcttcaaattgtgataaacaaatttcataaagctaattatcatttaaagaaacaacaatgggttttcgggaagcataccatgccgggataccggcactgagcaggttcattaacaaacagaacagcaaagcataagcaaaaacggccggactgaacagggaagaaaccggaagtattatttccccatgagaatataccgtccaaaaggtagagaatatccatccccgtaacagatacaccgccccataactgaaaacaaatcctacaattccacccaatatcgtcaataccaggttttcatccagtatgcgccgcaccaacatcatacgagtgctaccatacgccttcctcactcccaactcactcatccgttgctgcatacggctgctcgacaagccacaaagattcaatgccggaaccaacaaaataataaacaagacaataccatattgccaatacattcctttcatgtcaggatcagggaaaatacggttgcgtgccgtcatcgaatcgtcaggctgattgtatatatccaattcataatcggcaagagaagtattcatttgtgctttccggttatgaatatcatcataaattgcttgaaaatctttagcatttcgggcaagaatacttatttcgaagtcacctgcatattcatctgcctctttaggagtccgtaacaaatttgccggatacatacaccatagttgtgcataagcatggatagccgtcaacgagggatcacgcaccacccccactatacgtttgagatgacggttcatcaaaaccgaacgaccggcaacatgctccgtaccaaataggcgccgtgctacgccggcagatataacaatggcctcactgccgtcgtcctgcaggtctgtatctgcaaagggacgtccgtctataaagtcaaattcatacactttccaaaacatggcatccgtataacgaaagtccacactggcacgtgcagattcatcgggcgtggcaagcacagcgaccgaaactgccgtagccgatgtagctgtttctatataaggagacggaagtaccaagtctttcatcagtgccggtgtgcaataccacgaagtataccatccattctgtgaggtgagcctgacagtgaaggatttgataaacatggtccgctccagattcgtttcgggaggggcaccacggtattttacctgccaagctatcaccatgaccattatcaggcaaatggcaaaagctgtacccaatatgctgatgacactcagtaacacgttatggcgcaataactctatggtttgtcttattaattgctttatcattgctcttatacacttttttataccccagcataacgcattttcatcgtagaagcaggtggaaaacccgcatctacgagtgagaaatgcacaattttacatcacctgacgtccgtcaaagaagcgaatcgtgcgtgaagtctgtttggcttgttcttcattgtgagttaccattacaatggtgcgtccgtcttccttattcagtttatgcaacaattccatcacttccgcacccatctttgaatccaagttaccggtgggctcatcggcaaggattatttcaggattaccgacaatggcacgcgcaatggctacacgctggcattgaccacccgacaattgagtgggcatgtggcgcatacgatggctcagccctacacgctccaacacttccttagccaaacgggtacgttctttggccggcatctttctatagagcaaaggaagctctacattgtcaatcacattcaatgagttaatcagatggaaagactggaaaacaaaaccaagtgtcttgttacgaaaagccgccaattctttgtctttcatattttctaccgacgtaccgtttatctcaatcttaccgctactgggtgcatccaacagccccatgatattcaagagagtagattttccacatcctgagggacccatgatactcacaaactcacctttttccacatccagatttacattctcaagtgccaaggtctcaatttcatttgtacggtaaatcttgttaatgccggttaatttaatcattgccataatcattttattttaaattgttattattatcttcattaaaagttcgctgttgtctttcaacattcaaaagttatgccaaaagtataaattatttattatcaatattttgcgcttcatacaaagtgtccgttatcgaacactctgcccgattttgtgcgcatcggaaactattcgtcacgcaaagcatcggcaggcaagatatgcgaggcacgcttcaccggtatataagtacctatcaatgcgataacaagcaagatgatataagtcatcagtgtaacgatgcagaaatgcatcaccggctgattttgccaataactcatatcaagtattgccctctttactcccgaagagaaaaatccactctcatgcacctgatggaaaaccaccggaagagctaccacaaaagcaaccgttaccaataaaaatgcttccgctaaaaattgattacgcacagcattttcagatgctcccatactgcgcataatacctatctcctgacgacgcgcattgcaacgaatccagaaagtacctaccatacccaagaaaatacagagcaacgcaaatccggctaacgaatatttcaggcggagttgattgatgacaccgcttctctgcgcatacatataactcacctcttcaaacgattcaagcccggaacaatagaaattaccagccttaagcaaaggcatcacttcctttttgaaacgctgttcaaaagcgttggcatctactccttctttcagcgaaaaagtgatgctgtacctccaattcatataagtcttcccttgtatctcattatatacccacaccaataaaggataaggttgttcataattgcgatgcttataatcttgaaagacacctgcaatttcataactgctcttatcatgagaatatactttttgccctgtcacatccgtttttccaaaaagagcccgggccagagcctctgataaaaatactttttgacgtgtcgccgcatctgccggtatatttatatcagcccccgtaaaagcatctttcatgccataagtgcgaaacatattactaccgtcttgcagataaaattcataatattgtgtatgtatatatttatcattcttgatatccgccgtatcattatatatttgtgttccattccacgaaccggaattaggaaagctggcactggaagcaatagagaaatctttcatctcaggcaggtcgcgcaccacacgaataatacgattataagattctttacaaatggaatctgtattcatttctgcttgataattcccattggaagattcataattccctatcttcaccacatatctgttatgggcatcataccccgaagctataagtttatcggcagtcagaatataaatggggtcaatcactgtccaaaggaaaaaactgacaatgaccaattctataaatatccagccattcattctgcgctggttccatagttggcatattattttctttatcataatcgtatttttgtattaacgtttagtattaagagactgaataatggtatgccgcaaagaccataaggcaggcacgaatgccgatatcagattgagcaacacacaaagcacaaaagcaaaactgaaaatccatgggttgaacagcatctcgaaagaaagaaacggtgttttggcagggtcatttacccaatcgtcaaacaaattaagtatccagtcacttgcagtcagtacaattaaataggatagtaaaataccaatcaaaccacccagacaagtcagtaacagattttcccataacacctgtcccaacaatattttattggtggctccatacgcccggcgtacccccaactcacacaagcgatgatccatacgcgatgaaatcatgccactcaagttcatggcgggaataaaaagcaaagccagcaatatataaatcaatcctttcaacagttccccccaatcaggcgcctcacaggaattctttcggaatgtacttttccagaaatcatcgggttgttgcattaaatcattttcatattcggaagtctgaagattgtatttacgaaaaacatcctgtacttcggcacgcaaagcttctttatcggccggtgtcggagcaagcatataaatatggacattacctatcagtttctcaccctcaaacgttcgggacacccatgagtataaaaacaaaggtatccataagtcacctgccgtatcaggagtggcattcgacacatcttgcacaattccacacacacgaaactccttaccattgaaggtaaaatatttccctactacatctgtcgaagcaaaaatgcgtttagcaaggctttccgacaaaacagctacaggcaaaccggcatctacatcagcctgagtaaaaggttttccggtcaaaaagcgaaaagagaacacagaccagaacccggaatcagcatagtatggatttacctccattacctctttcttatcaggcaaggctatcgtattattacccataaaatcctgcgtaccggcaccgatagcttccaaattaggcaaatttttcaacattttatccaccagatagtaggaagcaccgccattgcaattccaactttccttatttgtcttaggataacatttcattgccttaatcgttagcatcctatcgcggttgtattccggataaatcggagcaaatttcacataaaagataataaacatagtcatggttaaagcaatggaaagacccgtacccaccacatagatagaagtaaaaagtttgttttgctttatcagtgtccatgcttgttttaaatatagttttatcatatcaagaataaatattaaattacattttatttagatgaagaacccggtttctttaccggattcttcatcaatcccccacgaaacacttatttactttaaaaagagagttttatttcttcgtttatgttgcaactgttcctacttgactttcaacttgcttttgtttttataattgctcatatcactgaccaccactttatcaccgggttgcaatccgctcaccacctccacatattcaaagttgctgtcgccaagttgtaccttacgctttattatctcattatcaccgtcctgcacgaacaattcatattcgccacgacctacataataagaagcatttgctattctcatcacatcttctttcacggcattcattacatatacatctgttttcaatcctgaacggagacgtttgttattatcctccaccaactggactgtaaacgaaattacaccattctttgacaacggcgtaacactgctcacgatgccttccaatttttcattgccgattttgacaatggcacgtcctcctgccgccacacggtcgccataagtatcggctatttcaccttccactttaaaatgactcaaatctgagatgacagccacctgtgtgccttgcggcacctgtgcaccgacctgattattaatataagtaagaatagctttgcgtggcgaacggatttgggcatcatccaatgtccgcttcatttcggccagactctttgcgaagatattaaattccagttctttcactttaaggtcggctgccttgacttctttttcatttgcatattgctggcggagctgttccaattccaattttcccgtattaaagttcaactctgcctgacgcaccttatccgtagtaccggaacccaaactatccaaataacgttcgttacgaagctctacttccatacggttcaacttcatggcagaaattttcacctgcattgccaaatcactcagatacgtattattgttcaccttcaactgttccagctgataacgcttcatctgctcttcatccagcaatttcttatattccgtttccgtactctgaaggtccagtttaagaatcggcgtccccacatccacactgtctcctcccttacgataaacttccacaatacgggtattgatgggagagttgatgatttcctcaaaagccggaacaaccttaccggaagcactcacacttacctcaattatccccgtatccacttccgagaataccaaatccttccgattcacactactccgcatgaaagaaatcagcaaagcgatgcatacgatgccggcaacacctataacaccatatttaatcaacattttcttacgctctttatcacgtacttcttttggaatttctctgtccataatttatcgttattttattatttttttcgtatcaaatctaaagcaacattcatgccaaaacaccaataatctgattatcaatcataaaacaaaaagaaagggtgtccgatatcgaacaccctgtacgtttttaaacttctgcaaacggacattcatgattccgtttcatcgcagacgcaatatatctcccaccttcggcgctgcatcctcaggcttcattttattcattttatataaattcttcagacgaattccgtatttctgtgcaatggagtacattgaatctccgctgcgtaccacatgaacaacatgctctttgtcggcacgacggtgttttttatccaaatagataatatctcccggtttcaacacatatcctttatacaagtcattgtactttctcagtttacgctgactgatatcgaactctttcgacagacttttaaaagtatctccgctacgcaccacaatatacagcaaatcatttgccaaataaggctgatgcggatttggaaactctttcatccacttgataccgtcacgggtatcgaatttatgtaagtcatacagttcgataatgtcaatcaaacgataagcatagcgaggatctgttgcatatccggcttttttcaacccatgtgcccaacctttataatctgttatcttcaatttgaacaaaaaggcataacgcgaacgcccttttagaaatttggaatggtcttcataggagtcacgcggatgcttgtaagcacggaagcattcattacgggcatcatcatcataacgcactgtacgccctgtccagtcacctccgcacttaatgccgaaatgattgttcgacttacgggataaagcactttttccggctcccgattccaacaatccctgtgccaatgtaatgctggcaggaatgcgataacgcttcatttcctccacagctatatccttatacttatgaatgtattcttcgtattgacgattacgcgtctgcgcctgcgccgtaaaaagacagaatccgcacagcacaacaatgataatatatctcaacgtcgttttcatctttcagaactgttccaatatttgtattcgtttttcgatgggaggatgtgtcgcaaaaagcccgctcaacccactcaatgcacttgttgcctgcttgcccggatgctgaataaaaagttgagccacatcttcacgcttcacagcttctatatcgggatcggccgatattttacgcaaagcacttgccaaagccaaaggattcttggtcatctccgccgaacctgcatctgccaaatactcgcgtttgcgcgaaatggcaaagcgcatcaagatggcaaagaaataaccgacagccgcaaccaacatggtcagcagaagaatcaaagccgcccctcccttgtcatcacgtttacgtgtaaaggaagaataataagcagagcgcaatgctatctgtgccagcatcgagaaaattcccacaaacacgatggagatgataagcaaacgtacatcatgattacggatatgagacaattcatgggctataactgcctccagttcttcatcattcagcttctcaatgatacctttagacaatgttacggtataactctttttatttataccactggcataagcattcagtgaatcatcatttatgatgttgattttaggcatcggcatcccctgactcatacaaagattctccaccagattatagacacgtttattttctttccgttccaacggtcgggcacccgtagcagcgttgatgatggaagtattggcaaagtaggcaatcagaaaccaaatgaatacgcctcccaatacataaggagccatttctataaataaagccactgaccggtcggtgacacctacctgataataatggggtgcatcaccttgtgtcaaataaaccagcaaataacaaaacacgaacaaaagccctactaccaggcagggaaacaaacagagcagaagcagcgaacgaaagttattcctgctctgctgtgtgtgtatgccaacatattgcatcgtccttaaaatttaattttaggagcttcctccaaagctgcacgttgctctcccaagtcaaacatcacttctttacggaaaccgaacatacctgccaggatattggaagggaatgtctctactgcattattatattctttggtagcagaattaaaataacggcgcacggaagaaagcttattttccaaatcggctatttcctcctgcaactgaagaaagttttggtttgctttcaagtccggataggcttccaatgttattttcaatccactcaaagcagaagacaaggcattctctgctacaattttctcgtcaatggttttggcaccgatagccccgttgcgggcattgataacccgctccaacgtatctttttcgtgagccgcatatccttttacagtttccaccagctgaggtaccaggtcatggcgctgctttagctgaacatcgatgtcagcaaacgcattctcgcggttattacgcattttaaccaatgaattatacatggaaaccaaccaggctgccaagataacgactactacaatcacaataattgctgtcataattttctcgttttaaattgttgttacctgcaaacatactgattttatccggcagtatgtattctttttcaaataatttacgtttttactcaaattccaatgaaccaaagaaatcgggtctgtggaaatccggcttttctatgttgatggggttccacgacaagaaatgtggagtttgcaattcatcaccgcacttatagaagttagcctttatcgtctgtccgtccaatgaagtaatccggtgcttaaagaatactgtataaggaatgaccaaagccacttcccaagtacattcccctatccgttcttcaaaaggcgtacggcccaagctcgaccaacgagacactttttccatcacttcacgcggtgcatgttcccgattattccgctctgctcctgccccgaccaaaaatgtgccgatacagctgcactccatattgtaatacacaccatcgcctgcgggaattgaaaaaaactccatacacgaatcagtccagaccgctccgttatcttctccatatttggcacgaacactgccttcggtcactttataatgtattaaaatggaatcggccgtatgcgcgatgcgaaaagcagcttcaggatgataaggatattccttccaatttacaatatctatcttttgaaacgatacgccttcattgtccaatacttgaggcacggcttgtgcatcattgactgatgcagttattttcttgactttcatggttttcttttttagattattgaattcgttttggttttgttctcgcaaacatacaaaaaagagtcgacactcggaaagaatctttcttttttcgagaatgatgaaaggattattttctatctttgtcctgcaaaagaaaaacttaatttacattttacacaatatctaaaaaactacttaatttatgaaatcagttaaccgaatctgtttaatgatgattctttgctgtgtatgttgtataaacattgcacaagctgctgttaatcccaaaccttttgttatcccggaactgaaagaatggaaaggcaacgaaggcaaattcattcctaccgaacaaacccgcattgtttacccaaaaggaaattctgaattgcaacgcatcgcccggatgctggcagatgactgcaataccttatttaatcatactccgcagatagtggaaggaaaaggaaagaaaggcgacctcattctttcacttaaaaaagacaaatcattagggcaagaaggatacgccattcgcgttaccgaccgaatcgagctgaccgcccccaaagccatcggtgtatattggggaacacgtaccctgctgcagatagccgaacaaaacaaagaagacctggctcttcccaaaggtgaaatccgtgattatcccgactatgccatgcgtggatttatgattgattgcggacgaaaattcattcctatgtcttatttgcgcgattacgtgaaaatcatggcatactacaaaatgaacacactgcaaattcatctgaacgataatggatttaaacagtattttgaacaggactggaacaagacttatgcagctttccgcctggaatcggatacttatcccggactcacggcacgtgacggattctatacaaaaaaagaatttatcgatttgcagaagttggcagaagaatgtttcgtcgaaatcatcccggaaatagatgcgcctgcccacacattggcattcagccattataaacccgagataggaagtaaagagtatggaatggatcatctggatttgttcaatcccgaaacatataaattcatggacggactctttaaagagtatttggaaggagaagaacctgtcttccgtggtccacgcgtacacatcggcacagatgaatactcaaacaaagacaaaaaagtagtggaaaaattccgtgagtttacagaccattatatccgttatgtagaaggcttcggaaaacaagcctgtgtatggggagcattgacacatgccaaaggagaaactcccgtaaaagccgaaaatgtaattatgagcgcctggtataacggatatgcagagcctaaagaaatggttaaacaaggatacaaacttatttccattcccgacggttttctttatatcgtacctgctgccggttattattatgattatctgaacacggaagagctatataactcctggactcctgcccaagtaggtaaagctgtcttcgaagaaaaagatcctgccattctgggaggtatgtttgcagtatggaatgaccatgtaggaaacggtatctctaccaaagatattcatcaccgcacgttcccggctttacaaactttagccgtaaaaatgtggacgggaactgcaacttcacttccgtataatgaattcaaccgcatgcgcgaaacgttgagcgaagcaccgggagtaaaccaaatgggacgtatcggcaatgcgccgggactggtatacgaacaagccaatgttgctcccaaaagccgcacaccacatcgtgaaatcggttacggttatcgtgtgacatttgatgtggaaggtgcagcagaaacaccgggaaccgaactgttccgttcaccggatgccgtattctatctgtccgaccctatacgtggaatgttaggttttgcacgtgacggatatttaaacacattcagttacaatatccaaccgggccaacgtttaaatatcggtatagaaggagataacaaagcaacacgtctgtttatcaatggaaaattagtagaagaactgaatatccagcaacgtttctttgataaagaaggaaaaacaaaaatgaattatgtccgcacactggtattcccattagaacaggcaggagaattcaaaagtaaaatatccaacttgaaagtttacaagaaataaactgaaatcgaccgtcttttattatccggacacggattttacggacataaggagccgagctcttgaatccgtaaaatccgtgttgtttattcgtgaagagcaggaattatctcctgctgttactattattattcttcttcattccttgtcttttacccatctcctttctcattttatctccgattcttttttccatattatacattttctgtatttgtttcggtgataggaatttacggaattcattataatatttctcacgaatatccagcatcttgcggctctgagcaaaacgagcctttattacttgttctacttctgcatccgtaagcgtagaacgaggagcacgcggattcatatcgcggacagcacgcatttcttccatatatttggtgtatacaggtttaaacttagcagtctccgcatcatccaatgccagtgcatttatgagctgattacattgcattttctgcatctgttcctgaccgaactgctttctgtccatctttccttcttttttaccttgtgcaaatattgccatttgactacccataaagagagctaccaacaccataaaaaacttttttgtcttcataatctattactttttaaataaataattaattcataaatatgtcatactctgataattccacccattcctctaactcatcatccggcatttcggctataaaattatccattgcatccgaatatgagtagtcaataccggttgccacaagtaaagaattggaagatacttgttccgcttccggagtaccggcaggaaagaaaaccaatcccaacaccatcgctgccgccgccagtgttgccgcaatcaccaacctcatccgaagttgttttttatgtttttccactttcgtacgtgccgatacctgttcctgcatccggtcaaagaaaccatccggtgtacgataaggcatctgctttcctatgtttttaaaatcaaattctttctccattctatccttaattattagtcatatattcttttattttctctttggcataatgataattcaccttcaacgtttccgcccgtgtatcggttatccggctaatttcctcataatccaattcatcatagtaacgcaggttaaacacgatacgttgtttttcaggtaacgaaagaatggcttgttgaaatttcactgccattgcattatcgtaatccacatagtcggatgccatcaatttattcattaattcctcttgcacttcctcggcagaaacagcctgctcttttcggctgttcaagaaacggagacattcattggttgcaatccgatacatccatgtgcccagcgagctctcttccctaaaccggtcaaggtgacgaaagacacggataaatacttcttgcagtatatcctccgcatcttcgtgggaaaccaccaagcgtcggatgtgccaatatataggttgctgaaaattctccatcagcaatttgaatccatgttccttatcagaagcgcaagcttcccggattttatcttcatttatcatctgtttcttgcaatgtttatcagttagaacctttaaaagtaacgaagttaaatgtgcaacggtggattttacattaattaaatatccgaggcgcatttcttccaaacaataacaattgtagggaaatccctataatcaaatagggaaaagagcccgatcatatcgaattccctgcctatctttgcctacacataaaaacaacattatatgaaaagagtaaaagaaacactagccgttttatttttaagccttgttctcggaagttgcgggagcttaatggacaataacatattactatccattcacaaaggtatgacacaggaagaagtgaccaaactgctgggacgccccgactatcgccggttcgacgaacaaggagagcaatgggaatacaggaaaggaggaggaataggacactatggaaccactatcctgattgatttcaagaacaatctggtaagcaatttggattcttttgagagtgtccccactcctcctgcggtggcagtatgtcctcccgcacaggtggaatctacggttgctcctcgtccgccacatcacaacggacaccgtcctaattatccccaaataacgagtgacaatgatttccaacaattatacaataagataaaacagaaacctttcaaagacgaacaattggatatattgtcattagccgccggacaccgttggttcagctgccaacaatgtgtcagactcatgtctatctataccttcgacgatgataaactgaaagtactgcaaatattggcaacccgcattgcagacaaagagaattatgataagattatcaactcacttgactttctatccagtgaagacaaagccaaagaaatgcttggcattcccaaaaaacgataatcattttcttcactcgtatataaaaaagtcctgccataacctacttaaaacaaatagtagccatggcaggcattcttctgaaaaggcaaagggaatatgccctattcattaaaaattactttatgccctgataatacggattaggttcggtaggaacaggcgcatgtgtatcatcaatccacttcataagcttgttataaagttcttcctttttttgaggattaagtcctgccatattccttgtctctcccaaatcttctttcaggttatacaattccattgacttatcttcgtaattataaattaatttccaatcacccgaacgaatacttgaataaggtcgcgctctgaaatccttaccgccattgagatacgattccagatatgccggaaaatgccaaaataaatcccgttctgtctccttatttttcacaacctcaaagatatctcttccatccggatttcccgatgtttctcctttggcaagatgaacaaaagtaggatagaaatctactccgatgaccggaacagaagtgcgtgtgcctgccggtattttcccgggccatttgataatcaaaggaacacgcgaacctccctcgtatggcgtccccttcccgccgtgaagaggataattatcagtcaccggttcggaaccgccattgtcggaatagaatataataatggtattctcttctattcccatctcttgaatggcacgacatatctttcctactccatcatccaatttctcaatcatcgcagcatatacaggattagtatggtactttcctacaggtttattcttgtatttatcaacgaccgatgcaggagcctgcaaagccgtatgaaccgcgtggtgagagagatgaagaaagaacggagcatctttgtgggattttataaaagaaacagcctcatccgtcaagcggtcggtaaggtattctcccggtgttcctttctccaatcccagatggcatttacttttatcgggcagacaataaggataaaaataagaataaggcgagccggcccggtttcctcctacattccaaatgaatccttgagaaagagggcctgttccgtctgcgtcatctcccaaatgccactttccgatatgcccacaccggtatccctgttgccgtagcgcttcagccatcgtcacaaaatcggcacggacatcatccgtattggcgattggaatcaattttctcagcctacggtcaccccggtcgggaggactaacggtatatacaccgtgacggggtgtgtacatgcctgtcatcatgcaagcccggctgggtgcagaatttgctgcagcagcataggcattatcgaaaagcaatccttccgcagccaaacggtctatattcggagtttcataatagtcacttcccatcactcccaaatcagtccagcccaaatcatctgcaagaatgaacacgatattaggccggtctccttttacattttctgccgcaagaacctgctgcattcctagtgtacataagagggtgacgctaaaccacattttccggttttccatttttacttctgtttttaaagaaaagaggccatctctcactaattgcttagttgagccggcctccatctgcttgtttttatatactatttcaaattaccatcccggattctgttccaaagaaggattcaataatatttcggtagtcggcacctgatataagtagtatttttccaaccatccttttccttctttcagagggtcattgaaaagataaagataaccttcggacattgtacctgatgtaccgtcggaataacccgtttcaggattatacaatgtcatattgttacttagcgcatctgctttactcatccagattccggttgccggtctgttcaagaaccagggagccatacgccaacggcgaatatcgtagaatccaaatccttcacccatcaactcaataatacgctcacgacggatttcccacaatacagggtcaacctccacaccggcatcattattcttagggtagtacttaccacgattcgggtcaaagtttgcatcaatttcggcaactaccattttggcaacccctgcacgttcacgcaatttgttaatcgtcttgtcggctacgccctgatcaaaatttccaagttcaaatttggcttcagcctcattcaacaacacttcttcaatcttgaaaataggtttgtctgccgtattcaaattaccattattaaaattggtttcccagttatcccagttcttccaaacataataaccggaacggcaagtaacaaaagcacctgtacccagtctgggaatttcgggaaccaaggatgcactccagttctgtcccggcaaacgcttcatgccgatacccggattgctgcaactggtattcgctcccatgatatcaatatactcacggtcggcctcattgtcggtatacgaccaggtgcgataagtacctcctcctgctttcactttataaggaggcatgatggtgtgatacatacgcgggtcgcggtcacggaaagtggcatacatatctttatctccatgatactcggattctgcatttaagataggtttaccattcttcatcagatataaatctaccgttttttgattcatctctacataatgtgaagaagtatgttcgatataagaagtacccatcggatttatatcagtcacatattctttatataaaataatgccgggaacggtacttaaatcttccgtagtccacatttcaccataccctgccgccggctgtccgtctgttccggtataaagagtaggataagcgctcatcaacagctccgaagcgcggatactttcttgcaaatacttatcataatctcccagttcatgatatttcctccatgtaccttcgcgtaagccaaaacgtgaaatagccgccaatatacaatccttgtttatggtgttctttccatcctccgaagtaaaatcgcctatattctcttcagcccatttcaaacgttccaacacattgtctgccaccgttttcctgtcaatacgcggaccataagcttcaggagagtcttccttcaagacctgatccacccaaggcacagcaccaaagcggtctatcaactccatataccagaaggaatgaaagaaataacctaccgcacgccaatgatttttctgtgcttcagtcatctcggaatcatcgatatgagaaagcatgatattgattcggcgaataaatgaactaaagttccaaccattacccgatgctacgctggcaacggtttggtaagcgaaatcattatagccgctttcgtatttctgttcaaaataaccggcatccatatcacctttataaggaccgttttgtccccatccgttcaaagaagtacggatggtattattcgtaaacatttcatagcaaggccacataaaagccttgaagttatcataggaattaaatgcgttttcttctgtcaagtccgtaacaggggatttttccagaaagctatcattacaaccggaaaggctgattcctgcgatgatagccaaacttataaatagttttttcatatactcgtactaattttaggtttataatgtaacattaagcccgaaagatacggtacggaatgccggatagttccatgacaatgtttccgggtcaatacctttcggcaatgatgagaatgtagccagattttcaatgctgacaaaggctttcagttgcgataaagatgcttttgttatccatgctttcgggaaagtataggacaatgtaacattcttgatacggaaataggaagcatccgacaaatatttatctgattggcggtaattagagccctgattaccatagttaccataaatgcgcgggaactcggcattaggattagcagccgtgtaatctccattcgcagcatctaccggtttccaataattgcccaagtctttatacaaggcgatgaacttgaagtcggaatacaagggaaacttcaggttatttgcaatccatgcatcacgctttcccgtaccttgcataaatacattcaaatcaaatcctttaaaatttgcccccagcgtaataccataaagataacgcggtgtattattaccaatcactttgcggtcgcccggattactgaccgtattatcaccactggaaatcatattggttccacggtcatcgtccttcagatttttaaatttcacatcacccggacgaggattataaccatcaatactaggtacaccctctttcaacttccatgaagatgtatcggtaaaatcatccacggtatagaaaccatcgtattcatatccccaaatttctcctaaatcttttccttcataatagttccagaaggtagaaccattactcaaagcgctggttaatatgccggattcattcgaattatacttcacaatctttgattggctgtctgacaggttgaaacctacacgataaccaacctttccgatttggtcacgccaattcacactcaactcccaaccacgtgtacgcatatctgctgtattctgataaggagcgctcgcacctactacggccggcaactgcatgcccggagccagcattccgtttgtattacgctgataccagtcgaatgtaccggtgaaacggttgctgaacatagagaaatcaagacctatatcaatagtacccaccttttcccaagtaaaattactacttaccaaagaaggaagagaagtgatggctgtcacataattgccaccggacaaccatccattgtatttattattcactgtcatggtaggaatgaaggaataagccggcacattctgattaccaatcataccgtaagacgcacgtaacttcaatgagcccaaccaattttgtgtatgttccataaacttttcctgagcaatattccaaccaacggaaaccgatgggaagaagccataacgagaatctttgggaaatttggaagaaccgtcataacgtccgttcacctccaataaatatcggtccagataattatagttcacacggaagaagcctccacgtaccgaatactcattatagctatcggtagccttcaatgtagaagtacccgaacccaacgaaggaacttcaattaccgcttgcccgtatgaataagcttccattgtttcgcgataacttgactcctggttaaaaccgcccatcactttaaacttatggtcgcccagattaaaatcataagtggcatataagtttattgaattataatcggtatatctttttgtcttttgtaaataatcgtttgtcggagtagtgtctttacctccctgaactgtggtataagctacacttcccgtataccaatgataatcatatattttcttgtcaaacgtatattcaaacgccacttcaagacctttaagcggtttcagtatggacttcaagaaaatacgagggttatcattcaatgtctttgagggattggaccaacgtatctggttggcaggagtaaagaaaggcaagccttctgcctcatccgaaattccggccggcatatttccttcaggataaaaagaagccaaacgggtggaatagatagcacccaaggctgagctaggcaatgttttcttgctatgggcataactaagagtagcttcctgagtaaaccatttcgtgatattggctgagatgaatccgcttacattcattcgcctatactggtctttatccgtaatcaacacaccgttattgtcaatataacctgcagaaagacgaaaacgaagtttctccgtacctccggtcatcgatatattatggctctgctggaaactggtttcgagcatgttttttgtcaagtccttttcattcatataatatacggcaccatctgcatctttaaaaatgccatcacctaccgtaggaatagaagaaggattattgcgatattgttccagataacccatccatttgcttacactgggcgaacccattgtccagaactggtcaccggcagcatccgaatacgcttgcaaatactccatcaggggagcctgttcaggcagattcatagctgaagcaaacgcaaagttattgttataattcaattggaaagtagtctcacctttcggacgtttggttgtcaccaaaatcacaccaccggcagcacgcgcaccatagatggctcccgaagcagcatctttcaatacggtaatggtttcaatatcttcgggattaatcatatccaggtcgccttctacgttatcaatcaaaaccaaaggcttgatggtattaccatacgaaccgtcactattttttacacctaccgaataagcaccgcgaatttggaaagactttccctgaccgggggcatttccactgctggaaacaagcagaccgggaacagtaccttgcaacgcatcggctgcctgtgccaacggacggtttcccatcacttcatccatctttacagaagcaacagcaccggtcaggttggcttttttctgagagccataaccgacaacaactacctcatccaatgtttcggtatcttcctgaagaacaacctgaacagttttagcatcactgacagtcactacctgcgatttataaccgatataagtgatttgtacctttaccggcaattgtgaaacctccaaagaaaattttccgtcaaaatccgtgatacagccgttggttgtgtttaccactacgacagaagccccgataatcggttcctgagcggcatccacaacaattccggaaattgtagtctgtctggtctgttgaggcttataaacagaaatacgttccccttctacttcataacgtatattcttaccggcaaataaaatctccaagacttccttgacactcttgttcttcacatcaatggaaatcttctgattcgtatttatatcattattacgaaccaaaaaagaataccccgtttgtctttcaatttcactgaagacttgattcaaggataccgaacgatgctgcatggaaagtcttgcctcctgaataggcaatgcagcgaaagcaacatttccccataaaaggaatgaagctgcccatgccagagggacccaatgtcccctgcgagtcttgcaaaaagtttttttcatacttagaattattagttaacaaaaatatttaaggtatacccatagggatacggttttacatcctatctgtcagcaataaccacggtttttcccttccttctccaaacaaacttattatctacatccagataagaaagaatctcatccaaagtcaggtctgcatctatactaccggaaaaatattcagtattcatcttccgggattggattaaaatctgaacatcatattttttcccaatcgttttcagaatatgaaataaggtttcgttgacaaaaacaagacgtcctgttgtccaggctacttgagagcctgcgtctacagcccttacagacaaggtcttttttgccttgtcatacacagcctgctcattgggcaacaagtaaaatttatcaactccatccgaagccgtggacactttgacccgcccttccacaaggctgacttttatgtttggctcgtccggataagacgatacattgaatttggtaccaagtaccttgacattcaaatcagccgcatgaacaataaaaggcttttccgcatttttagccacttcaaagtaagcttccccattaagataaacctcgcgttcagccttattctgaaatgacgcatcatactttataatggtacctccgttgaggtaaaccgaggtgctgtccggcaatatcaatttggattgcgcaccctgaggaatttctatccggcaataggaaacaggtggaacaatcacttctgccggatggttattcaaataaataaaacgaatgccaaggccaatcaataatgctaccattgccgcaaagctcccaactctcacccttctaaccaaggtgcgtccgggcgaggaacggaggtctaacttctctcgcagaaaatcaaggttctgcttctttctccgttcaaaccaaggcacagaagcaatggcataagcacgtgacatctcacgatacttctcccggcaggaagcatccttatgtaataattcggtcattctctgcctatcttcaggtgttatatcacctttcagataatccagcatcaacctgtcaaactcatgtattgaattactcattctgtcggtcttgtattattaaactaataataatacacgcacaaccttaaaagtatttaataaaaaagggactttttttattattcatttaaaaaagaaaaaataagagaattccgattcgtgaacccagcttctccttcatcttgtccatcgcatttttaatatgcacacgcacggtgttgacagagattccattcttctcggcaatttcctgcggagtaagttcagaataaagatattgttcaaaaacagttctgcacttatcgggcagggaagtaattacggtctgtacctgacgctccaaatcagcctgttccatttcttttaaaggattgcattcactcatgcaatattcttcctgatattcaagcaatgtttcgcgatattcatctgccacacgctcccggctatgaagtgaacgcaaataattcaaacatccgttttgcacactgcgcaccagataaggatgaataggaaaaaataaatcaccacgtttataccacaatttcataaagacttcattcactatgtcctgagcttcctcggcattgaagatataagaattggcacaagcacataaataaacgaaatagtcattataaaggcactcgaatgcctttacatcaccctgatttattctgtcaattactgcttgatctatcatttttcgttcttcattttctatcacgaagtacaaatatacagcttttttaatgacttttaattatatacgataattattttccgagaagaagaagcgaatgaacggcaattgcaagaaatttgaaattaaccggaagaaagaagttggaaatcaaaagcaaaagattacatttgcatacaaaccaaggcttaaacaccatgaaagaaatcaaactggaaatcaatattgaggcacgcaagtataacgaactcacggaagaagaccgtaaattggtggatgctgcgtgcaaggcaacacaaagaagttatgcaccttattcgcatttctcggtaggagctgctgccctgctggagaacggtgttgtggtaacagggagcaatcaggaaaatgcagcttatccctccggactatgcgccgaacgcactaccctattttatgccaattcccaatatcccgaccaagcggtaaaaacacttgccattgctgcacgaaccgaacaagacttccttgacactcccatcccaccctgtggtgcctgccgacaagtgttgctggaaactgaaaagcggtttggaaaaccaatgcgtatcttactttacagcaaatcggatatttatatcatggaaggtgtaagtgctttgttgcctttgtctttcgatggagattatttaacaacgaattaatcccctcattttccataaaagtaacatacgtacgtacaggcatatgcgtacgtatgtatagcttcatacgtacgtatgcgtagggctacgcatacgtacgtgtagttctatgaggacgtacgtgtaaaagcatgctttctgtcaggctgagtctgttttggatatacagacaaaggaacgtactaagcttaatctgtaacctttttattataatactccaaaaacgccacttcctttgccatcaaaaaattagtgagagaaagctgattcgccttgcgcttttgttctttttctactgcataaccttttttttcaaagaaagggcgggcagtcaagctcacttcggatgtaatccgcgtaatcccggctgtaattgcgtagcgttctatttcttccaaaagcatcgtagcaataccttcaccttgaaaatccttgtggacaaacatagaatgtaaatagccttgaggcgtaatagatgaaaaaccaacgatttgtgactgttgattaacggctacaacaaaatagtgggtctctatcctctctttaatgttagaaaggttatttccgcaggatgcccaatcctcaacttctgcctgtgagtaatcacgtctgtttatcacaagaacagtattttgaaataactcttttagcgcaaccacatccgattgttgagcttgcctgattgtaaagtccgttttcatatctatttataatgtttttttctatccttcttatcttacaccggttatttcatctcactcttcctctttttccacagttgataactattaaaaatattctgccacatattatatacacaatagcataaaagattgatttacaaaagagaaacccacctattactaatagtgggtaacaaaa

SEQ ID NO: 6766 - DNA, 8033 bp, Unknown
  gut microbiota DNA sequence
tgagaaaggatattattttttttcaaggtggtttgggaaatcagatgtttcagtatgctttttttttagtacgaaaaaaaatgaatttaaatgtagactatgatataagcttacttaaacaccaaaatcaacataatggttatgagctagaacggatctttgataaagaatctaggagtaattgtttgaattttttttgtttacgtgtattatattatgctaagtgtcattctaacttagcttgcttcaaattattaataagagtggctaattggttaggtatggaattatttatagattctattccctctatttataccaatatattttctactcataaaaaaaacttttttctaggatattggcaaacagaaaaatatttctgtcatatagagaaagaaatacaagctacttttgaatttaaaagagagctattatcacctgaaactgctagatttttgcgtagaataatagaaactaatagtgtatctatacatataaggagaggagattatttatcagaaattaatcagggactatatggggggatttgtacggagatgtattatgcaaaagccattacttatatctgtaataaaatagatcagccaagtttttttgttttttctaatgaaatagattgggttaagaataatgttgatatacctaatccaacctatattgattttaataatggagcagactcttggcaagatatgtttttaatgagtcagtgcaaacataatattatagctaatagtagttttagttggtggggagcatggcttaatagaaacactaataaaatagtgattactccttctcgttttattaacttagaggaggattcagacataattcctgatacatggatacgtatatgaatgatataaaagtcagtgtaatattgccagtctttaatgcagaaaagaccttaaaaacagcaatagatagcatattagagcaaacgtataagaactttgaattaataatcatcaatgatgggtctaacgatttatctgaggcaattataaaagagtataaggaccatagacttaagtattttattaatgaagttaataaagggcttatatatactttaaataaagcggtttccttatgtaaaggtgaatatattgcaagaatggactctgatgatatttcagcgaaaaatcgtttggaaactcaagttagatatttaactttacatccagacattttggctgttggtactgctagaagtatatttggtgaaaatgtgaaacgaaagatacagtgtttcccagaaaactttgatgatattaaagcgtatatgtttttagcttgtccgattgttcatccttctgtcatgatgagaagagatgtttttttcaagtataatattcgatatgacgaacattatcgtaatatggaagattataaattatggtatgatataatgcaaataggcaaaatagctaatatttctgagccccttttgttttatagaatatcaaaagaacaagtatctacaaaatataaggtaaatcagatgattggaaataagttatttagaagggaaataatgtcaacgtatctattatctaaaggaataaatatagatgagagaataattaattgggagcttatacatgaaatctctcatttaaaattgcagacaatagatgatgctaaaatgatagcatcaattctttttgtgtgctgtttgtcagttcatgataacaaaggattagggttgattaaatttttatattcattagtatggactaaaagattttttcattgtaaatatattggaggtattattattcattatttgcatttaaaacggcttgattatttatctatttaaatgaaaaagtataaactatattggacattattaactattaatgctggattaccattagataagctagtggtatttatattatctatattatattattttcaaaatagtaaaagttttagagcaaaagcacttgttgttttttgtatactttttatgttggctttcacttcttttatagtaaattccgatcgtaatatcttaatattttatccatttctatttttctttttagcagttttagcaggaaatgcggaggcaaatgtaaagttgatccagaattctttgcttgtaagcatattttggggaatattctcggcaatattagcattgattggtatccatacgattggaagtctttctttaatagagaaaggtatgccttttttatttgctcctgttggttttagtcctacagtacaagtttatggtactctttgtgtttgttggttgattattgctatggaaacaaagcaaaagagaggatgggtattttatttggtactaattgcatctatactaacatttaatagggctacatggatttttttatttcttttgcttacaatataccataaaaagtatgccataggattattttttattggtgcagtaatagtgtcctgcattgaattagttcagaatgttttgttttctatttctacattgtcttcgcgtggagaattgcgggcgggggctgagctttcatattggaagtcgaatgatttctttgtttatttgtttgggaaaggtactcatctgacttcagaaaagattgctaggcatacgatttggggaaggcaatatatagaaaatggttgggattttatttttcatacatatgggattattggttttattgtttatacttgtataattatatcacttttatatgttatttggaggcgaggtgcaggaaaattttctatacttatcatttactattattttgtagaacagattttgactaatgaattcttagcatcatcattttgcttttttactactataatattgattctatctaagaagaataatttatcactttcttcaaaacatattttaatttaaatttataatgaaatcagttctttttatacacccatcgtcggagttatatggttcagataagatactaatttgtattttgagaaattttcaaaattattcaaaaatattagtattgcctaaatccggtcctttagtggaagttattcagagagaatgtccagatattatgatatatatatgtccctttttgccacttatagctaaaaagaatcttaaggtaagtggaatagttgcttttattggatctttatggaaatttagaaaatttcttgttgagaagaaaatatcgaaagtggatatattgtatttgaatacattagctgtgatcccattacttttttattttaattataagaacactaaaaaaattcttcatgtacatgagattttgccaaataccttttttttacataagataataaataaaatagcactgaaatattctcatgctttaatctgtgtatctaaagcggtattacaaaatatggaagaggcttctcctcaatatagaagtaagttacatttagtacataatgggatatcatttgctaagtgtatagaagtgcataatgatttcttaaaagtggatactcatttgattaattttggtttaatagggcgaattaagcctatccaaaaaggacaaaacttactcttacaggcattgtgtttattaccaaaagatatattagaacgagcacacttttatttggtaggtagcccggtaaaaggacaggaatatatgcaagatgagttgcttgaaaatatagaaaagatggggttaaaaaaatatgttactataattccctttattaaggaaatagaatctgtctatgctaatattgatgtttcattagtaccttcgactttggctgattcatttccaacaacgattttggaaagtatgtattttaaaaaaatggttattggcactcgtattggaggtattcctgaaatgattattgatggagtaactggttttattgttgataaaaactctcccttggaattgagtgaaaaaatatcatattgtgttattcatcctgacgaagtaatttctaaaggtattcaaggtaagatttattttgataaatatttttcgattgattgctttaatgaacgttatatggcatgcataaacaaattgttataaactagttgttatatatgagaaaagttgcaattattggtacggttggagtacccgctaactatggtggatttgaaactttagttgaaaatattattggcgaatattgtccaaatgaaattcaatatactgtgtattgtagtagcaaggcatataatcataagctgagttcatataaaaatgcaaagttacaatatttaaatttaagtgctaatggtgtacaaagtatagtgtatgacatagttagtttattaaaggctacttctcataatgatattatattagttttaggagtttctggttgttgtttcttgcctatatatcgtatctttagtaaaaagaagttagtgataaatattgatggtcttgaacatagaagggaaaaatggagtaaatgggctcggcgcttccttaagttctcggaaaaaatggctataaaatatggagatattatagtgacagataataaaggtattcaggattatgtaaaaagcgaatataatcaagtgtctgagctaatagaatatggcggtgaccatgtaaaatctttgcccgaaaaatctgaatcaaatcgaatattgaatgaatataatttgatagaaaaggagtattctttttctgtatgccgaatagaacctgaaaataatgtacatatagtcttagaagcttttaagcaatcgggtaaaaaaatagtgtttgtaggaaattggtcaaaaagcgattatggtgtagctttattaaaaaaatatgaaaatgaatctaacataattcttctttctcctatttatgatttgaaaatattgggggtgttacgatctaattgtttgttctatatccatggtcatagtgcaggtggaacaaatccttctttagttgaggctatgttttttgcaagacctattttggcttttgatgtagtttataatagagaaactacagagaactgtgcggattatttttcttctatagatactctagttacattgttgaataaaacacctgtgacatatgaaagaaatggaaaaaagatgttagagattgcgaagcaacgatatatttggaaatcgatagttgatagatatgtaaaattattttagttttgctttgatataatttcaatgtatgatgaaaaagttttcttactagaacaaatctcttctctccattgttaagactaccaatttaatttataaatagtggtccaacaatgagtaaatattttaagttgagcatatttttatgctttttcttgccgacaatatcatttgcacaggtaaaggataccaataataacacctttgcttccttcatttgcaagttcattaatgagagaggtttgataaagtgtcgcacggtaagtgagggtaattttcttactcttgtgaatagagcagataagccggtgaatgtgatgtgcacttggtatccttttacagaaagtggtgcttataaattctcacggaaagaactgattgaccggagaaggaagaaagttgattttgtattaatagggtacggacagaaaccgaataatccgatgctctattatctggtacccgtttctaaggtaaaacggaagatgagtgagaatgctttgagaaagtatcaggtcggaataccggtatgtgacttgagctttgctgactaagaataaagccccaaatagtacggaaaaaaagtttagaaaaactcctttcacacaaaatgcgctgtaaaatattgatttatagcgcatttgtgtgaaaggagttatctcatttctatcacccgatagagattgccggtgcgcgtatgtatcctttctactccaagtgacatcaatactttactgaaactagccggagatgcctgctttaatgcatggggatagcgcttcttgatacataggaatatttctgctgccgacagttccatatacgtttcatcaggttgtgccgcccggaaacaacaattaaatatgctctcttctgttgattgtctgtaaaattcccggttatggaaattgatttccgcttcttcgtcactgtcaaaccaataacgcttcccacgcaacagttctgtttttaactgggcatagatttgtgaatgtatgatattttctgtattgattttctcttccacttcgatacagataaaacggcggcttcccgaaggatcggtcagaatatccttgcggttggatgtaccggcaaacgaagcgattcgaggcagtttggagaagctcttttgatatgatttgatgaaactcaggcttgccatctgcatcagattctttaataaaggcatcttcttggtggtttccttgtcaaattcatccatacatatcagcccatattccgataatttacgagtggcctgtcccttggaattcaggttgaagtcatcggtataatagttttgcaattcgggcggtaccagcatttttatatacgtggatttttgttttccttgtttccgactgaccagaatgggggctacgctattggcatgggtgttgtccagccccatccattgggctaccattgccaacatccatcggtggaaactccgtatccagtaatcatcggtagaaacacgctgtgccaagtcggtcatccggtctgtgccgtcccacaacggaagttcctgcatatagagcaggaaagggtgataactgccggtttgtgtggagtaaataaaacggttgacgtccttatcccaacaatttattcctgctttgcggactgcaatgcagatggagttcaagtctcgttggctcagcggagcgaaaggcaaagtaccgtgcgtgcggtattcggttatttcgttcattcggttaaagcggaaatcatagtggcgtttcaggtaagattccatctgcaaaatggcatccagtatagggtcagtggacggagccatttttcgggcacacatttcttttaaagattcattctcttttctcagctttttcaagttccttttgctcatttttctttgtttttgggtttctatgcggctaagttacaaccttgggagaggggtttgcaaatatttcgcagctttagcagatatttttccgtttatcggaaataaatgcctgacgtggtgtctgtctgtcttttttttgttacctttatgctgtaaatgatatcgttccacttggctggcacgaccattctacctgggtgaatcgagcatgtcagccgggtgggatggtcatttcatccggctgaaacgatgaggaaaaaacgtatgaaatagtcagtaaaaggagaagattatgaaggtggaatatgatttgtataagagccctccccgtgaagtggatgggaaggaggtggtgcatctgcacgcccgtgtagccaggtcaaaaacgattagtatttggagtttgggggatgacatacagaaggcgaccagtttgacaaagagtgatttgagggcagtgttgtgcgaaatgagtgaccgttttgtggaggaattgcaaaaaggtaattgtgtgcatatcgacggtataggttatttccagatgacattatcgtgtccgggcgatgtggagaaggaaggagaggtgcgggcggaatccatccgttttaagtcggtggtgtataagccggagaaggctatatgcggtaaattggaggggctgaagtttatccgttccgaaagagggggacatacgaagaattattcggatatcgaactgatggggatactgagtgactattttaaatacaacagttacatcactcgtcttgaattggagcgtgtatgcggcatgacgcgtagtacggcttatcgtcgtataaagtcttggatggcgaggaatatgttagagaaggttgtcggtattgatgcttatcgtccggtgccgggagtatttagagtttcacgttaatccgcttattataagcagattaacgtgctgttaggtgtgaaagcacctttatgaagggacatttattaaatattacaaaatcagcc

SEQ ID NO: 6767 - DNA, 271 bp, Unknown
  gut microbiota DNA sequence
aataaagaaagtaagcaagggcgcatggcggatgccttggctctcggaggcgatgaaggacgtgataagctgcgataagcttcggggaggtgcaaataacctttgatccgaagatttccgaatgggacaacccaatatcttgaagagatattatccaacttagttggaggctaacgcagggaactgaaacatcttagtacctgcaggaaaagaaaataataatgattcccccagtagtggcgagcgaacggggaagagcccaaaccggtta

SEQ ID NO: 6768 - DNA, 599 bp, Unknown
  gut microbiota DNA sequence
gaccatccggtaaggctaaatactcccgagagaccgatagtgaaccagtactgtgaaggaaaggtgaaaagcacttcgaacagaagagtgaaatagttcctgaaaccatgtgcctacaagcggtcggagcaccttctggtgtgacggcgtgccttttgcataatgaacctacgagttactttttccggcgaggttaaggatttcagatctgcagccgaagcgaaagcgagtctgaacagggcgtatagtcggaaggagtagacgcgaaaccaagtgatctacccttgggcaggttgaaggatgggtaacaccatctggaggaccgaaccaataagcgttgaaaagcttctggatgacctgagggtgggggtgaaaggctaatcaaacttggagatagctcgtactccccgaaatgcatttaggtgcagccttgacttatactggcatgaggtagagcgactgataagatgcgagggcttcaccgcctatcaagtcttgacaaactccgaatgcgtgtcagttctatgtcaggagtgagggcatgggtgctaaggtccatgtcctaaaggagaacaatccggaccaacagctaaggtccc

SEQ ID NO: 6769 - DNA, 221 bp, Unknown
  gut microbiota DNA sequence
ctcctcgactagtgagctgttacgcactctttaaatgaatggctgcttccaagccaacatcctagctgtcttagcaatctgacttcgttagttcaacttagtattcattttgggaccttagctgttggtccggattgttctcctttaggacatggaccttagcacccatgccctcactcctgacatagaactgacacgcattcggagtttgtcaagacttg

SEQ ID NO: 6770 - DNA, 990 bp, Unknown
  gut microbiota DNA sequence
aagggtggtatgatcgttgacgtattcggtatcgaagcattcttgccgggttctcagatcgatgttaaacctatccgtgactacgatgtattcgtaggaaagactatggaattcaaagttgttaaaatcaaccaggaattcaaaaacgttgttgtttctcacaaagctcttatcgaagcagaactggaacagcagaagaaagaaatcatcggtaaacttgaaaaaggtcaggtacttgaaggtactgttaaaaatatcacatcttacggtgtattcatcgacttgggcggcgtagacggtttgatccacatcacagacttgtcatggggccgtgtaagcgatcctcgcgaagttgtttctttggatcagaagttgaatgtagttatccttgacttcgatgatgaaaagaaacgtatcgctttaggtttgaagcaattgactccgcatccatgggatagccttgatccaaacttgaaagttggtgatcacgttaaaggtaaagttgtcgttatggctgattacggagcattcatcgaaatcgctccgggcgtagaaggtttgatccacgtttctgaaatgtcttggtcacagcacttgcgttcagctcaggacttcatgaaagttggtgatgaaatcgaagctgtaatcttgactttggatcgtgaagaacgtaagatgtctttgggtatcaaacagctgaaagctgatccatgggaaactatcgaagaaaagtatcctgtaggttctaagcacactgctaaagtacgtaacttcactaacttcggtgtatttgtagaaatcgaagaaggtgtagacggtttgattcacatctcagacttgtcttggactaagaaaatcaaacacccatcagaatttactcagattggtgcagatatcgaagttcaggtattggaaatcgacaaagaaaaccgtcgtttgagccttggtcacaaacagttggaagaaaatccatgggatgtattcgaaact

SEQ ID NO: 6771 - DNA, 21166 bp, Unknown
  gut microbiota DNA sequence
gtagccagataacaatgagtgatatttgtcatggtgctggcatttgctgaaatggtcataagttttgtccaatttccattgccataccctgtttcttcgtacaattcgcgttgggcagaaagcaaaggttcttctccggtttcacaaactccggcgcaaatttcataacgtgtttcttttattccgtgacggtattggcgtactaatacaaatttaccctctttggtgatagcaattacatttacccaatcaggatattccaaaatataatattcaggaatttcaactcctgtaggtagtttaacccggtcacggcgtgcggtcagccaagggcggcggataagatattcactttcaacaatctcccattttctatcgtctttttccataaagattctttttatttggatgagaagcaaagatactatctttggaaattagaacaactataaaatagtagtttttattcacctacttccaacttataaatcttacctttgctttcaataataatcctgtcatcataacacataaattatggaaaaccatattagcaaaaactcctctatgtggaatccttggcacggctgccacaagttaagcgaaggttgtcgtcattgttacgtttaccgtggcgacagccaacgaggtcgagatagttccatcattactaaaaccggaaaatttgacttccccatacagcgcaaacgaaacaacacctataaaattcctcccggcaatctggtctatacttgcttcacttctgattttctgattgaagaagccgatgaatggcgtgaagaagcatggcaaatgatgcgggaacgtcaagacctccactttcttttcatcaccaaacgcatagacagattaaaagagtgtttgccatctgactggggagaaggatacgaaaatgtaactgtttgttgtactatggaaaatcaagacagagtagattatcgccttcccatctacaaggcggctcccatcaaacataaaatcattatttgcgagcctttgctaacagaaatagatttcagaggagagcttggtccttgggtagaacaaattgttgtaggtggcgagtcaggtaaagaagctcgtatatgcaattatgaatgggtacttgatatccgtcgtcaatcagtggaaaacaaaatcaatttttggttcaaacaaaccggatatcgcttgctaaaagaaggtcatgaatatttcattgcccgccggttccaacattcgcaagctagaaaagccgggataaactatacgaaagattaatcagatgatatatctaatcgcttattctaaaaagaacaggcttcgctacccttccattttgacaatattcttttcattttgaaaaggaatcaaagacagaaatgaaagaaataattgatttataggagtctcctcttttggtacacaatttgttctcctcttagatagaagtatgtggtaaagataaaatggaaagagaagaaaacgtaaaacactttttggatttaatcaggcgttcgagacgtggaaaattcaaaatctatattggtatgatagccggtgtaggcaagagttaccgaatgttgcaagaagcacatgaaatgcaagaaaacggtcttgacgtccaaatcggttatatagagacacatggaagaaccggaacagaagctctattggaagggttgacaattattcctcgcaaaaagatattttataaaggaaaagagattgaagagatggatttagactctatccttcggttacatcccgaattggtcattatagacgaactggcacatactaatatagaaggcagtcgtaatgaaaagcgttggcaagatgtcatggaactattggatgcaggaatcaatatcatttctgctgttaatatccaacatatcgagagtctgaatgaagaggtgaaaggaattgccggcatcgaagttaaagaacgcattcctgacaaagtattacaagacgccgatgaagttgtgaatattgaccttactgccgaagagttaattaaccgcctgaaagccggaaaaatataccgtcctgaaaagattgaattagctttgaataactttttcaaaacagagaatatccttcaattgcgcgaattagcccttaaggaggtcgctttcagagttgaaaagaaagtagaaaacgaaatcgtttctattgataaaggggtacgtcatgagaaatttcttgcttgtatcagtagcaatgagaagacaccacgacatatcatccgtaaagcagcacgactggcttcccgctacaatactgtattctcagccctttatgtgcaaacaccggtagaaagcacagaacgtatcaatcttgccagtcagcgacatttgctaaatcattttaaattggttacagaattaggaggtgaagtgctacaagtagcatctgcaaatgtcttagatgaaattataaaaacttgtcaagagaagcagattacaacgatatgcatgggacagccggcattcaaaatgccttctaccctattcagtatctcgaaatacaaaaaatttctagcgtctttggcacaaatgaatatagatttgattatacttgcataaaaataaagtctatgaatataaaaacaaaacttacccttaccatcggcatattggtagctatgattgtattattagttgctctatcagtagtgaatttacaaatattaacagcaacagatcctgatagtcctgctgccggtccgggattacaaagagcattattgtggatttccattgtaggagcagcatgtatttgcgtaggtatcggtatatggttgcgccttcctgcatctatcaataagcccattaaagaaataacaaacggcatccaggaaatagccaatcataattacgaaaaacggcttgatttaaatggcaatcaggaatttgctgaagtatcaaagaacttcaaccggatggccaaacggctggaagagtatcatgccagcactctttccgaaatgatggccgctaaaaaatacatggaaactatcataaatagcattaatgaacccatcattggtttaaataatgaaatggaaattctttttatcaatgatgaagccttgaatgttctcaatttgaaaagagaagaagtgataaaacgatctgctcaggaaatttcgatgcgtaacgacttactccgcagattggttcgcgagttaatagacattccctcacaaaaaataagaagtgacaaaacccaaaaagaaccattgaaaatatatgctgatgataaagaaagtttctttcaagtaaaatatataagtatcattcaatccggcaggaatagtgcaacaccagaaaaaaaaggtcatgtcattatgctaaagaatatcacggaatttaaagaacttgattctgcaaaaacgacttttatttcaaccatttcgcatgaactcaaaacacctatatcggccatcatgatgagtctacagctgttggaagataaacgtgtaggaacactgaataatgaacaggaagatttgacaaatagtataaaagaaaacagtgaacgtctgctgaatatcaccggggaactacttaatatgactcaggtagaatccggaaaattacaacttaaacctaaaataactaaacctattgaattaatagaatatgccatcaaagccaatcgcgtgcaagcagaaaaattcaatattcagatagaagtagaatacccggaagataaaataggaaaattatttattgacagtgaaaagattgcatgggtgctgaccaacttgctttccaatgctatccgctactcgccggaaaatgggcatgtagtaatcggtgcccatcaaaccgatgacaattatattgaaatgtatgtacaggattttgggaaaggaatagacccacgttatcataaaagcatctttgaccattattttcgtgtccccggaacaaaagtacaaggaagcggtttaggactttctatttctcgtgattttgtagaagcacataatggaacattgaccgtgcagagtgagctaggtaggggtagcaaatttatcatgcgcctaaaagcttaatatagatatcttctaatctgctatggagaattctactctaaacaagaaaaccctccatagcagattatttaccaatcaccttttatcatgtttatgattactattgatgactactcaatcctgtgtactgttatgtcatgaaaatcttgtaataaagtcagcaacatgccttcgtcattgtattttttagactttattaccatcgtgacataataggtagtcatttcccccactgttttttcttccaactgataagatacgatattataatcttttgaattaaattttttcgccattttattcaatgtttctttattgtcagtcgaaaactcaaccatagagctcttcataccgatactcttaaaaagataactcaatgcctccaaacctattaaagtaagaatagtagccgaaatccccagccaatacattccggctcctactgcgagtccgatacctgaggtagcccatataccggcagccgttgttaatccacgcactatttgcttctgaaaaatgatagtgccggcacctataaaaccgataccgctcactacctgcgctgcaacacgacttggatctaaatctatcccctctatctttataatttccataaagccatattgcgaaacaatcattataagtgcactgcccagtgacacaagaaaatgagtgcgataacctgcttctttggcacgatattcccgatccaagcctattactgcaccaagtgccccggctacaaacaaccttaaaataaagtcccatgtcatactcatatttttatcctccgctttttatatattaatcatcttcatcttccattagatcgggcaaattcagcattttctgactttcctctgtcggaagagcttccacttgccttagcttacgttcaatggcccgagtgcgtttacccattacctcttccagttggtcgccggcattctgcaagtttttctgaactttctccaatagcccgccaaactttccaaactctgtttttacggctccaagcacgttccaaacttcacttgtacgtttctgaatagccaatgtacggaatcccatttgcaagctgttaagaatagcccctaatgtagtcggccctgttactacaatcttaaactccttttgcaatgtctctaccagcgaagtccgacgaattacctctgcataaatgttttcaaatggcaaaaacatgatagcaaaatcggtagtaaatggcggatctacatatttgtcatgaatatctttcgccattttttttatcgtcatttccaattgtcgtgaagaagtatctattaatgcagcatcaccaacttcataagcatcttgatactgttcatagatatcctttggaaatttagcatcaatcggtaaatatacaatttcattattatcttctctcccaggcaatttaacggcaaattctacaaactctgtagcgctctttttagtttttacattagcttcatattgttcaggactcagcatttggtcaagtaaagcccctagctgcacttccccaaaagtaccacgtgtttttacattactcaaaactttctttaatccacccacatcttgcgccagacttttcatctctcccaatcctttttgtacattttctaattgagtacgaacaatttcaaatgactgtccgattcgttcattcaatgtcttttgcagtttttcctccaccatcatacgcatatcatccaatcgtttttcggtactctttatgagtgcatcctgctgtttacccattgcttcaaacttctcccgttgcatttcattacctgtaagcatgtttttatgtaagctatcttgcatttgccgaacagagaagttcaaagtttggttcaactcagaacgaagttcacggatattacgccccaattcttctctgtttgctttcatttcttcatgaagcaataattccaaacgttccgtttgcaaacggttatttttagtcagtacaactactaaattggcaatcagcaatataaggataattattattaaaaccagttccataattcttgttatttatagcaaatgtagcaaataataaacgatattcattatatttgcctcaaaattcaccttagcacttatgaagtataaattactggcattagatttagacggaacactgactaataccaaaaaagaaattactccttacacacgacggactattattaaagctcaacaaaaaggagtgaaaataatattagcaacaggacgtcccacttatggggtggctcctattgccgaacatctttgtttaagagaatacggtggatacatactttcttataacggaggaagaatcatcaactggcaaacaggaaaagtaatgtatgaaaacctgcttgaacgctccgttattccatttttatataactatgccaagaaatatggttttactataattacatatcataatgagtttgtcattactgaaaacccatatgatgaatacgtacaaaagttggcattgctaaatgttatgacaatcaaaagagtagataatttcctgtcagccattgactttcctgttgggaagtgcatgattgtaggcgaaccgattaaacttgcgaccttagaaaatgaaatgcataatgacttaaaagagcttttgggagtttatcgttctgaagcctattttttggaattggttcccaagggaattgataaagcacaagctctatctgttttattgaaagaattaggcaataaaaaagaagaactaatagcaataggagacggatttaatgatatctcaatgataaaatatgcaggtttaggagtggcaatggcgaatgctcaagatatagtgaggcagaatgccaacttcatcaccgcctccaatgaagaagacggtgtggcagctgttgtggaaaaatttattcttcacaactgttaaggagtgcaaaacttattattgctattttttaacattagagtcttaaagtttgccggatacggagtttcaaactgcatcagttcccctgttatgggatgataaaaacaaagtttgaaagcatgtagtgccaatcggcctagcggattacattcgctaccataccgttcatcgccaatcaccggatgtccaagttctgacatatgaacgcgaatttgatttttacgtcctgtttccaaatccaactccaccagagaataaccattcgcgcgttttattgttctataatgtgtaacagcatattttccctctccatcatcataaggactggagctgacatataatttacgatcggtcaaccacgactcaacagttcctccatctttctccatttctcccgaaacaatagctacataacggcgatcggttacaatatcctgccaattatcacgcaacgtattttgggtcttttcatccttggcatacatcatcagtcccgatgtttcacggtctaaccgatgaacaacaaatatacggttgttacgatgcgaacgttttacatattcgttcaggatatgttgtgctgtacgctccttttgatgctcagtgctgaccgaaagcagtccttcttttttctctaccacgataatataagcatcctcatataccagtttcaacatcggattcttgaattcacgattgtttttggttttgctcacctgaactttcatgccgggtttcagttcaaaattatattgtgtagtaattatattgtctaccaatataacccggttagtcagcattgtttttactttgctacgactgattcctgccattttctgcatcagaaaatccatcaattcagcaggttcattaacattatatacagtatactttgcaacagcccgtgcaacgggcttgcctgatttattatttttacctcttgacataattatcttctttcaagtaaaaccacattctctacatgatgtgtatgagggaacatatctaccggttgaacggcaaccactttatatttagtatccagcaaagacaagtcgcgtgcctgcgttgccggattacaactgacataaacaatacgttcgggttcggcaaacagaatcgtatttattacatcattgtgcatacctgcacgcggcggatcggtaatgataacatccggacgaccgtgttcattaataaactcctgagtaagaatatctttcatatctcccgcatagaacaatgtattggtaatatggtttatctccgaatttactttagcatcttcaatcgcttccggcacatactctatgccaatcactttctttgcctgacgagacacgaaatttgcaattgttccggttccggtataaaggtcatagacaagctcatttccggtcagacctgcaaaattgcgtgctaccttatataaggtatatgcttgctcagagttagtctgataaaaagatttcggaccaatcttaaagcgcaagccttccatttcttcaaatatatggtcattgcccttaaatagcactacatccaaatcgttaatagtatcattgcatttattattgaccacatataataaggaagtaatctgtggaaatttgtcagctataaaagccaataactgcttcatttgcaccatttcgctctcttctgtaattttgcattgaagcaataccatcaactctccggtacttgatgtgcgaatcatcagattgcggagcataccctcctgcgtacgaagattaaagaaagaataattgtgttcatatgcgtagtcacggacagcgttacggatttgattgctgatatcgtcctgcagccaacatttctcaatggcaagcactttgtcgaatgcacccggaatatggaatcctacagcattcatctgatcatacttcacatccgccttcacctcttcttcggtcagccagcgcttatcagaaaatgtaaattccaatttattacgatagaactctgtctttgcagaccccagaataggagaaatttccggtaattcaactttcccgatgcgaaccagattatccgttacctgtttttgtttatactttatttgttcatcatagggcaagcattgccatttacaaccaccgcacacgccataatgctgacaaaacgggacagctcttttaggagaatattcatggaaattcactgccactgcttctgcataatggtttttcttacgttttatttgcaagtccaccacatcaccgggaacaacatacggcacaaacactactaaatcattcactttcgccaaagctttaccttcggcagctacatctgttatggttaccttctctaatagagggagctctttcttctttctagccactttctaaataagttaatttggggcaaaaataagcattttctccgaatttctccctataaaacgaaatatattaaaattgcaaagtagaaattgcaatttctgctgttttttttcattaattcgtttggaaataaataaaatatgtatagttttgcgattacaatttttgaacgagttaactttaaatacattatttatggagaaaaaaagagtttataccttcggaaacggaaaagcagaaggtaaagcagacatgagagaactgcttggtggaaaaggtgctaacctggctgaaatgaatctgatcggtgtacccgttcctccgggtttcacaatcactaccgaagtatgtacagaatattatgatttaggaaaagataaagtcgtagaactactcagagaagatgttgaaaaagctatcgccaacattgagaacctgatgaattctaaatttggtgatgtagagaatcccttattggtttctgtgcgttccggtgctcgcgcttctatgccgggtatgatggacactattctgaatctgggtttaaacgatgaagtagtagaagggttaacccgtaagaccggtcgtccccgttttgcatgggactcttatcgtcgttttgtccaaatgtatggtgatgtggttttaggtatgaagcccgtaaataaagatgacattgacccatttgaagctattatcgaagaagtaaaagaagccaaaggtgtaaaactggataacgaattggaagtagaagacctgaaagagttggtaaaacgttttaaagcagctgttaaggaacaaaccggccaagactttccgactagtgcttacgaacaactttggggtgctgtctgtgctgtattccgcagctggatgaatgaacgagctattctttaccgcaaaatggaaggtattcctgcagaatggggtactgcagtaaccgttcaggcaatggtgttcggtaatatgggagacacttctgcaacaggtgtatgtttctctcgcgatgccggtaacggtgaagatctgttcaatggtgaatatttaattaacgcccaaggtgaagacgtggttgccggtatccgtactccgcagcagattaccaaaatcggttctcagcgttgggccgagcgtgccggtatctctgaagaagaacgtgtagccaaatatccttccatggaagaggctatgccggaaatctataaagagttggatgcgcttcagactaaattggaagaccactaccgtgatatgcaagacatggaatttactgtacaagaaggaaaattgtggttcttgcagactcgtaacggtaaacgtaccggtgctgctatggtaaaaattgccatggatttgttgcgtcagggaatgattgatgaaaagacagcgttgaaacgttgtgagcctaataaattggatgaactacttcatcccgtattcgataaacaggcgttaaaagaagccaaagtattgactcgaggcttgcccgcttctccgggtgcagctaccggtcaggttgtattctttgccgaagatgctgctaaatgggcagcagatggtaagaaagtggtcatggtacgaatcgaaacctctcctgaagacttggcaggtatggctgtagcacaaggtattttgactgcacgtggcggtatgacatctcacgcagccgttgtagcccgtggtatgggaaaatgctgtgtatccggtgcaggagctatcaatgtagactacaagaaccgtactgtagaaatagaaggtatcgtactgaaggagggtgatttcatctctttgaacggtactaccggtgaagtatataaaggtaaagtagaaaccaaagcagcagaagtgtccggtgactttgccgcactgatggatctttgcaacaaatataccaaattagttgtccgtactaacgccgatactccgcatgatgcagaagtggcccgcagttttggtgcatgcggtatcggtctttgtcgtacggaacacatgttctttgatgcagagaagattgttgccatgcgtgaaatgattctggctcccgacgaagcaggacgcagaaaagcattggcaaaacttctcccctatcagaaagctgactttaagggtatcttcaaggctatggacggatgtccggtgaatgttcgtttgctcgatcctcctttgcatgaatttgttccccacgatttgaagggacaggaagagatggctcaggctatgggagtaactgtacaggaaattcagaagcgtgtagaaagcttatgtgaacacaacccgatgttgggacaccgtggttgccgtttgggtaacacctatccgtgtatcacagaaatgcagactcaggctattttgggtgctgccatcgaactgaaaagagaaggttacgacccgcatcccgaaatcatggttccgctgaccggtattctgtatgagtttgaagctcaggaaaaagtgattcgtgacgctgctgccgagttgtttgaaagagaaggaatggaaattccgttcaaggtaggtaccatgattgagattcctcgtgccgcgctgacagccaaccgcattgccagtcgtgcagaatacttctcatttggtacaaatgaccttacccaaatgactttcggttactctcgtgatgacatcgcttcattcttaccggtatatcttgaaaagaagattctgaaagtagacccattccaggtacttgaccaaaacggtgtaggccaacttattgaaatggctgtggataaaggccgttctgttcgtcccgacttgaaatgcggtatctgcggtgaacacggaggtgaaccttcatctgttaagttctgccacaaagtcggtttgaattatgtatcatgttctccgttccgcgtgcctattgccagattagcggcggcgcaagctgcggtagaagaagcttaaaaaatagctaaatattaaaaaaggtcaggcggttaacctttatcacaaggtattatcgcctgacctttttttagtatgtttgttatgtagaacgatatacttcccaaagtctttcagaaagtcctaagtctttttgagagagatgaaaatcctcatcaactattcgtcacacaatgtatcagaatttccgccacgacgcggactggaagataatatcagcactttctttgccataattcgtattttaagagttatttttgtttcttttccaacggcaaagataaactatccgccaataatttctgtagataatttacagataaaataacctcgattacggattcttctttcctcttatctaaaattcgtaaatccctcttgcaaatagggaaattccctatataaatagtaatattctctttatagtatcattttccccacctatttttgcagtataagaaaaaaacagtaaactaaaatcaaatggattatgaaaacaaagataagagaatgcttcggtctattggtatttgtcctaaccatgcttagtttgacttcatgcgaagtagaaatagatagttggtatgataatgatgattatagtgaggtatattatagaaagacacatgaactgtgcagccgtacatggcaggaaagttgggagcaagatggaaaatattacactcagcgattggacttttatgaaaatcggaccggaaaagactatatacgagtggagtatcgagatggctgcgtaactgaagacatatattactttgattggaattgggataacaatacacaaacatgtatccgtatgaaatacggaccggatgacgtctcttattttgaacgcatctggatgagcgacaatacactaagtggtttgcttgacggtacagaagtttattttaaaggaaggtattaggaaaaaagaacgaggtggctgtcaaaaggcagtcgcctcgtttccatatcagtactttctttgataatgtagataaagttattcgttcttcagactgagaatggggttttcgttggctatccgccatgacttgataatcacacagcccacgatgaacgccaatacaacgatgaatacacctgtataaaacagccaatcggtagtcattacatcccgaaactgcgacttccataccattcctgtatagtgcgaaagaacaacgcctatcaatatggccggtacagcgatacggatgacatctgttgacaacatcagcaaaatgcctttcacttccgccccattaatcttgcggatggcaatttccttactccgacgccgtatctcatcattaatataacctaccaatcccatcagtgtgatggctaagatagcaatggttgccaaaatgatagaatcccgaaaaacgcgttctgaatggaaagaacgttccatctgtttggcataagaggtaaactgtacattatcttgcggataaagtttcttcatttcttcgttcaagcgtttgaggttatcatcaaacggttctttcagcctcacatgcattacattgccacgtccgctgctccaacgaatctcgaccggctccatttgcgccgcatcaataaatctgaacccatccaatatacctgtcaccgtaccatgttcgggtacatactcacctactccgttattgtcccacttcatggcacgcacaaattcttcgttgaccagtatttccccttcggctgtcggtgcttttcccgttttcaacctcatccctataaaattaaagaactccctgtcaaagaaagtcaggtgcggagaaaaaatcatattgccactattgtcattcaccggataaggagacggaaatcccaacattccggcttctgccgtagcagccccttccacgtatggcaggttatgaagcaaactgagtgtgttgtccacatgctcatacgaatcataaacagacgccaaccgttccatattgtagcctaaatcttttgacatcgtataatggtattgagaaaagactacacacgtcatcccgactaagaatgccgtacctgcaaattgcacaaaaagtaacggatacttccagcgtttcttgttttcagtgtattggcggaaaacctgggtaacaggaattgaagaaaagaaccgtcccggcatgatacctcctatgaagaacagaaacagcaccaccaaagcaggagcccaaatgttttgcaagctaaacagttctccgactggtgtctgaatcagttcttctattttttcattgaaattgagaatgataaaagcaatcaaagctaaagatatacatacgattatggctgtttcccacaaaaacattccgaatatgcctcctgtacctgccccattgcatttgtgtacgccaatggctttggcacggtaagccagcgaagagagagaaataagcacgtaattcaatgtcgcggtgaacagtaatgctattgcaagtatacccataatataaagcattttcactgtattccaattgtcgagatgcagtctgcgcaatggagaaaccattacctcaataccttttactccaaactttccatagtggtccatgggcatatattggctcatgatgatagacgttatacctttattgataatttccgcatctgcttttgaatgcttcaggcggacaaaagcctgataattgccaccggtgttccatcccaatccgcctttgtaatatttcgtgcgattggcaatagagataacggctttcgggcgatataatgtggtattcagagggatatcggcataaatacctttgactataaaaggctgataatctccaccaatattgtataacaatgtttttcctaccgcaccatcacttccgaaaacctctttggcaaaggattcggacaagaatatcatatccgggttagctaaatcaagcgcattgcctttgtataaaggaagccccattgtttgaaaaaaagcagaatcgaccataagaaccgtttccctataagctttatttccatgagacatcttcccataagcctctgttactgtcgtaaaactttccacttgagcggaaaagtgccgggcaatcgcagcagcagtaggataaatgttattgccatgaagcggttttccaccatcccaccctgtttttaccacatacagctgttcgttgtcccggtaaaaattatcatagctcaattcgtatgctactttagcaatcaaaataacggagacaagcaaacctaaagtaatggataccactttgactatatttgaaccttttccacgaatgacattttggatagcatatttcaattgtttcattgcattatggtgttttatttatgactactcaatactaattactaatttattctgatttgatactctttaccggattttcattagcaatgcgccacgctctgattaccacacaggtcacgacaagcaacattacgaacaaagcaactccaataaaatataaaacattcaaatttatctgttccggaaattgttcaagccatactcgtccggtagaataagctattaaagttcctatacatacagaaggtatcgatacattcaatatgtcacgaatcaacaagcgaagaataccggtagcttccgcaccattcactttgcgaatggcaatttctttggaacggcgttgagtttcgtcattcacataacctatcacacccataataacaataagaagaatgaatcccgaagtaatccacacagaattacggaaacgatagacatctttataaaccgtatccaacatattgcttaccaattgaaactgcaaggaaacattcggataggtcttggctacaaattcatccagttttttcttattctccacatacggttgtttcaggcggacgttgaaggtgttgctcgcatctttgacacaaagtaaggcaataggcgactgttcatgaagaaaggtaaagttacgcacatcacgaaacacaccgacaatggttcctgctttagaaaaattattcaatctctttccaacggctccatccgaccatttcatcaaacgcaccacttcctcattaaccagcaagtctcccggattcttcatcggacttccttctattatctttattcccattacatccgtataatcggaagtacacgaattccaattcaagtttccaatacgttctccactgttactaactagcggacgtgtccaatactcaccgattacattgcaagtagagcgtgcaacactttccaccataggctgacgacggatattgtcggctatgttttcagcttcttccggttgaagagagacattagccgcaaccagtcccggaacttttattcccatatcgcggttcatcaaatgattatattgcaacaaggttaccaataataaacctaatacaaaagagactcctgtaaactgtacaaatagcaaagaacgtttccagcctttttgggcattcgtatatcgtcggaacacctgtgtgacgggaatgcgtgcaaacaatcttcccggcaatactcctgtcagcacaaacaagacaagaatggttaatgcaggtacccataaagtttcccatgtaaaaagggcaggcaaagtaactgacagcaaatcttctataacctcttgtgcattgattattatgaataaactgatgacaacggatagaagaacaatgatacctgtctccatcatgaacatcccgaaaacattaccggtacttgctccgctacacttatgtacaccaaccattttagctcgacgactcatggcagcaatagcaatcagcatatagttcatgatagcaacaaagaaaatagcaaaccccaagaagccgtatataacaagacgtttgactgtatccaaactttccaaatggtagttaaccagcggaatagcactatactcacagataaaattataaaagccggttgatgtatatttctctatcacactctgaatccttttattcacaacttcaatatcggaagcattgcgcaaacgcaataatgaaagaaatacatcattacctttccatccgtaacctgctatataaccgtctttgttatggatagagattaccaaatcacaataaaagatagtgtttttcggaatttccttgtatactccccgtattgtcacttcgatttgcttatccaatgtaagtgttttccctatcgggtcttcatcgccaaagcatttacgtgcaaaacgttcggacacataacccgaaccgggtacagccatatctttcacattacctttcagcatcggaatgcccaaagtctggaaaaagcaagtgtctgccaataagtatttgacgttattcagcagtttgtcttctttatatagattccaggcattatcgggataaatgcaagtggcactttcgatttgttcgggtagattttcagccagcgctgctgctacaggagcaaataatgtataatcataattatctccatcatcccccactatttttcccgatttagaatcaataaacagttcacgagctaaagccagacgttctgcatcgggataacacttctcatagcttaattcaaaagcaatttgcgagaataacaatatgccgatagtcagtccgagtgaaagagagatgagcttcgtcacattacttccacgcccgtgaagaatcgtctggattgcataatataattgtttcatctgtgttgtcttgggctgttactctttgacgtttgctacaatgctaccatcaaacaaatggataattcgatgcgcaaaacttgcatcgtgttgtgagtgagtcaccataacaatgctggtaccctctttattcagttccgtcaataaattcataacttcgcttccgttctttgagtccaaattaccggtaggttcgtccgccaaaatcagtttcggattagttatcacggcacgtgcaatggcaacacgctgttgctgacctcccgataactgttgagggaaatgcttggcacgatgactgagattcatacgtttcaatatttcgaggacacgctctttgcgttcactcgccttaatacccaagtaagtcaaaggtagctccacattttcaaacacattcagctcatctatcagattgaagctctgaaagacaaaacctattactcctttgcggagttgtgtacgctccttctctttcaatcctgccacttccttatctatcaacttgtaacttccttcggttgggttatccagtaatcccaaaatattcagcagagtagatttgccgcaaccggaaggtcccatgatagcaacaaattctccttctttgacttccatacttacgtggttcaatgctatggtctccacttctgaagtgcgaaacactttactcaaattctcaatctgtatcatattcgtttttattgtttaattattcacttttaatactgttcaccggattatcatttgctattctccatgtctttatcaccacacaaccaatgataaaaagtaaagagacaaaagctatcaggatataatagtatatcggaaattcagccgtttcagaaaactggtccgtccacaaagctcccaaataccaggcccccaatgttccgatacacaccgcaggcattgaagtccaaaatatatctttcgaaagcaaaagcaaaatagaagacgcctctgccccatttaccttacgaatggctatttccttactgcgacgttgcatctcatcattaatataaccaatcaatcccatcaaggtaacaaaaaggatggttatggtggccattagcgcaacacttcgaaaatcgaccacagtgctgatttgtagttctgttgcccgtgtttcagacacaaaattcaaatctccatccggccaaatattcttcacatcttcattgagtttctttaagttctcatcaaacggctctttcagctttacttgaatacagccactaaaatcagaacgatattggaatacaaccggttcctccggcacgaaaataggattagatgaacgaaaatcttccgtcactcccacaatagtacccaatatttcatcattgttacgaacctggcgaccgataggattctctttccaatgcataacttccaggaacttccggttaaccacaacttcatcctgttgcttcaggttacgtccttctttcagttttattcctacaaacggaagatagtctttgtcaattgtattgcctcgcatactatattgctttccactttccgtagtaaccagacaaccactcattccttcatatagaggcagactgctacttgcaacagcttctacataaggcaaattttgaaaagtagagcgtgcgttttcaggattactgaaatagtaataggtaaaagccatgcgttctgtgctgaaacctcggtctatattggtcatgtgattggattgcaccaatacaagcgccaacaatgcaaagatgaatgccgtaccggtaaattggatgaaaagtaacggacgcttccagcttttcttgccttccgtatatctgcgaaagacctgcgtaaccggtattcttgaaaattgtaatcccggcaatacaccacccactatgaagataaataaaacggcacaaaccggtgcccatagattctcataagtaaacatggcctccagactggcatctgccattctttcaagcggttcttggaaattaagcataaggaaagccatcaataggacagagaggaaaataagaatccctgtttcccacagaaacattttcatgattccccaatctgacgctccattacacttgtgcacaccaatgattttggcacggcgactcagtgaagaaatggaaattagcacatagttcaatgtaacagtaaacaatagaatacctgctaagataagcaatacccaaataatgcccataccatcataatttctggccagtcttaaatcagaaaagggaatcagacgaagcgaccaagtataattcttatccttatcttcctgcggaatatatttttccagcatttggtctatacgattatttatcgtttccatgtcggaaggatggcgtaagcgaatataagcaaaataactgtcacctccattccacccccaatagtcccagccatattttcgtgtggtagccatagatatgataaccctcaaatcataaaatgtagaattctcaggatagtcttcataaacaccttttatggtcatcggcatgcttttattcaaattcacaaccttgccgacaggatcagtcccggcaaacatttcttgtgccaagctccggctgataaacagtatatcgggattattcatttccgaagcctgcccttgcaatatctttgttctcattgtcttaaagaaacaactgtcggctatcaatacacccggactgaaacgaacgtcatccttataaagagaagttcctccccaccagaaatgcgttgttgtggcactttccacttctttgggaaaactttcggctatggcaccggccatagggcccattgtcataaagccggtgtccttctctccgttatgattccattcaatctgcactgcagccagacattcggaatcctcatagcaagtatcataattaaactcgaaggcttcgcgcgcgaatatcaagatactgaccgtcaaacccagagtcagcgagataacctttataagattagccccacgcccatgaatcaatgtctgaattacataataaagttctttcatattttattttttgtttctattcgttctcttaaagaataatgcagaaaacgtgccaaagtcacagtcctctataaataagagctttagttatttcattccgccccgatagtgtctaataattagacagcagtgtatgataattagacagcagtgtatgataattagacagcagtgtat

SEQ ID NO: 6772 - DNA, 2758 bp, Unknown
  gut microbiota DNA sequence
acactgcttaggaggttaggcgccaaatacttatctttgtttcaagaataaaccaaaagattatagatatgcaaggaaccataattgtggtagacgataataaaggggtgctttctgccgttaagctgctgttgaagaatagctttgagcgtatcattaccctcacctcacctatcacactgcctgccgtgctgcgtgaagagaatgcacaggtggtattgcttgatatgaacttcagcagtgggcttaatactggcaatgaagggctttactggttgcacgaaataaaaaaaatgcaaccgtcattacccgtcgtgctatttactgcttacgctgatatcgatttggctgtacgtggtataaaagaaggagccgcggattttatcgtgaaaccttgggataatacccgattggtagatacactgtcagctacatgccgaaacagttctaaaggaaagaaaaaagcagaactccgcagggtggtatcatcaatgtattggggtgaaagcaatgccatgaaacagttgaggacactgatagagaaggtagcccaaacagatgcaaatatcctgattaccggagagaatggtaccgggaaggaaatgctggcacgcgaaatccatgcgctttccgaacgatgccggcgcaatatggtaacggtggatatgggtgccgttactgaatctttgtttgaaagcgaattgttcgggcatgtaaaaggttcgttcaccgacgcccattccgaccggcaaggaaaattcgaagcggctcatgaaggtactctctttttggacgaaataggcaatttgccttatcacctgcaatccaagctccttactgccattcaacagcgtagtgtggtgcgtgtgggcagcaatgatcccattcctgtagatatccgtttgatttgcgccactaattgcaatttggaagagatggtactcaaaggcaggtttagggaggatttattatacagaataaacaccatccatattgaaattcctcctttacgtgacagaaaagaagatattatcccccttgccgaacggtttatcgaccgtttctgtaagcagtatgacaaaggaaatatcattctttcctcttccgcaaaggacaagctgcgcgagcatccttggtatgggaatattcgggaactggagcacgccattgagaaggctgtcatcattaacgaagatggaatattgaataacgaacattttcactttccccgtaaagccggcacgcctcctgccgaagctgccgtctccacattggaagaaatggagttgcagatgattcaaagagccatggaaaaatgtaacggaaacctttcggccgtggctgcccaactgggaataacgcgtcagaccttatataataaaatgaagaaattcggtttatgatgaaaaaagtgactgcctcttttatcttccgcctacttgttgttgtcgcattggcgacatccggtttatggctgtatatgcaccacaattggttatggttatgccttgtcgttcccttattcttcgtttcaatatattggtttcatcgcctgtatacctataatacaagaaaagtggcatttttgcttgacgccattgagaatgacgacccggctgtgcgattctatgaacatagccccgacaaagacaattcatcggtcaacatgatgctgaaccgcatagcgcgaatcttatataatgtaaaacaggaaacagcccaacgtgagaagtattacgagctgattcttgacttcgtggaaacaggaatcgttgtactcaacagtaaaggtgctgtctatcaaaaaaataaaaaagcaacgcaactattgggaatggacgtctttacacataccaaacaactatcccgcatttcagacgaactgaaaaaagtgatggaagaagctcttccgggagataaatcacaagtacaggtcagtacggagcgcggtacaatcaatctggcactacgcgtgtcgggcataaatatcaaagaggaagaactacgtattatcgctctcagcgatatcaaccgcgagttggacgaacgggagattgattcatggattcggcttacccgggttttaactcacgaaatcatgaactcccttactcccgtcacttcgttgagtgaaaccttgctgcaattaccgggagctgaaaacgaggagatgcggcaaggattggaaacgattcacacgacaggcaaaggactgataaatttcgtcatgtcttatcgcaaactgacacgtcttccttcaccggaaccttcactgttctatgtacgtcccttcctcgaaagaatgataaaactggcgtgtcatcagcatccttgtcctcatatcagcatttccctgcatgaagcgaaagacgatttgattgtctttgccgacgagaacctcattgctcaagtggtgactaacctgcttaaaaacgccattcaagcaattggtgatacaccggacggactaatcaccctgagagcatactgtgacgaacaggaaagtgtacatatcgagattgctaataatggtcctgtgatcgaccccgaagctgccgaacagatttttattcctttctttaccaccaaagaagaaggaagcggaatcggtctgagcttgagcaaacaaattatgagacttagcggtggcacactgacattgttgccttataaagaagacaggcagactaccacatttgcattggtgttcagttaaactcttctcttgacccaaaatcaaataaaaaatctcctttca

SEQ ID NO: 6773 - DNA, 290 bp, Unknown
  gut microbiota DNA sequence
atgagtgacggcgtgccttttgcataatgaacctacgagttgcctttgccggcaaggttaagtgtgacgacacacgtatccgaagcgaaagcgagtctgaacagggcgtatagtcggcagtggcagacgcgaaaccaagtgatctacccttggccaggttgaaggctgggtaacaccagctggaggaccgcaccaataagcgttgaaaagcttctggatgagctgagggtaggggtgaaaggctaatcaaacttggagatagctcgtactccccgaaatgcatttaggtg

SEQ ID NO: 6774 - DNA, 1119 bp, Unknown
  gut microbiota DNA sequence
attgcaactattataagaatctattaaaatgagaactatagaattaagcacaaaaaaacgtatgaaaagaataaatctgaccgttttgttgttaagcggtgtctgtttgttatgccaaccccttcaagcccagcagagcattgatgcttgtgacggtcgtacttataaagtaggcgacacgctccgtattggcgaaccattgccttcgggctatctatttataaagcagataaacgccgataataaattcgacaagttgaatccgaaaaactcaaccggacggactgccgtcattaccgacatacctgcttaccagcccaaactctatcaacagttcggcatttaccaacagccggaaacgccccaaatagtctttgccgaacagggcgatttcaagattggcgtatatctaaacatggctttaaccaaaggaaacatcatgtccggacatcatgtttcccatatggatggagctgtcgaccttaccccggctatcttgttcgcctacacacataaactttacggcaaacctatcgacacagcatcagtcgagacctatgcctctctctctgctccccaacagtatgcagaagcagccaatgacccgtttgcattggaagaacttcgtacaacatatcggaaagaactggaacaagctgtggcaaatgcagatttcaataaggttttccgtatcaaatgtttgtcggaactccaaatgtacgacatcaatcaacagcgtttcccgctttcgggcttaacgtgtgtcaatgtggaaaccaagcagaacagagaattatcccaacaaggttattgcttatggggaagttgtgcctttcatttcactaacgctccgtcatttgccaccctaccttgcaaaaaaaacattgcccaaggcatttatactatgcgtaaaatgacctcggcgaccttgccaccaacagctaccctatacgtatatgtgcgcatcctccaacagccagtatcacttcctgataaacgtaccatggtgatgtgtcccggaacatcattcgatttcgagtggtcaacactccgtaaagcatacggtcaaaaagctttgaacatggaaattatacaaacggacggttattataatgtctt

SEQ ID NO: 6775 - DNA, 1273 bp, Unknown
  gut microbiota DNA sequence
ctgtatccgttccttttcttcctgatgtcatagcacaccacgaagtggttctggttccagtgcaggatgcacggaagcggcacgtcttcctccagttgcttcagggtaatcctcactcccgatgtgcggaaaccgatggattccgccgcgtcactgatgcccagcatggataccccctcacgtgtgatgaaggagcgttcgcggagcgtctgcagcgaatagttcttgccgtaatatttggctatcatacgcaggcaggtggggccgcagtccatcgcatccaactggaggtagtgggggaaggtcttcattttactttatggttttacatgacaaagattgggctttcctattaccaactcataattggagggagaagggcatagataacggaatagacaatctttgcatggcgatacttcatcacgtatccaacgccaagcccttttggatttcatctcatcaacaattaaatcatatactctatcttttaatgtgcctaatggtggatgatttaaattggaataaacttttccatcaggtaatacagaaagtcttccccaaaagttggtgttcattacttgatgtgcaaatatatcctgcttgtcataattggattgtaatatgtcttcttcagccaaataaacattctcttcaaagaaaggtaggttgtctcctgtatatataggatgaacttctacatattcatttccatactttgtttccagtttctccaggtcttcatattgcttttcagaagaaatgagatatatccaatggaaaggaatctgtttttcagtcagtatatggtgaatgctcgcttcttcttgctcatagtaaatgtacagttcataattgggtaattctatttgttgtatctctttaatgaaccggcaggcagttgaagctgtcagataaaaattcttttttactggaatactgtaaagtaaatccattaattctgctttataagggtaagaaaacggattccctatgatatttatagtatttagatatgaattatcagaggaagacaaaaatgcttgtaagtcataaaaaggcagtatgctactgtcatccacaggatatgggatttgtttgtgcaaattaggaaatttactttcacctcccaagtaaatggaaaactcattccagttttgagcagcatactcaccgacatctctatcttctgcagcttcaattctgtctatatcagattgtaagtttagaagaggagggaaactgataatatatagttcatcttctgattttt

SEQ ID NO: 6776 - DNA, 264 bp, Unknown
  gut microbiota DNA sequence
tgtcttgcaaatcacgaggaaaatgttttttatggaatatgacggattgtatttttctcaaactgtccaggccggaactttttgcatacgaataatatcccggcatattctttatgagaaaacatgcagcatcatatttaggaccactatccttataatgttccagtactttttccagctctattcggttcttgcctgcggcattcagggaatacttcaaatccttttcccggtagcacgaactaaaacagatagtggataata

SEQ ID NO: 6777 - DNA, 45912 bp, Unknown
  gut microbiota DNA sequence
gaacagcagattagttcgatctcttctccggggaagaacttgtgggcggcaatgtcgtgatacgagcccggtacaccttgtattgctatctttttcattcgtatatatattataaaaaaatcccgcttctgccggaagcgggatttcgttgttattatcgcattgttttaatcattgtttaacgtacacatacaaactcccgcttcactttgttgctaaagtaaaagtaataaaagaaaaagaagtatgtattgtataatgctttcattttgttctcattgttattgaatacgctgcaaaagtaatacttttctagcaaaaacaaataaataagaagttttttttcaaaaatattttttctttgtctcaataacttgtattctggaataaataaagtatatttgtgaatagacaggtctgcattgtcggctatcattattcattaaataaaggagggtgtatgggaactctgggatgcatcaatgacatgatgcggcgtgataaggaaaacagggagcttcgccgggcgagtcgcgaacggctgaatgagacaaggaatcgtctgcttgatgtgaagggcaaacgttcggagtgtaatgtgtcgtatgagcaactggagcatattgcccatgaaacccgggaatgggaagaaaaggagcgcaacagttttcttaaaggtaaattggttttcatcactttgcttgcaggtattgttttattaatagggacagttcttgccctattctgcaaatgaaccatgtccggttatggaggtatattcttttctcccggtcactttacatgggtttctgaactgaatcatttttttctctactttccataatccccggtatttgctgcaaagcccaattgaccagtccttcaaggtggggtatcagactcagtcctctttccgtcaggcagtattcaactcgtggcggaacttcggcatatacctttcgttttaccagaccgtcagattccagtgtgcgtaaagtgacggtgagcattcgttgtgatacatcggctatcgttttgtgaatatcactgaaccgcatggttccattggtatgtagtgtgataagaaccagcatagaccatttgtcaccaagacggctgagcacgtctcgtatgggacaattaccgttaggatggaagttttgcattttttaatcttttgtatgttcttgttgttcaataacggttacttctgtgtaacctgcttatgctgaagtgcgttcttgtttttatgaaagaggcacgttacatttgtggcacaaaagtaataaacttactaaagataactattgttttaacagatatattaattgttttatttaatgcattaagattatggcaaagaaagtagcagttttggcagtgaatccggtgaatggattcggtttgttccagtatttggaagccttttttgagaatggtatatcttataaggtatatgcagtggcggaaacaaagcaaattaaaacgaattcgggtgttgaattggtggcagatgatataattgcgcatttggtaggacacgaagatgaatttgatgctgtggtattttcatgcggagatgcagttcctgtgtttgcacagaatgcagataaaccttataacattgatttgatgtccgtactgaaggcttttggtgaaaaaggtaaaatattgataggtcattgtgcggcaggtatgttgtttgattttgcaggagtaacggaaggtaagaaactggcagtgcatccgttggcaaagccggccatcaccaaggggcaggcgacagacgataaatctgtggttgatggcaatctttttactgcacaagatgaaaagtttgtatggacaatgatacctgaagtattgaaggtgcttaaataatgaagttgatgaacaaggacggaaaatcttccgtccttatatggattgttgcggactttttctatatatttgaattcgattttaaaagatacaaataatgaaatacgattttgataaagtaatagaccgcaacggtactgccgccgttaagctggaagaggcgaaggaagtgtggggacgtgcggatttgattcctttgtgggtggcagatatggattttggtacagctccttttattgtggatgccattcgtaaacgctgtgaatgtgaagtgttgggttatacggggaaacctgacagttactatcgggcaatcattaattgggtgaaacaacgctatgatttggatgtcacaaaagagatgataaactttgttcccggcattgttcccggcatcggtatggcaatgaacagcttcacccgaccgggagataaggtgatgattcagccgcccgtctaccatccttttgcttgggtaacgacccgcaatgagcgtacattggttactaaccccctgaaatgggggaatggtatgtatcgaatggatttggatgcctttcgcgaacaggtaaaaggttgtaaactgtttattttatgcaatcctcataatcccggtggcgtggtgtggacagaagacgaactgcgcacagtggcagaaatctgttacgaagaaaaagtgctggtgttctctgacgaaattcatgcagacttaactcttcctccttacaaacaccgtccttttgctactatcagtgaaaaggcaaagatgaattcggtaacatttatgtcacccagtaaggcgtttaatatgccggggctggctgcttctcatgccataatctttaatgaggacctgcgtgcgcgattccgtaaatttatggatgccggtgaactggacatggggcatgtatttgctttcctttccgtggaagcggcatatacacacggaacggagtggcttgaccaatgtttggcttatatacagggaaacattgattatgttgacaatttcctgaaaactcatgcacccaggattaaagccattcgtccgcaagcgtcttatttggtttggcttgattgccgtgaactgggattaaaccaggaagcactaaacgatttctttgcagataaagcgcatctggcattgaatgacggagcgatgttcggaaaggaaggcacaggatatatgcgtctgaatgtggcaagtccgcgttctgtgattgaacaagcgatgaagcaattggctgaggcttatcaagcaatgtctttttagaaattaaaaagggtgtgtcaaaactaaaccggtctatcaaatcatcatcggtaggggcagggtttgcctgcccctaccgatgaccacgaccttgggagtaatacacaaagcaaactgttttcgggcgagcgaacctcgccctactaacaaaatgacagtattatcaacgtttagacacaatcccttttttgagtacagaaaattatttcctcgtattattattttaatggaggcatattgggttctgttggccaatatggattttgatagatgggtgagttctcaatggaaccgccgcctgacgtgatatccatatcttgaattctgtatggttccagatagtgagccatagcccagcgatagccgtctttagccaggttgttgttattcttttcataaggacgcaagtatggactgatagccgggtcagaaacattggctttaggattatccataccataaaccagttgcgaagtaccgtcttcattatcgtaccaatgctgcatgcttccccataatttgaaaccttcaatgtgatatggagtggaaatcatctgatccatagctctccaacgcatcagatccatatagcgtaaaccttctgccatcagttcgcagcggcgttcgcgacggatgttgtagagggtcgggtctatcagtttgcctgccgaataagctccccagtcattaagtgcttctttagccatgtcggtggcagcgatggttttattatagtctgtatctacatgagaacgttttcttatctgtgtccaatagctttgggcaatattgtctaaagaaccattcttctcataacatgcttctatatagttgagcagcgcttctgtgccacggaatatcagtgcgccggtatagcatagcccgttacctaaatatttttggtcataattatttcctttgcggagtgcatatccggtagaatatcctttttctgcattattgttaaggattaccgggaatggttcgataggcactgccatatcaccttctgccgattcgaataaaacatttatttgtcccggttcttttaaaaagatatgtaaacgtgagtcgcgacctttacggacatcggatatagtttcatctccttgatatccgctgcctgctgcatagacaggcaagccgtttgccatcaggaatccgtttaccatgccgcgtgtaacacctattccatagttcccgtgttgggcggctgttgcgacaccgtgtgtcaatcccaatgctttgctgtatggacgccacaagagtacttcgctgtagtccgacatatcttcatctccgaacatatccatgtaggggttggccggttcggagatagcctgttgtattgttccggtgttttcaaccagttgggttgcgtcggccacttccttggctgcgttcatggcttctgtcaggaagaagtcgatttctttatcgatatctcctgtcggatattgataattagcattatattctttactctttcccggccattccggtccgttgggaacgaaaggagtatctttgaagtatttcagccaagtaccttcaaatagagctacacgtgatttcatcagcagtgcacactcacggttgattcgggttttttctgttccctttcccgaagacatcatctcgatggcggaatccaaatccgatagaatgaagcgtgccacttcgttacgtggtgagcgtttgctggcttctaccaacggttccatttggtcgggtagggtagccttgacaatagggaaatcaccgtatgaacggaggcgtttgaaatattcgtatgcgcgcatgaaatacatttctccgatgtattggcgtattttctcttctgctccggaaatggtgccggcttcaaactctggcaatactttttcaaagaagtagttacaactataaatatttccaaagctatatgagcctcccgaagattgagaagttttccattgtccgggaatgtatcggttgttataaccgaaacccgcttgattgtctgtgtggttatcttctccataaagtccgtatccgtaggcatgtccgggaagtatgtctgtatagagtttgttggcataggcttccagctgggattcatctttcagatatttttccggtgaaacggaagacatcggttcttggtccaaaaaatcgttgcaggaagtcatgaagcccaaaacggcgactccggctacatatttgaatatattactatgtttcataattattgttttttttaatgattataaggttacgttcaatcccacagagaatgtcctgcttaacggatatgcatttccattgtattcgtctccaccgccgattgtttcagggtcgaatatcttggttagtgaggttccggtccacaagttctcacctgatacgaatatgcgtaatttagatacggcaaatttcttggtgagagataccggcagggtatatccgaattgaaggtttttcagacggatataagaggcatcctgcaagtaaccggattgtgtctgcttgtttttgtcggaaccaaagatggggcgcggatagtaggcgtccagattggtcggcaaatcatttgaaggttcggctctgaagtaatcggcatgttctacaaagccggtagaatgccacaatgaggtggctccccaaaagtatgcactgccttgccagtagtcgcgtttcattactccctggaagaatgcacggaagtcgaaacctttccaatctgcattcaggtcaataccgaattgatagcgaggtttgttgttgccgagtatttttctgtcgcccatgtcatcatacttattgcctccgccgtctattttaccgtcaccgtttaagtctttatacatgatgtcgccggcttcccagttggaaccaagggcgttttgtcctccattgggaagagaagccagatgttcttccatctctgcgtcagatttagctataccgatagtttcataaccgtaaatgtctcccagcattctaccttttctatatttgtccaatgtattggtaggattcgggtaacgggtgatttctgtttgcgaatctgatagaacgaatttgattccatagcccagtccgtttctcagacgatcttgccaagctatttctaaatcgaaaccataagttctcaagtcggtattgttggtcttgggtacgcttaagccaaggatgctcggaagttcgggggcagggcctatcatgtctagtgtttcgcgggtataataatcgaacgaaccggtcagacggttattgaaggcaccgaagtcaagaccgatattccaattgcgtatgcgttcccagcccatggtagaactaatcaatccgggaactgtagctgtattgggcttgataccgttttgtatccaaccgccgccaccggcagaaacacctaaggtttggtaagtgggataccatgatttggtattctggttacctaattctccataagaaccgcgtaatttcaaggtccctacatattcgctcaatgattcccagaagttttcgcgggcaatgttccaaccgagagagaatgaaggaaaccagttccagcgttgttcgcggcggaaacgtgaggtaccgtcataacggatattgacttctgccagatatttgcctttgtagtcataattgatacgtccgaagaaaccggcggtagaccaagctgtgcgcgaaccgtttacggaaggagttactacttttccggtataatccagtccggtggtaatatcaatttcaggtaattcgggtacgataatacctttgcgggtcgcaccgaatgtttgttgtttcatttcttcggcttgaaaaccaatcatacctttaaagttatgtcccgattcaaggctgtgcgaatattccgtataagcattgaagttcatatagttctctttggtttggtcttcatgagcttctgtgtcttgataatagccgatggggtatggatttccttgtacatcgtgattatacaaagtctgtgtatcccagtggttgttcacagtattgattctgtagttaaagtccacatgggtaatccagttctttatcggttcaagaataagagatatttgctgatatatattgtctgtttgaatgttgtgttttccaccatcacggagggggagtgccggagaaggagagtggaacatgtatccgttggggtcatatacaggcagtgtgggccagccttggcgtgccaagtcgcggaataatgcattggtcagataggcaggacgatgaaagtcttcgcgtgtaaagcggctggtataattcacttttgcccaatcagtcagttgtgcattgatttttccggtaccggtataacgtttgtaggtatcttggttgaattccatcaatcctttttgatccatgaagttaccggatatataataattgactttgtcattaccaccactgaaactcaggttatgttcttgtgaggatgtccattcgcgatatatcacatcataccagtctgtatttgcattaccgccggcatatccgtcgagccagtatttattgttggcatcagctagaactccgtcggtaattttaccatcttgataatctttgatgcgttgcaggtgttctgcattaaaataagctcctgctcccgaattgatatttgcatcgttgtagaaagtggcaaatgtatatgaatccatttgcttgggaattcttacgggctgtccccagcggaagttattattatagtttatggtcgtttttccgctctttccacttttggtggttaccaaaattacaccaaagggtgcacgcgaaccatagatagaagcggctgcggcatctttcaggatagagatattttcaatatcctgtggattgatggagttgatgtctccttccatgccgtcaatcaacactagcggacttgcatcagaaccatcgccgatagttcctgtaccgcggatactcatgctcatcttattatccaatgcaccgctggtagtggtgatttgtaatcccggtactacaccctgcagggcttgtacagcattttgtacggggcgggatgcgagtgcttctgagtctacggtacctacggaaccggtcaggttgactttcttttgtgtaccaaaacctaccactactacttcatccaaggtcttggtgtcttcttgtagcatgattttaaggacggattgtccggtatactttacttctttcgtagtatatcctacaaatgaaatctgtaggatacttcctttttttactccttccagggtgaatcgtccgtcaatgtcggtggttgttccgtttgttgttcctttaacaacaaccgtagctccgataacagttcccaaggcatcttctacagtacctgtaactttcccgttttgttgggaaatacttgttctaggctgattaggcatctgttctgccataccggttaccggaaaacttaaggctccggctagcagaataagcttcatagcttgatttttctttagcataatattagtttttaattaagattaaaaatattcctttctgagaagttgttttgatggcagcaaagttacaatgaatgaaataaagacgtaaaagaagttaatggtatgaattggagaattcggtacttgcataaaagataattataaaaaacggatatgatggaatgtgctcattatgagtgtgtaagctatacattattatataagggcagaaggatggaacggtaacattaaagcttttcctccgccggactaacgttttctgattgccatgttagtacgtcctgccgcaatgggatgtacgtcctactgtagtggaacgtacgtcctgctgcaatggaacatacgtcctgctacagtgggacgtactggttgttggcagataaagccttagtgtgaagtaagaaaaagcttaggagtccgttccggattgccaagcatgtctgttgctgtccattttctacatgttttctttccatttattccgaatttgttaaaagtaagtttggaatttagagccttgttttcatttgatttgtgtatgtttgcaaaagattcttgaatttgatatactgaatgacatgaaattgaaaacgatatttgtactaggtctggtggcgggaatgatgagttgcagcactccggcagattattgtcccgttacggcatcaggtaatgatttggtctttccggctttggcacaaagttgggatgaaggcattccattgggaaacgccacggtaggtgcgttggtatgggagaaagataccgccttgcgcttttccttggaccgtaccgatttgtgggatttgcgtccggcagatagtctgtcggggaataattatcgctttgcatgggtcaaggaacatatccgtaagggtgattatcggcctgtgcaaaagaaattcgacgaaccttatgacaggatgcctgctccttccaaaataccgggagcggctttggagtttccgttgacgaaacttggaaagcctgtacaagtacgtttgtatctggataatgctttgtgtgaagctacttgggcaaatggtactcaaatgcaaacatttgttcatgctacagaaccggtggggtggtttgtttttaaaaatctgactacggagctggagcctgtgttggtggctcctcgatataggcaagaggggagcagtgccgaagcaagtccggtttcgggacaggatttgcaacgactgggatatgagcagggaagtgtaatccgtaaagacaatgaattggtgtatcatcagaaaggatatggagatttttcttacgatgtggtggtgaaatgggaacggcagggaaatacactgtatggaacgtggagcatcacgtcttccttgagcggagaacaggcagaagaagagacgtcgactgctatgctccgtggcctggcaaaggactataaagcgcatcttgattattgggaacattattgggcacagtcgtctgtttctcttccggacagtattttgcaaaaacaatattataatgagatgtataagttcggttcggcaactcgtgaaaattcttatcctatttctttgcaggctgtatggactgccgataacggtaaattaccaccatggaagggggattatcatcacgatctgaatacacaactcagttattggcctgcgtatgcgggcaatcgcttgtctgaggggttgggatatctgaatacattgtggaatcagcgtgacacttacaaacgctatactcgccaatattttgaaacagagggtatgaatgtgcccggggtttgcaccctgacgggagaacctatgggaggatggattcagtatgccatgtctcaaacggcgggagcttggttggcacagcatttttatttgcactggaaatattctgccgataaggagttcttgaaagaaagagcttatcctttcttgaaggatgtagctgtatacatggagcaaaattcgattgtcgacagcaaaggatttcgtcgcttggagttcagctcaagtcccgaaatttatgataattcattgcaggcatggttcaaggatatgacaaattatgatttatcgctgatgcatttcctgtttggtgcgggggcggagatggcaaatgaactgggaataaagaccgaagcagcgcattggaataaattgaaaagccaattgcctgattttgatttggataatgagggaagccttacgtttgccaaaggatttccttataatgcatctcatcgtcatttctctcatgcattggccattcatccgctgggcatcatagactggagcgacggcgaaaaggcgcaacgaatcattcgtgccactttaaagaaaatgaatgattacggaccggattattggaccggatatacatatagttggtttgccaatatgcaggcgcgtgcattcaacggtgaagaagcagcaaaagcattgagaacttttgccgaatgcttctgcttgaaaaatacgttccatgccaatggtgaccagtctgccagcgggaaatcgaagttcacatatcgcccttttacgcttgagggaaactttgcttttgctgcaggcatacatgaaatgttattgcagagccatacgggagtgatacgggtctttccggcagttcccgaaagttggaagaatgtatcttttaacaacctgcgggccatgggaggttttcttgtctcggcggctctcaaggatggaaaggttgtccgactggaaatttacgctgaaaaagggggccgtcttgcagtcttttctccttttgagcataaagtggtggaatatgatactcagccgggcagtcggatagacttagcagtggaataaatgaagaaatcgttttatatttgtattacaaagaaataaagaagattatggatgcatgtgccgtacactcttccctttgggagatattggagcagataaccgaaaatttaaagagtaagcgtctggcggatgtgtttcgctttatctcgttttatccttcggaaacgtatggtccgcataagcatttgcgcattgagataaactatgtgaagaaaggctattgtattcttcatttggataatgaaagcgtgactttcaaggaaggagagataatggtcattacttcagacgtcaatcatttgtttgaggcgggcagtgaagggacaactttaatgcagctggaatttttgcccgaaatattttctaactttaacttgaactcccgggtgggcaaagatgcttcggtacctacttccgtattcttgttttctgaagagaaccggctgattaaaattgtgaataatgtccgtatcatgcgggtagtgcagcgcattgtgaatgagctggagacaaaaagtgtgtattatcaatacttggtcgtgatgtactatgcagagttgctggtgcttatctatcgctatatggatgaagcttatttacctatctgtaccaatgactcgttgagaaaagccattgcttatatccggttgaattatcattcggatatcaatataaataaggtggcggaagaagtaggtatcagtgaacgttatctcagaaacctgttttcacagtatttgaatctttctccgttggattatctgaatcagataagaatcaataaagcggtggaacttttaagaaacacggaaatgtccataaaagaagtatgctttcagtgtggttttcagtcaccgcaatacttttcacgcatctttaaacaacagatgggggtatctccgcgcgatgtggcaaaatagtacttccgttttgtatatgttttggttatattttcgcctttttacataagtgcaatagtcctgaaaagttctttcttttttaaaagcagactacctttgctgttactataacagagtaaaaacaatcttttaatagaacaaaaaaatgaaagaatggaacgatgacaaagagttggtttccttgataaagggagaactctatacggcagttgtcggagatattatggacaagatggggtatacccatcaattcctgccgcctcatattcgtccgcttcgcgatgatatgtttgttgcgggacgtgccatgactgtattggaggccgatgtatatgataatcagggaacaagcgggacaaatccggttctgaaacgctctttcggtttgatgctcgaagcattggatgacttgaaagaaggtgaaatctatatttgttccggctcttctccttcttatgctttatggggagagttgatgagtgcgcgcgctatgcagtgtaaagctgccggtgcggtggtgaatggttactctcgcgatacgaaaggaattctggctttaaattttccttgtttttcttacggtccttatgctcaggatcaggctccgcgcggaaaggtgattgactatcgtgtacctatcgaaattgaaggcgtgttggtaaacgatggtgatatgctggtgggagatattgacggtgtatgtgtggtgccgcgtcaaatagaagaagaggtgtttactcgtgctttggagaaagcgcgtggcgaacgcattgtcttgaagaagatacaggaaggcatgaaagcccgggatgcatttgataaatttggtattatgtaatttataaagcaggaaaagatgaaaataacagatgtaaaagtatggttggtgcaaggcatcaagtacaattggactttattgaagatatatacggacgaaggttatacaggtgtaggcgaggctaccaactggccgggaagccccatcgtatacgaggcggcaaaacatataggcagtcgcattatcggacttgacccgatgaagacggattttatctggacaaaactttatcgtgacttaaactgggtaggaccctatggtgccagtatgtgtgccattagtggcattgatatggcattgcttgatttgaaaggaaaggtattgggcgtgccgtgttatgagcttttgggaggagcttaccgtaaggatattcttttgtatgccaattactggtttacgaagggggggcacaatgaagccgattatgcagaacaggcacgtgcggtgaaggctgccggatttacgggattgaagtttgatccgtttgcacataccaattatttctatggtgaagatttggcatccaatctgacactgactcctgcacaacaggatttggcgttcaatgtttcaaaggcagttcgtgaggcagtggggccggaggtggatatcatgattgaaactcatgccatgcttaattaccgcattgccgtgaagatggcagagcgtttggcaacattggatattgcctggtatgaggaaccggcaggtccggaaagttctcaaacattgcgtgccatgcgtgaacgtataccttcggatgttgctatttgtgtgggtgagcgtcattatactcgttttggcattcgctcattgctcgaaaaacatgtatgtgatatcatcatgccggatattactcggtgtggaggtccgtcggagatgaaacgaatggctactatggccgaggcttatcaggttttgttggctcctcataatcccaatggtcctttatctactcttgcttcatcgcatgtatgtgcttccgttcccaatttcttccgtcaggagtttatgttcaatgatgttccctggagagatactgtgattgaccatcccattgccgatatggtttatgacgggcatttacatttgtcggatcgcccggggttgggagtcgatttggtggaagaagagatggaaaagcatccgggtattacaagtaatcctcctgagaacttttatatttaatgcgtatgccgtttcaaatagacttaacaggaaaagtggtcctgataaccggagtgtcctccggtatcggactgggcaccgcacatgagtttgcccgtgcaggggcttgtgtggcaggatgtgcgcgtaaaccggaaagtgacgatagcgtttcggcatttttgcaagctgtggaaggagagggttgcaaggcactctatgtccaggcagatgtcacacaggaagaggaattggaaaagctggtgcaagaggtgatagccactttcgggcggctggatattgttgtttccaatgccggaatgaatgtatttgaaggtgcggcggaatgttcggaaagccggtgggcgtacaatctggatttgaacttggcttcccattggcgtttggccaggattgccaaaccttatttggaacaaagcggcaatggggttatcttattgatgacttccaatcatgctttttgctccattccgggatgtttcccttataacgttacaaagacagctatcaccgggcttgtccggagtctgaccatagagtggggaccgaagatacggacagtcggcgtagcgcccggatttatagatacggcgggaaacgatacttggttcaattcgtttccggatgctatggccgaacgtcaacgtacgattaatcttcatccggtaaaaaaaatcggtacggtagaagaagtcggcgcactatgtgtttatcttgcttctcccatggcagggtttataagcggaacaaccattttgatggatggtggacgatcggcattgatgcaagattcttaaaatgagttttcaattggtattttaaaatatatgatgatgaatgcaactctattacatcgttgttataatcggaccggtgaggctgctacatggatgcccggtttggaatgtttgttatgggtagacattgataatggaattttatatcaatatactcctgacgaaggtacggtgaaagagcatacttttccggaaatgataacttccgttattccgtggaaggggcacggggatgaagtgcttctggcaatgaaaaatcgttttattgcttatgatttggagaaaaagacttataaaacactgatagaatttccatgtctgcatccgcagtggcgtaccaatgattgcaaggcatcaccggagggacgtatttggtgtggagtgatgcattgcagcgaacataatggcaacggaagtctgtattgtgtagataatgatttatctttgacgcctgttttgggacaacaaagtattcctaatggaattgtttggaaccggaaaggagaccgtatgtattatgttgattccggcagaaggtgtattgaagagtatgcttatgattatttgaccggggctatttattttatccgtactgcagtacaggttcccgtggaatatggagtgccggatggaatgaccattgatgccaacggacttttgtgggtggctcattggggaggattcggtgtgtacgtttggagtccgtcaaccgggcagcttgtcgataaaatagaagttccggttcctaatgtagcttcgtgcacttttgggggcaaggagcgtaatcggttatttattacaacggctgtagatggcttgtcggaagctgagatacaggcttatcctttgagtggaagtttgtttgtggccgatgtacccggtgttgtttccggagagaatcattatccgtttataatccgttaagaaaatggcaatatgaatatatcaacaattgatttaatagtctttatcgcctactgcttgcttattttgttggtaggactcttcgtttcgcgtagaggcaaaggagagacacaagatgccagtaactattttttagccggcagaggcttggcttggtgggcaataggggcttctattattgcatccaatatctcggcagaacagtttgtcggcatgtcgggctccggttatgccatcgggctggccatggcgacgtatgaatggattgcggcattggggctgctgattgtggctaagttttttattcctattttcctggagaagaaaatctttacgatgccacaatttttggaggaacgctttgaccgccgggtgaagactgtaatggcttttttctggttggcggtattcatattcatcaatttaacttccattctttatttaggagcgttgacgattgagaatgttatgggagttcctatgttggcagggataataggactggcggcctttgccggaatttattccatttatggaggattgaaagccgtggcattgaccgatgttattcaggttgtgtttttgataggcggtggattgataacaacttacattgcgctcgatatgcttggcaatggggaaggtgttatttccggatttactaatctttgtcatcaggcggaagataaattccatcttatacttgataaatcacatcccgggtatatggatcttcccggggtatcggttatcataggagggttatgggttgccaatttatattattggggatgcaatcagtatatcattcagcgtgcgttggctgccaaatcggtaagtgaggcgcaaaatggtatgttgtttgccggtttcatcaaattgttgattccgttgctggtcgttattccgggcattgcggcatttgctttggatgctcctttggaaaaatcggatgaggcttatccttggctgctgagcaacctgttgcctgtgggagtaaaagggattgcatttgctgctcttacggcagcgattgtcagttcgctggcatcgatgatgaacagtatttccaccatttttacaatggatatctatcgttcctatcttcgtcccaaagccgggcagagtgagttggtgcgtacagggcgttgggcgagttttatttcgttgttgatagcggtgtgcattgctcctttactttcgggattggatcaggcatttcattatattcaggaatttacaggttttgtgagtcccggtgcattggcgatttttcttgccggcttcttttatcggagagcaacggcaaatggagcgctttcggcggcattgggttcatttgtgttctctactttactgaaagttctttgtccggctttgccttggatggatagaatgggaatcgtcttcttgttgtgttgcggtcttattattttgttgggcaaccgtagtcggtcattggaacaatgctccactattcatgcttcattatttcatacaagtaagttgtttaatattttttcttgcatcatcattgccattctgattggtttctattggctttggtggtaaaggaatgctaaccttattcatataattatgataacgataaaacagactttattaatagcaggtgtctgcctgctttcatattcttctttgaatgcggcatccggtgccgtctgttcgggacgaacttatatattaccttcacggttggaaggagtgcggcaacctgtcatgtcattaagtggaacgtggtcatttaagtactctccaaaaagtcggtggactactattcaggtacccggcgaagcggctatgcaggggtttgccatcgaacatgataaaccgttcttttataagaagacatttaccatacctgccgactatgcgggaaagcaaattattttgcgcttcgatggtgtatacagtcatgcaaagttgagtgtaaatggtaagtttgtccgtgagcatcatggtggttttacccgttgggaaactgatattacttcgctggtacgcgtagggaagaagaacgaaatccaattggaagtagaagaccgtttagacgaaatttcttatgcttcaggatacgcacatcatcctatcggcggcatactccgtgatgtcacactgttcgctttgcctgaatctcatttgtatgatgtgagtgtggaaacacatttggattcactttataaagatgccgagttgcgctttgattgtgagtttatcggtaaagaaggtgcggaagcaagattggagttgaaggataaagaagggagaaatgtacagttgccgcaaagtcgttttaagttggcgaaggggaaaaacacgttcttattgcctgtggcaaaccctttgaagtgggatgcggaacatcctaatttatatacgttggaagtggctgtatacagagataacaaggaactttcccgttttgaccgccgcattggtttccgggaagtggagattgtgaaggatcgtatgttggtaaacggtcgtcaggtgaaattgcgtggagcttgtcgtcacgatatacatcctacattagggcgaaccactactgccgacttggatagtctggatgtattgctctttaagcaatctaatatgaactttgtccgtacttcccattatcctccttcggaacgcttcttggagttttgtaaccgttatggcatctatgtggaaagtgagacggctgtttgctttgttgatacttatcggcagaagaattatgctccgggtaatacacagagtgattcggcttataccgaccgttatttgggacaatgtcaggaaatggtgaaagctttccgttctcatccttctgtcttgttttggagtatcggtaacgaaagtgtttatggtacaaatttccaactttgctgggattgggtgaaggctacggataccacgcgtcctgttattttcagttatcccggttcggcagtggaaaagaaagctaaaatatttgatatcctcagtatgcactatcagaatgtatatggcaatatcaatcaatgggggatgtctacccgtaattttcaggggcatggtatacctgcattatatgatgagtgggctcatccggcatgttacacctatgccactctgcagaccgatcctaatatccgtgaattctgggggaaatctattgatatgatgtgggatggcttgtacaatgcgccgggcggattgggaggagctatctgggggtatgtggatgaagtgtttgcattgcctcagcccaaggttggaaccgcattctggaaagagtttgcccgtactgccaaacctgaaaattatcaagggaactgtgtcggatacggagaatggggaattgtagatgtatggagacgtccgaaaccggaattttggtctaccaagaaagcgtattcacctgtgcgtttactggcagatgacaatctttcttttactgccggacaaccactgatgttgactgtatacaatcgttttgaccataccaacttgaatgagataaaagctttttatacttataaaggtatgaaaaaagctttaaggctagaatgtgtagaaccgcatcagaaaggacttttgactattcctgccgagcaatgggaagagggtgagaaattattggtagagttctttacttcagaaggagatttgattgatgcttatcgtcctgtgttgggagtggaaaaggtggactatcctgctgtgattgacggagaaaaactgattgtaaccgataatggtgataaactgatgataagaggagagggttttgaaattcctttcgataaggctacaggattgattgtcaatgctaaagccggcgaacaagtgatcatagaaaaaggtccgttccttaatctttatgtgaacctgaatcatttgacgggtgcagaggttcgtaaaatggccaatcattttacgatttcagattcggactggaaaaaaacatcattcagttacactgagaaagaaaacggaacagtcaaagtagcgcttgtcggcagttacctgggcgttgtagcagagtttgatatattgatatctcctaaaggagagttgtcggttaattatcaaacttccggtgtacccaatggtttcttacgtgagacaggtttgtctttctatttgtcggatgctatccagcacttggattggaagcgtaaagggtattggaattattatccggaaggtgagtttgccggaaatgaaggtcgtacgtccctttatcagtccagacaggctgcatacggcgaacaaccggttcaagcttggcaggctgatacgcacaactattattattgggcagatgccggtgccaattgtaagcagccgcttacacaaatggcaaaaggtatgaaagagaatatttactattattcactttctacggaaacagattccaaacatcgggtatcggttgtttcagaagatgcttctgtggcttgccggataaacaaacgtgccgacgagcaattgattttatacacaaataatcgttgggattatcctgagatagcatggggaaattattgtaagacattggaagctctgccctgctatggacagataaatctgagaatgaaataatcaaataaaagaagtgtgtgtcattctatgatgaagattaatataacaaaaagattgaaccgtttcctggcagtagccggagcaatgcttataggggcattgccggcacttgcccaggaaagttcattgacaagggtcgcagctaatgattgtggtgtacccggtgcacagccttttttggtaaaaggagagaattatacgatgccttcggaggtgaaaggcagtaaggaagctataacctgcaatttcggtggaaaagtgatttatgcttttaatcagttggatattcatgccgactatcagttggaagtggtttatctggctgaccatgaacgtaaacaacgcattgtcgtagatggaaatgaaatccaaaatgtaacgttggaagccggaaaggagcaaagatatttgttggacttaccacgtaaagcttatgcttacagccagttggtattggtgtttgaagttgccgggaaaggtgcaaatgccattgtatccgaattgaatctttattcctccaattctaaagctccggttccttttaaaggaaaagagaaagaggcattgggaaatgtgctgacttatcatattgatacggatgtggatgtggaaaaagtattgccggtttatacggttcttcccaaaagtgttacgggtacttattggcctgttttgtctttgaatggaacatggcagtttaatcctcagcctgaaaaagagttttataaacactcggattcttccggctggaagtctgttattgttcccggtcagtggtcgatgcaaggatttaaggtagactcgatggcgtatgcaggttatcgtaagtcgtttgttttgccggaagattggaaagataagaatgtcaaattacgttttgacggagtgcatagtgaatactatgtttatctaaatggggtaaaagcaggttatcatttagggggggatgactgtatatgaaatagatgtgaccaagcatttaaaaccgggtgttaatgagttggcacttgctgtgagaagtgagtctttggctgatatgctgggcagtctgactcagtatgccgctcatcagttgggaggtattaccagaaaggtgacactgatggctgttcctcaaactcatgtgtcggatgtgcgtattgtgacagatttggacagtgagtatcggaatgcggttctgaagatagagactgctgtagtgaataaggcaacttacgcacagaatggattgacattgcgattgtctgtcaatggtttgcctaatgtcatagagcagcgtcttccgaaactggctgtcggagaggtttggaaggggattctttcggataccgttaccgctccgctgttatggaataatgaacagcctcatctttatacgttgagaatggaactttgtttaaatgacgaagtgatagaaaccgtggagaaacgttttggctttcgtgagatagaagtccgtggaaacgagttgtttgtaaacggatgcgccgttaagttgcggggggtatgccggcatgagatgcaccctttgacggggcgtgtcgtggatgcaatgtggcaacgaaaggatattgaactttatcgtgccgccaattgtaattttgtccgtacttcacattatcctccttgtgaggaaatgctggatatctgtgatgaactgggaatgtttgtcgaagtagaatctccggtttgctgggtgggacatcatgccaatgaaaattggaaaacactcaattatcaggatagccaatactatccttatatactccaggcgaatatggagacgattcatttttatcgtaatcatccttctgtcttgttttggtctatggccaatgagtcttattggaataaagaatttgcccaaatacaagaatatgtgtataaagctgattctactcgtccgcatacgtttcacgaccaggcgtatggaggatttaataatcagggaagtacggctcctattgcaaatattcattatcccggacctgatggctataaggtagctgcacagagcaatcgccccatggtttatggagagtattgccacttgaatgtttataatcgtagtgaactggtgaccgacccgggcatacgcagtgattgggcattggccttggctcccacatgggaaaatatgtatcagacccgaggcgtgttgggcggttctatttggtcgggcattgatgatatcttccaattgcctgacgggaatgctgtcgggtatggagcttggggacctatcgacggctggcgtcgtcccaaaccggaatactgggatatgaagaaaatttatagtccggtcaaagtacttaccgaagctctttccccagccaatgaattggttgtggatgtggagaacagatatacttatctgaatatggatgagataaagattgcttggcaatatggcaaggagaagggaacggtttctgcttccattcctccttcgggagatgggaagatacggattccaatagccaaccccgataaggcaaacgagctttatttgtcgtttactgatcctcgtggatttgttgttgatgaatatctgataccggtaggagaacaaaaacaaaatgagttgcctcaatggttgtcgcagccgactaagctgaaagtcggtaaaaaagcttatgtaatcagtggaaagaacttcagctgtgaaatcagcagattgaatgggcagattttgtctctgaagaaggcaggaaaagaagtattgaaaggaggtccgtggttgatggcacttccgttgaccggaggtggatgctatcccaatcataatgccaatacacctgtttataacgatttatgttcagactggaaggcagtggaagtaaaggcgcataaggaagaaagtaatgtgatagtaactgtaacaggaagctataaggagtttgaaggcagttatcgtttgacagttaatgcgaatggcgaattggtagttgagtatcaatttaaagctttgcagaacgtcaatccgagacaatggggcttggtcttcgaagcaccgcaagactatgaccggacgttttggcgtcgtaagggaatgtggagtgtgtatcctgatgaccacattagccgcccgacaggtactgccgatttattctatcagggtcttcctgtacaaacaaatccgcgaatacaaccttcgtggtcgtggagcaaggattttaatgaattgggcagcaatgactttcgggctacccgccgaaatatttggtatgcaggattgtgtgacggaagcgggcataaagtaacggcttgttcaaatggcgagcagcattggcgttcttggctgggaaaagataaaatctgttttcttgttgccgactttgtgactgccggcaacgaaatgtttttggatggatattatgctccttatcgtaaaccgattaaaagcaatgatataataaaaggtaaagtgaaattaagagtggaataaaacagtatatttagtaccttatattgatagagttttatttattagttccgttttgtacaactcttctttccggcaagttgaatttggaaagaagagttgtttttatctttgtactttacaataatcagcttattaatgtcgtattatgaaagaatcaagtaaactctttgtcttgtttttcttcctttgttctttgatgtttatggggtgtagtcctatacaaaaggagaaacatactttttctattggtgataaaacatttttgttggatggcaagccctttctgataaaagcagccgagatgcattatacccgtattcctgccgagtattgggaacatcgtatacagatgtgtaaggcacttggcatgaataccatttgtatttatgctttttggaacatacacgaacaaaaagagggcgagtttgattttaaagggcagaatgacattgctgcattttgccgtttggcacagaaacatggaatgtacatcatgttgcgtcccggtccttatgtctgttcggagtgggaaatgggcggattgccttggtggttgttgaaaaagaaagatatcaagctccgcaccaatgatgcctatttccttgaaaggacaaaactctttatgaatgagattggtaaggaattggcggatttgcaggtgagccgcggaggaaatatcattatggtacaggtggaaaatgaatacggagcttatgctaccgacaaagaatatatagccaatatacgtgatatagtcaaaggagccggttttaccgatgtacctctgtttcagtgtgactggagttctacttttcagcgtaacggattggatgatttggtttggacaattaatttcggaacaggagccaatattgatgcacagtttaagaagttgcaagaagctcgtccgaatgcacctttgatgtgtagcgagttttggagcggatggttcgaccattgggggcgcaaacacgaaacccgtgatgccgaaacaatggtttcgggtattaaagatatgcttgaccgccatatctctttttctctgtatatgacgcatggaggaactacttttggacattggggaggagcaaatagtcctgcttattctgccatgtgcagttcttatgattatgatgctcccatcagtgaagcgggttgggcgactcctaaatattataagttgcgggagatgatgatgcagtatgccgactctgcacaagtgatacccgatgttccggctgcctatccggtaattgagattcccgaatttgaactgaaggaagtggctccgttatttgacaatctgcccgagccgaagctttcagaggatatcaaaccgatggaacagttcgaccaaggttggggaacgattttatatcgcacttctttgccggaagtgaaagaaggcactactctgttaatagacgaagtacacgattgggcacaagtatatgccgatggtaaattgttgggacgtctggatcgcagacgaggacagaattcattggtgcttccttcgttgcagaaaggtacccgacttgatattctagttgaagcgatggggcgtgttaattttgatgtggctatccatgaccgtaaaggaattacgaacaaggtcgaattgctgaccgagactgataagaaggaattaaagaattgggaagtttatagtttcccggttgattacgactttgcagagtcaaagaaatatgcggaaggtgaaaaacttgatgcacctgcctactatcgtgcaacatttgagttagaccgggtaggggatgtctttctggatatgcaaacgtggggaaaaggaatggtttgggttaatggaaaggcaatgggacgtttttggaaaatcggaccgcaacaaactttgttcatgcccggctgttggctgaagaaaggtaagaatgaaattattgttcttgatttgctgggacctgagaaagcgacggtatcgggattaaagagacctattcttgatatgttacgtgctgaggctcccgccacccatcgcactaaagggcaaaatcttaatctaaagggtgagaagtcggttgctgttggcgaattgacagcaggcaacggttggcaggaagttaaattcggaaaaactgttgcaggacgttatttctgtctggaggcattgagtgcacaagatggaaaagacaatgctgccgtagccgagttctatttgttggatgaaaatggcaagccgcttccccgtcagcattggaagattgaatatgccgatagtgaaagcacaagttggggcaactttactgccgataaaatatatgacttgcaggaatctacctattggagtactcgtgatggggataaatatcctcaccggtttgtaataaacttgggagaagacgtaaaagtatccggtttccgttatctgccgcgtgctgaagagtcgtatccgggtatgataaagaagtataaggcttatgtaaagagtaccccttttaatttctgatccttttttagagtttttataatacaatcttagttctaaaagtaatagtctgcaattgggactattgcaactcctcctatctcgcagaaacgcctgtaatgagaatgcttctgtgaataggaggagtatctgttcacacatgctttctgacggtcagtattattcccccattctgattctgtttcccggcttgcgtgcagtgtctgcgatagtatgtacttcggcttctactttaccttttacaaattcaggaatattatatgagaacatgaagcgtgagtagaaatcagggtcttcttgcgggaggacaaaaggttttcctgtttttccgttttcatcaatatgtaccagatatggacgtgtataaagaccgtcaatgcgccggctgctgaaaacaagccaacggctgttgctgctccatgaatgatagctttccacatcatcactgtttacttcatccatacggtgcatgacacccgaatccaaatctattctatataaatctgcatctttgtgccaaatggaaaagtttccatattcggataacgtgaaaacgagctgttttccatcgggagaaacccgggggaaggaggcacttttgtgttctgctccggttatctggacggtggcttgtttgctgctgtaaagtgtatctacctgatgaccgaaacgtcgggtttcagggtcgaagctgatagaacaaagactgtatttcactgatttgaagtctttgggaatttccttggcttgtgccgagcaaaaataaagtgtttttccgtccggtgagaaagtggggaaagtttcaaaagctttatcggagaatatcagtgagtcggtcactacttcatgcttatttacatcgtataccaccacgtctgaagataagtcatagacttcaatccggtttttatcgttcatgtggaaagcctggcgggtattgttgacggagaaagccacaaaattgcccgaaggatgccatgacggataaaccaatgactgcactttttcaccggcttttgtatccagtttttctacgctttttccatttataatgtaagtacccggcagttcggcacgcatgtggaacagcattttctccgggtcttgccggcagaaggaatggcagttcatacagttatggttggtcaggctgttttcgatgataggggtttgttcataatcggtgatatgacgttggtagattcccattttattccacagttcatatcccggttctatcaatcggtagaccagatattcgtctatcgggtcggcagatacatgccacagaaaagtggggtagctttgccattcgttcttttctcttcgatagacttttacatcaatatcttttccaacggctttgtccagtaatttgttccattctttttccggaaagagaaattgcccgtcggtggaagctgccgttatcatcttttcattgccgcagctgagcacggctattgcttcgtctcccggctccgacaatcggaagcgtaagggagcgatatgtgggggaatggtgacatcggcgtaatcgggaaagatagacggcagttcgtccagtgttacatcggcaaccggttctttagttgtgccggtgcaagccatgcaacagatacaaagcaaaaatatgtggaataagatagcgttcttcatggttgtttcattttttgaacatataataataccagtatgtattaccgaaaccggtatgtagtttgttgggcaatgcagcacttcctctattctgaagtaccgtttgcttgaaggtacggaaacgttctgccacttgtggagtcactcccaatcgagtccacgctgctgtgtctccttcgtgggcaagaatgatggcttcttggaaacttaccggcataggcgacagtcctttggcattatgataagtctctataagttggttaaacggaataatgtctttattcattagacagaatatgcccaagtattcgaatgctgttttacattcggggttagaagcgatgatttggagcaaatcgtagggaactccttctatctgggccaagccgtcggttttggcaatgcagcgtcgtttgaatcccaattcagagtccttgtcaatggcttcatcattgttcaggaatcgttttagagcaactgcctgttctttataagcatgcgtgtcttccagcatgctgatgtattttccggcaacggcatgattgccataaatcaaatttgtcttcaccagtctggttagcagacggggatttacagtccattcggaagaaatcattccttcgaaagccattcgttgggcaagggccacatttcccattgcataataaacatcacttaataaggtggaagctgtggtggaacgattccatgcaatccataaaccgtctgctcctacttgtttgagcgataatgctttgtcggccaaaatacctttttgtgccaatgccagattttggaaacaggcgtgcatggcgtttttatcggaacgaaggggagcagaaaggagtttgtcccattgttcggttctggcgtaataatcgagctcttttactaagtacaatgtgggggagttgtatgtctttgtttcgttgtgcaggaaccatcctgccaggataatctgaagaataggagaggtataggtcatccatttctttttaaatcctttgaattttccgcataggcaggctagtatgaatatgagtaataatgctccccatgcataataaatgataggttgcaatgccaatcggggattgaaataagcatcaggcgagaatacaatgcgcgcttctcctcccaatcctgtctgataccaccaacaagcgggaaaaatacccaaaggaagtaagaggagggagtaccatttgaaagatgatttagtgtagaattcatagaaaatagcacagagtatgaccgcttcgaatgccggacctgcaaagtagaacagcagccatgaggcgatggccatgaatggaatccgaataaagggggaacggatgcggatgtataaattgagtatccacactactgatgcgtaagcaagaataccttccagatgatgattgaaatccatatcggccaataatagcaggatgcccggcatcagataagccaatggcatttccaggttgggagacagctttcgccagatgttctgcacaccgatgccgatgcagagaaacagacaggtcataatcagcggtccgatatgcggatggatgaaatattgaataagaaaagaagcgatgtattctgaaattcctccgggatgggaaaagagttggagggcgtagtcttggttaaaacggaacagacgaaattgttcgatataaaaatagtggaatgcaagttgccgttctaaataaaaaaataaaagcagacttatacctagccaacttattatattaattataatgctcttcttcatcaatgagtttcatttattctgaaagtgtcagattacattaaataagggaggatgtgtcaaaacctctgaaaagttctgatacatcctcccactaaatgtttttttaatatttgttgatagcctctttagccttagtgacaaccgtagcagccggaatctcttccagactgaattcatcgaatgcctttaatattttgtcaatcttcttgattgctgatttatttcctttcttttcgaactcttcctttaagatgcggattttttcgtaagattggataccttcaatcaaacgttcgaaacggatggatgaacgtccttcgggataaatcatataagtgtctccggcagcccatgctgtgaaacggctgtcttgcaaaggatttttaacccaactgtttaaagcccaacggagataaccgtccaaattctctttggcagcaaaccaacctaaccattctgcttcagccggtgcactgaaagtgaaagtattcgggcggggttcggtacaacaagtataatatgtagtaacctgtccggcttctttgcgtgatttaatcacttcggcagggaatttctcgcctatggcgatacaatagtcatgtaattctttcactaattcatcatgataggttcctgctaaagaaactttaaagtctttatcggctttacgaattacttttaatgtggccagcatatctttcatcggacgttcgtccatagagatatgtgtaatgtcgaaccatcctttttctttcagatgtttggcgaaagaggtcagcatgttgccccagaattcatcataagcagcttcgcccggtttggcatccaggtatttgaatgaattgcttgcctggtcgaaatattggaaagaaagtctccaaggcaccattgaatagcaattgatttgtttcttcactcccaatgacatcatatattccacccatttgtcgaatacggtataatcgaaataccaggttccgtccgctttctttaaccaagtcaccatactttcaaaaggatcataagtctgtccgttccaaggcttgtgcatgatagaggcagtgatgacttttccgcctgcgtctacatagttttgcatatcgggacgcatacggtcaaaatgttctttgctgaatggctctacattatagtaacgtgcttcggcatacggattttgccataaatcaaggtggaaagcccactctgtggaagccggtaaagtacggttctttacatttactgctaatttcagttccgataaaactttatccccatcttttacagtaacggtaccggtatattttccggcttttacctgttggggtacacggacactgatccagccgccttgtgttgcattggcgggtactgtcaaagtggaggcgatatggtcgatagggtctgctacaagtgtagagtcataatccgaacttttacggtagccacatccgccttttccgtctttattcaattcgtcggtcatgacataacgtacaaaaccggtacggacattatcttttgaaattgtttctttgccggaggttaagtcactgactataaaagataagttgtcgagtgcttcgggagtccatacaacaagctgtgccgaaactctttcacctttccacgcagtgaggttaatgtctttttttagtcgggcaatcggagcaggttcttcttttttgtatctgatgtctgtgctgccccaactgacttgcggagcacttaccttaacccataaagacgggttggttgaaattggattacttgcttcttcgtagtttgttgaagtctgagcatttaggctgtttattgaaaataaaaaagcgcctagaataatgagttttttcataggttgtgattatttgtttctgcatgcaaaggtaacgtagtgagagttaatatccaaatgagtttctataaatcctgtgaaatatctccatggaataaataaaagaggcggaaaaacaatattgctttccgccttgacgcttctttttatcggcaaaaaatcgttgcaatcataatcctgcaaattttcggtggtcaatgccttgggtggtagcagaagtaacgtggtgcaatggggtaatatccactgaggagacagacacaatctcctttcacgcataacaggacttgaaaccttttattcatgggcattttttgtgaaagcaatttatcagctttcttttgaccgccattaatatggggaaagatagcacgaagctgtactcatgctctcttaaaacatgaataatgcagttgccaccaaacggttgttagatacagaatgagtatcaaccacttttccattggagtggttcagagaaccataccatgcagaagtcagattgtattctactcctaatttccaatgaggaacattgtaagtcagttcggctgttccgctgagcagttggtctacgtttgttcccgttccatacatattggtcacggcatcacttgttccgagatttttcatataaccgaagaaaatagccggtttccatgtcttgccatatacgatattaatccatgaactactgttgcggttaggtgaatattcctgttcgcctgtacgtgggtcaattgattttataccataacctcccaacatagaggtttgtgtaagattggaacctaatacgcttttggcggcaaccaaccatttttcagaattgtatttcatgtgcacttcgtatgacagactggtgatacgttcgctcactttgtatatcttgtcttccacagtggcttgtgtacggggagtcaaagataccatttcgatacctgctcctatcaataaacctttgtgtttatagtcaataccggcatatatttcgggtacgcaactgtttttgatgtacttctgacttttgccttcaggaccttgagacaggtattgtgactgccaaagggctgcacctgttatttgtatatctccggttttgtagcggtagcggatttgcggtgcacggctgaagggctgaaaaggagctcccatattcagatttaatatttggggagcaacatcaccatacaggggatgccatgtttgtcccagtaatagagcagatgtgccccaatccaaattcagataagcatggcgcaggcgaaccaccgaaaatgtagtgcccgaaccacgaaagtccagttctactttggcggaagtttttgcattgcctaatttaggaccttgcacgtccaatcccatccgggtatataaagcatagaaactaccattggctgtcgcgttcaagtctttgccgtcggcatcatatactttgtccttgggatacatatagaaaagcccgtctaccgtttcttcgtttgcccgactgttgtaaaataagtcggtgcggatttggccatagaatttataactaaaatcttttagttgtgcaaaacttgttgttgacgatagcagcaaaattgtgaatagtagtgaatatcttctcataatttatcgagtttgttttaatagcctgcaaaattatataaaaactgagaaaaacgcgaatgaaagagaaggaaatgtcgttgaacctttgtgttacgtgtggctttgattatacttattccttgaaaatttttttgctaccactcaaactttgtacctgtgcttgtcttggaaagaagagatatgggagtgtaggaatgaaaactcaaaaaggagctatgtcaaaactcaaccgggctatcccatcgtcagctgtaggggcagggtctgcccgaatacacaaagcaaactgctttcgggcgggcgaacctcgcccctacgaactaaactacagcattatccgcggtttgacacaactccttttctttattttgtatcagaggatatatactgattattcacctttgatagctgcaactcccggaagaacttttccttcgattgcttccagcaaagcaccaccacctgtagagatgtaagatacttggtcagccataccgaacttgttgatacaagctacagagtcaccaccaccgattaatgagaatgctccgtttttagttgcttttgcaatggcttcagcgatagcacgtgaaccggcagtaaagttgtcaaattcaaatacacctgcaggaccgttccaaaggatagtcttggcattttcgatggcggcagcaaatgatttttgagtttcaggacctgcgtcaagaccttcccatccgtcaggaatgttgttggaaggaacaatctgagtattagcatcgttagagaatgcatcggctgctacacagtcagtacccaataccagatttacacctttggcttttgctttggcaatgatgtcaagtgccaattccagtttatcgtcttcaacgatagagttaccgatttttccaccctgtgctttggcgaaagtgtaagtcataccaccgcaaagaatcaggttgtcaactttgtccatcaagttttcaataataccgattttggtagaaactttagaaccacccatgatagcagtgaaaggacgtttgatgtctttcagaatattatcaacggcctttacttctttctccatcagatagcctaacatcttgtggtcagcatcgaagtaatcagcgataacggcagtagaagcatgtttgcggtgtgcagtaccgaatgcgtcatttatataacagtcggcgtatgaagccaatgtcttggcaaactctttttgagaagctttcatcgctttttttgcatcttcgtatgcaggatcttctttatcaattccgacaggttttccttcttcttcaggatagaaacgcaagttttccaataacaggacttctcccgctttcaaagctgctgcagcatcacttgctttagcacagtccggagcaaattgaacaggtacgcccaatttttcagaaacagcgtctgtaatctggctcaatgagaatttagcattgacttttcctttgggtttacccatgtgtgacatgataatcaaactaccaccatcagccaaaactttcttcagtgtaggaagagcaccacggatacgggtatcgtcagtgattttaccattttcatccaaaggtacattgaagtccacgcggacaatcgcctttttaccggcaaagttgaaattgtcaattgtttgcataatctcttaatttgtttatagtgtataattataatctcgtttattaagggtgtggcaaagttactaatattttttgttcgcagagtgttagagacataatatttttcttcttttttgcagaaagcatatttctaaatataataatgtgtccttgatagccctgttataaagggtgaaatatttttcccgtgttaagattctcataaatagtttattaacgaaagcttatgaacaaaagttaattaaatgtttgactgtaaagagataaaaagtactttcacatgagtgtacaactgaataatagccattaatgcactaattaaaacttctgtatcaacgactaatcagcttgacctgtttttggtattattaagggatatgtgataatgcatatcttatgtctttaaatataaattagatacaatgaagtatttgaacggtgttgctgtctgttgtttgggcagtattctatttttgtcttgtcaagagcaatttgaagaagactctgaaaggcaggagggtcaacagttaccaatgtctgttatagctcaaataggggttatacataatgagccgactccccgttattcgggagaagtggggagtgctatttttgcagaaggtgataaaatcggtatgttcgtggatgataatccggtcacggaatggacttattccttgaaatggacttctccaaaagcttattgggatgatttggtgactgaaagtacattctctgccttttatccatataatgatgcgactactgatagaacaaaagtatgtctgccatctttgaagggacaggatggtagttgggaaaatatccagaagtatgattttatggtggcagaggtgactcaggcttatggagaggatggaaccgttgcttttaccggcaataactcttttcgccatatttcttgtttggtgcaatttgatataaaagctgccggtacattatctgatgcggttctgactaacttgtcgctggaaggtggtaatattatttcttctgctacttattcgtttgagacagaaaaggttactcttacgcaggaaggtgattccgatttgttgagtgtttccttgaataaccattcaatggcggatgaaaaggaaggtgtttcttattatttcatattgaatcagaaaacatccgatactcccgtttcattgacgttggaatattcggttgcaggtaagtcttatgccgcttccatttctacttttgccaaagataatgcatttaaggaaggtactcatcaaaagtataatattgcggtcaatggaaaagaaatacaaataacgggaggggagattggcagctggaatgacggcggagaaatgggggatattaaccttgatgtaaagaccggagatgaagaaaataaataaaggtcagtttcgttttatattgtttttgtcattgtttctgacactgtctttctcgtgtcagcgtgtaatggacgatggagaagaagacgatgtgtcgtcttctgatgggacagcattgaaaataatggcccgttccggcggaaatacatctattgaatatccggtttatctgtatgcttttaatgagaaaggagactgtgcggcaaagcagaagataacttcggaagaggtggaaatgaatctgcagttaccttcgggaaattttaaggtggtggctctttcgggagtatctaaaggatatgtgatgtccgataatcccaaaatcagcgatgtaatcactatgcaagaaggtggttgtgcttcaaaagcaatgatgatgggaatggctgacgtttcattggaaggaaagaataaaacggtgaatcttctgcttacttacatggtggcttctcttaatgttgttctgacaaaagcggataaggttaaacaggtgaaagtaggcatatcgcctttgcattcttctcttaattttgaaggaaaatatggaggtgaggaaaagaaactggaaatagagtgtgcgttagggacagatgggagatggactgcgggacctgtttatatctttcccggttccggctctcaaaccactttgtccatcacgctggacgattcaaaaggaagccacacgtatggatatgtcagtaaagttgttcctcaagccaatcatccttataatataggtggcagctatacaggagatatttctatcgatggaagcctgatagccaaaggttgggaggatgcgatagatgtcgagtttaaatttgaaacggatgaagacagctccaatgatgaagatggggatgaggatatatcgggagttcccgaggttggaagcatttggaatgattgtattgtagccgcttccaataaaagtagcgatggaagtggaacagatttgttactgatgagtttggaagaatgggaaagtcaaatagcaactgcccggtctgttcccgaaggctattctgttcataatataaagaactggcgttttcctacggaacaggaagccaaagcaattagagaccggtttaatggtgacagattgattgatttgaatgagaaaatagaagccaggaaccaagaagagctggaaataacacatgattcggatacgcgctatttatgtgataaagagggtgttttctattcttttcagtttattggcgcaaagagagttacgaaagcgggaaaggataagttttatctgattcgtgtcgttactacccatcacttttcaaaataaggagtacttatgtataatgaatagaggcaggttttaagcctgcccctaccttaaagagtaagattctttttagaaatgataatctacacttaagccgaatactttattggtacgggcatagacatctgttccttttatggttgtgttattgtagttctctgaagttttggtgtaatcatcgtatgttgtccagaaataagcgatgttcaggttcaaatgcgaattcattttgattttggcgccaaagcccagagaataagaatcgcaatagaaacttgtatcagtctggaagttgttggacaatccatagtctgtgttctggtaaccgccactgattgtcagttgtttggtagcatcccattcgataccggccaagtattcattcgcgcctttagtcaagtatttctgtcttccctctgccatgcttgccgatttatcatcatagaaatgatattctacggaagcgcgcagagtgggcaggatttcatatccggcagcaattgttaataaagaaggaatatcactgggagtatttacgccgtctttgtaaggagcaagcagcggctcggcttctaccgggtttacatctatcttgtgtgttttgttttcgatattcatgttggttttaaactcatacttggcagcaaagttccattttccgaacttaacgtctgctccgataatgggagtcagtccccaacctgtctggtcgcagtccagctcaatattggcaagctgagaaccacccagttcgggaatcagtttggcatccagaaaaccttcataacctccgctgaaatagttcatacgccctccggcaaatactgacagccagtcattgattttataacttaatcctaattgcgcaccataaatatattggcgtccgtccatggcactgttaataatatacttatcgggagtcagtcctttggttgcaagcaaccccattgcagcagcactgaacatgggcaaaccgtcatcaaaagaagccttgccgccaccgccggtgatggcaaaactggcagagatagtccaatcgcctttcttgtaagctccgtggaaactggggatgaaaggagcagaagccgtacctttgtaaagacgtgatgtgccttcaccgtcgacagcctgaaataatgggaaagtggaagttatctcacgggtttggtaagcactctgtccggtcaaagaaagataaaatccgtcttcgggcagaaaagacaaacctgccgggttggaataaacaccgtcgatatcgattgaagcaccacgggcaatcattctcagaaaagaagcatgttgatttgtgttagtcaggatacctcctgcaaaagttggatttgaaaccattagcgtcgctgcgccaatcagtagaattttcttcattaattattttgttttttgattttcgggcgcaaaggtaggataaaataacacacaagcaaagggattgtgcaattaattgcgcttttagatgaatatttcaactgtttcagaagaaactatttgaacttgcaataaatggtataacagttattaagtcacgaaacaatgtaaaacagaataaatattcctacctttgtaactcttttaagcaatcaaaaagtaagtatgtatactaacaaagaaatatggaacgtcagttatccgatattcctcggattattggcacaaaacattattaatgtgacagataccgcctttttggggagagtgggtgaagtggaactcggtgcttcggccatgggtggattgttttacatttgcgtttttacgatagcctttggctttagtacaggttcgcagattatgatagcccggcgcaatggagaaggcagattcagagatgtagggcctgttatgatgcaggggtgtgcttttctgttgatattggcggtcggtctttttgggctgactcatgcggctgctccttcgctgatacgcttgcttatttcttcggatgccatattcgatgctaccaaagaatttttgaactggcgtattttcggtttcttttttgcgtttgtcaatgtcatgttccgtgctctttatataggtatcacgcgtacgaaggtactgaccttgaatgccattgtcatggctatggtgaatgtcgtgttggattatgccctgattttcggtcatttcggtttgcctgccttggggttgaaaggggctgccattgcttcggttattgctgaggcctcttcgttggtctttttccttctatatacttgggcaagaatcgacttccgaaaatatgggctgaatcattggccgcgttttgatttcactttgctgggacgcatcttgagcatttcttgttttacgatggtacagtattttttggcaatggcgacctggtttgttttttttgtggctgtagagagattaggacagcgtcaactggccattgcaaatatagtgagaagcatttatgtggtaatgctgatacctgtccagtccttgtctaccaccgccaattcgttagtaagtaacttgattggtgccggaggggtgagtcacgtcatgcaactgatggggcgtattgcccgtatgtcttttattattatggtggtatgtgttgctgttctggttgtgtttccgcaggcaatgctttctgtttataccaatgaggaggctttgctgatagagtctgtaccttctctttatgtcataggaggtgccatgctgattgcatcggttgccaatatttattttaatggtatttcgggcacgggcaacacacaggctgccttgatacttgagactgtgactcttgtcatttatacttcctatatcttttggataggatatattgtgaaagctcccgtatctgtctgtttctccaccgaagtaatttactatgctctgttattgatttgcagcgttatttacttgaaaaaagcaaaatggcagaataaaaagatatgaggtaattaacttttttgtatttttgcacctcaaaagctgtttaaggttagtgattaaagttcagtaacttataattcataatccgtaatttataattaaagatatatgttcgataatttaagtgagagactggaacggtcttttaaaatcctgaaaggtgaaggaaaaatcaccgaaatcaatgtcgcagagactctgaaagatgttcgtaaagcgttgcttgatgccgacgtcaactataaggtagccaagagttttacagatacggtgaaagagaaagcgctgggacagaatgtgttgacagctgtcaagcctagccagttgatggtaaagatagtgcatgatgagctgactgcgttgatgggtggcgaaacagccgaactggaattgaacggtcgtcctgcaatcatcttgatgtcgggtttgcaaggttcgggtaagacaactttctccggtaagctggcacgtatgctcaaggcgaagaagaaccgtaaacctttgttggtggcctgcgacgtctatcgtcctgctgctgtcgatcagttgactgttttgggagaacaaatcgaagtccccgtatatagcgaaccgggcagcaaagacccggtgcagattgcactgaacgctattcacgaggcaaaggcaaaaggttatgacctggtgattgtcgatacagccggacgtttggctatcgacgaacagatgatgaacgaaattgaagccattaagaaagctatcaatcccgatgaaacgttatttgttgttgattcaatgaccggtcaggatgccgtaaatactgcccgcgagttcaatgaacgtcttgatttcaatggtgtcgtactcactaagttggatggtgatacccgtggcggtgctgccctctctattcgtacggtagtaaacaagccgattaagtttgtcggtacaggtgaaaagctggatgctatcgaccagttccatccggcacgtatggcagaccgtatcctcggtatgggtgatatcgtatcattggtagaacgtgcacaggagcaatacgatgaagaagaagccaagcgtcttcagaagaagattcagaagaaccagttcgacttcaacgacttcctggctcagattcaccagataaagaagatgggtaacctgaaagaactggcttctatgattccgggtgtgggcaaggcaatcaaggatatcgacatcgatgacaatgctttcaagagtatcgaggctattatctattccatgactccggaggaacgtacacatcccgaggttctgaacggaacacgccgtacacgtattgccaagggtagcggtaccactattcaggaagtaaaccgtctgctgaaacagttcgaccagacgcgcaagatgatgaagatggtcacaagcagcaagatgggtaagatgatgccgaagatgaagaagtaataccttatatataaggaaaggaggaagtgcaaaactttctcctttttttattatgccgactgactgatttatactacatttgttggaaagaatcatttaacaaagagattatgcaattaattgacggaaaagccatttcggaacaggtgaagcaggaaatagctgctgaagttgccgaaatcgtagccaaaggaggcaagcgtcctcacttggcagctatcctcgtcggccatgacggaggaagtgaaacatacgtggcagccaaggtaaaggcttgcgaagtatgcggttttaaatcgagcctcattcgctatgaggctgatgtgacggaagaagagttgttggctaaagtcagagaactgaatgaagatgccgatgtagacggctttatcgttcaacttccattgccaaagcacatatcggaacaaaaggtgattgagaccatcgactatcgtaaagacgtggacggttttcatcccatcaatgtgggacgtatgtcaatcggacttccttgttatgtatcggctaccccgaacggaatcctcgaactgctgaaacgctatcacatcgaaacgcaaggtaaaaagtgcgtagtgttgggccgtagcaacattgtaggcaagccgatggcagccctgatgatgcagaaatcttatccgggtgatgctacagtaacggtttgccatagccgtagcaaggatttggttaaagaatgtcaggaagcggatatcatcattgctgctctcggtcagcccaactttgtaaaagccgacatggtgaaagagggggctgtgataatcgatgtgggtactacgcgtgtgccggatgcaagtaagaagtcgggctttaagctcacaggagatgtgaagtttgacgaagtggctccgaaatgttcttatattactcccgtgccgggaggggtagggccgatgaccatcgtttcgttaatgaaaaacacattgttagccggtaaaaaagctatttataagtaaaggatattgctttaatgaaccgaaatgccgagggtgtgtcaggatgatggcttgttttcatgttgatacaccttcgtgttttcggatgcaacagccgatgtggaagataaatccctcatcgctgcttactgtaagaaagggagggttaagtcgttgcttactatcggttaagagctcctgagcggaagagtgctacgtcctactgtaacaggacgtacgtcccattgcagtaggacgtacgttccattgcagcaggatatacgtcccattgcagtaggacgtaataaacaaacttacagaaaggcttgatctaaaggacgaaaaggcttagaataccaaagtcgttgtctttgatattgtacagggatgataaaattaaaaaataaagaaatgaagaatgtggttatattgttgttcgctctagtgttaataacttcatgtggcggacaaaagaaacaggaagaaaaggaagtccggaatgttcagttaaagggagaagagatgcctgttgatacagccctgttccgatatgcataccgaattagggtacaaggagataaagccgtagtctttgatcttcataatgtggattattattatcatgctttcacatatcccggctttaagtatatttcctctttcggtaaacggggtgagggtcctgaggagatgatttcggctgaaaatattcgttggggaggagataatacagcatgggtgttggatggctcaaagaatcgtttgtttcgatatggcggcattgcaccgggacaagaaccgaaactggaggaaaacatttcgttggacaaggcgttcatgcgtcctttagactttgatttatcgggtgcggattcctttgttattcccgattattcgggagaaaaccgctttagttgggcagacatgtcggggaacttattgcataagtccgactgtataccaataactgacgagaaacaattgaaagaaagcgcacctgctgtggcacaaggctggcgtagctttatttcgtttagcccggataagaaacttttggtgacagtaactcaattgggagatgtgcttgatatttataatatggagaacggccgacacatcaactataagggagaagatggtgaaccggagtttcatgtcacttcagaaggatatggcattccggccggacggatgtgttattatgatgttcaagtgacagagcattatatttatgccatttatgatggacgcaagtttagtgatatcatgaaggaaaaggaatataagcagggtgcaaaacagcttcgggtgtttgactttgatggaaagctgcgtaaggaatacatgctggaccgtccggttacgggtatctatgtagacgaagccggccattgtttatgggcaacggatgtaaatacggataatcagatagtgaagtatatatttgattagctatggttgggttactttggagtcgatgggttttaagaacagtttaaaacccttgcctcttactgtcgcaatgtcgtaaggagaatttcttaaagcttcacggatgtgcttgatgtgtgtatcaattctgctatttacatctgccgcttcgtttccccatactttttcttttatctcttcacgactgatgtattctttgtcccgcccatcgtataaaagttgtagtatctgaaggctacggggctgaatttgacatggtgttttatttatatataattttttgtcagggctgacgtaccaaccatcggggatggagtcatttatcataacagaggaaggcgctttaggaaagcaatactgttttttgataagggtaatcaatagaaagacaattgcacctgctaataaaataataagcagaaaattataaaatggagtctgtttaatgagcagaggcaaccagtcatagtctatccatgcgcttacatgatatgtttttgcgatatctaaagcatagaaaggagtttgataacttgccgaatgatatgataaagagtctttattgctgtaggtatatgtgttgggcgaacgatatacgatgccggtttttccatctatggaatgtcgtttcattccttcttgaagtttcttgttgacgttatcaggaataagaggattaagacggcccatgacatactcttctgttaacctacatgctgcttctgaatctacgctgtccttaaatgtatagatagtcttaccggtcgctgtctttatataggtttgctttactttgtttttccctttctggctcgatacgagtggaagtttcccggatcttgtgtgataatcatcaacgattacttcctttaggacaccatttatttcaccattcgttttttggagtgtgctattaaacgaatgcattatcattactatttcagctgtaatacatattacaagagggatgtaccggttgattttctttttcatattccattctttattatccgcaaaggtaatataaattattgtttttgggactttcttggtcaaaaacagcctgatggaattctgaacttttctgaactttctgaattatcatggagttcagaaaactattgacgaaaacccttggattattgatttatctcccatacctttggcatcgttttaaaaagaaatgtattatgagaaacatttgaccaatgagggcaacaatctgct

SEQ ID NO: 6778 - DNA, 12487 bp, Unknown
  gut microbiota DNA sequence
acctgtccgtcccggcgcgccattggaactgacagtgacgtatgaggcagaagaaaaaggtcatttcaataagatgataaccgtatattgcaacacaaaggcatctccgcttcggctaatgatagcagggaatgccaaataaatagagtttaatttagagaaacccttccttcccttgggtttctccttaaagaaaggaggattagtccgatgcaaacttaatggaaataatcagaatctgcaagtaatgtatttgctttttctgcggtggagttctttccgacaaaagatgaaaacaacttttattaatcatcgaaacatagaaaagagatgaaaaagaatattttgaaagcaacactggttgctgcatttggtttgatagcaggatttaatgtgtataactctcaaaagtcggatgtgatgtctgacttggctttagctaatgtggaagcattggctaccggagaagacgattggtcataccgtttatttccgtgtgcacacaaaccttggaacgaatgtgttttaagtacagatacacgtcgtgatccctgttcttcatcgtcttattgctaaaaaataaagccaaagggatattaaaacttaataaagatggtttgaatattcttttggcttaaattaaatttattatgagattattttttttaatatttctagccatggtaagttgtgatcatcagcgtaccacacaaccccatcatataaaagattctcttgcatatgatatagagtcaatcaagataattccttctaatgatattttagaacttaaatcctaccatataacttctccttttagttgtcaaaatatagatggaattatcgcatataattatcgtttacattcattagacttaatagatttatataatcacaaagagatatcatctataccattacaaagagaagggcctgatggaataccaggaagagtagctggaatatttcctttatcaaaagattctatttgggtttatgatggaatttatatgtatctattaaatagtgcgggtagagtaaacgaaaaaattactttagaggatagagaatctttaattataaatactaattacgctatgaatacagctaagttctcttataacccaaaacgacattcattgttgtatttaactagaaaagacgattttatagtagaagaatatgatataaaaaaaagaaaaataattaagacatacccactttcatattcaataataaatccaaaaggatctttgctatatgcagatatggatgcacctaatgttaattttgtagacaataaaataatctataattatccatacgaatctacaatatatctattagacatggattccggaaaacaattattgatagatgccccaagttgctatacttcaaataaagcacagacgtgcaatgctaatgggtattcaatttgggagagacaccgaatcgaaaatgtacacttttacgatattatgtatttaccggaatgtaaaacatatattcgattacacataggtggaattgatttttcagaaaaagagtctgtgcaaacattacttgatagtagacctatttacatgatggcttttgataaagattttaatattatgggcgaaagtaaactagcaggaaaacgatatagttgctttacaggatggtgtgcattgaaaaattctgtattgttattcaatgaaaacagcttatcggattccattagttatgaaaccttgaatgtagatattatcagctccattagaggtctttaatatcctctatgattaaatgcactgtaggggaagtagagttggaaaagtattaaattcgagtatgctcaataaataaagtttaatttagagaaaccctgcctagagccttgggtttctcctttaaagaaaagaggattagtccgatgcaaacttaatggaaataatcagaatctgcaagtcatgtatttgctttttctgcggtggagttctttccgacaaaagatgaagacaagattaatgaatcatcgaaacatataaaagagatgaaaaagaatattttgaaagcaacagttgttgctgcattcggtttgatagtaggatttaatgtgtataactctcagaagtcggatgtgatgtctgagttggctttggctaatgtggaagcattggctgatgacggtgagacacttactcccacagaatgtccgggtggaagacatctttgtcaatggataatatacccaggcggttctgttacctactatgacagaaacggagaagatactatttagtttggaaaaaaaacactggattggaactgactaaaattagtgaatgatttgaactcgttttttatctaataccaagaatttatgaatatcaaaattatattattaggattgtttactttaagttttgttcaatgtaccactcgtacaacggatacaactataggatataagttttccaatcaagagacgttggtatttgaggatatagattatcctgaaatactaggtgatatcatgcagattattaaaatagatagccttttgctgataaatgattattatggagattctttacttactgtgttcaatcttaatagtaataaagtagaaagaaaattattggggcagggagagggccccaatgaactaatatccccattagaagttcttttgtcgaataataatttatggattttaagtcgtcctattcatcagttaaatcatctatcaacacagtctattcataaaaccccaaaactggtaagagatctgcaagttaaaacagaggcggattgtttcgttccattaaccgatactcaatttgtgttgtccggtttttggaagaaacgatatgcgtggatgaacttacaaaaaagtgatgagttaatagagtttggtgaattcccggacttctgggaggcagaaaaagatattccacacttatctaaagctatgtttcatcaatgccattttgcagtaaatcctcaaaaacatttatttgcttcatgctcttattttgttttggaaatctatgaatatgacccgtcaggtaaaaaatgtccgacactgaaatttaaaaagcaacttggaaaatatcaatataaattcagtactgacgaacatgttgtcttcgcaaagatgaaagaaggatgcgacccggtctctgtcgacatagtgggcacggaaaatcatatttatctcttgactcaagacccggaacagagaaagcaaaggaatattctagtccttgactggaaaggaaatcctgtgaagttactgaaaacagggcaacgagtaatgtgttttgccgttgatgaagagaaccaaatgggatatggaattattcaggacccggaagataagcttgtatcatttaaatacaatctgtgaaaatttacgcaatagcttaatttaaaaaacaaaaagagatgaaaaagaatattttgaaagtaacactggttgccgcatttgctctgatagcaggatttaatgtgtataactctcagaaaccggatgcgatgtctgagttggctttggctaatgtggaagcattggctagtaatggtgaaagtgaaggaataaattggagaggatactacttagacctcgataatagttgctgtaaaataggacgttattctgatgagtgttctggaaaatatactacctgtggagattaattaatatataaaagaatatgaagaaatataattggattatatacttttttattttattgccatcttgtattggtattaaaaatcagaatagtgtggaaatagatttaagtaagactgttccttccattaaatattccacgtttgtgaaaaatatagaatatgtggacttgcatttgaatgacagtttaccaatatatggagttgaaaatctttatttagacgaaaacaaaatatttatcaaagatcggaaatcagaaggtattcttatttttgatgctatcacaggtaaacttttaaagcggataaaccagtataaggaaggaccggaagaaatcaagataattggagctttttgtttggatacctataataaacagctctgtattttcgataaaggtgatatgaaaataaaattgtatgattattcaggcgattatatttcttcgtatgttgtttcagacttttttatagatatggctaaattggataaaaatagtatgacttatttttatccaatttatactgataatgagcaaaaggaaggtatttggactttaaattctttagataagacagttatacatttagattctagtataacagaaaattgccgactacattatttcccaatgttatataataacaatggttctatggtttattattatgatagaaaccgggataaactttcattagtgacatttgacaaaatggagaatatgtatagttttgatatacgtcaaagaattccaattgaaaagatgggtttaaaagatattactccccaaatactggatggttattccattctacataattttgcctgttcggaaaattatttgttactttcttttcaaacttttgataagcagaatatagcaaagaaaaatataaaatgggttctattggatagaaaaactgaagaaataattatttcggaacatttagacaacgatatggcacaagaggttatagacaatcatcttcttttttatttagatgatcatacatggattaaagtagatgatatgaccaatgactacttaataagattacaattattacatttaaaataatacctttgctgttcatgttgtattaggtagcattaaggaagtaggtgcttattgtggctattttatagacacaaaaggtagcggtataaaagtctattacaaatagagaagaacgagaaagggaaaaataaacttttcctctgttgtttatatattcttctaggcaaggtgatttttatgcgatatcgcagtctgaagatttagactataacattatagttcttaatttggattgatcaatgaaagcagacgataaaggagaattctcttctgcaattagcaaatggattgtttgctttttctgcggtggagttctttccgacaaaagatgaaaacaacttttattaatcatcgaaacatagaaaagagatgaaaaagaatattttgaaagcaacactggttgctgcattcggtttgatagcaggatttaatgtgtataactctcaaaagtcggatgtgatgtctgatttggccttagctaatgtggaagcattggctagcggtgaaattgatgtgaacacctcttatggatatggcctaagagattgtaaagattcagatggaaatcttacgggcaagcgttgcgaactgacgcatccttatgatacttgcaataacaaattaacatggggaaactgccgctaattatgtatagatgtatattcatgttccttttgttgtgcacaagttgtgtagaacaaaaggatactacttcaatcaagatagatttgatggcaacagatagtgataccctgtattattcctcatttgttgactccttgagttatataccattggaaacaaaagatgattgtttaataagggagataacggatgctatcctgaccaatcaatacatcttcattttagacaccccacaacagtccgtctggatatatagcacaaaagggaaattcatacgctcacttcatcatcagggtaacggtcccggagaatatataaacctgatacagtttgaatatgatgccaacaacagggaactgttattattggacggctggaataaatccatcctgcgatattcccctgatgataaattcattgataaaacagtacttgatatatatccctcagatttcaagaagaccgctgatggatatctattatcaatgttgggagccccggacagcattggaggagtctattcttattcttcgcagaatcataagtcgacgcaattaataaaacgaacctacaatttgccatgcaattttaattgggaattaatgggttatgacaacgagataactttcatggcacctccttttgataatatagtttacagttatgataagaaaggagcattaagacaacaaataccttttaaaatctatccacttcctacacaatcctatacagaagatgtttccacccaacatttgcccgatttcattcggacaaattatatagaaagttcccattggttgtacgcaacatattggcgtgcggaatcaggtttaagagtgtttttatacaataaacaaaatggagatcttcaaatagggaaacgtttggtgaatgatattgacagagttaaatatacctatatgacttcgtcctgcaatcacaaccgatttgtctttggatacaggaaagaagagaatacggatgacaatccgatattacagatattacatcttaagaattagatatgcattgcgtcagccaccgtttcttcgcttggtattatttcaaggcaaagaagccagaaacttatataaaggctactcgtcgcttaaataagatgttgtattgcaatacaaagacatccccgcttcggttaatgatagcagggaatgccaaataaatagagtttaatttagagaaacccttccttcccttgggtttcttcttaaagaaaggaggattagtccgatgcaaacttaatggaaataatcagaatctgcaagtcatgtatttgctttttctgcggtggagttctttccgataaaagatgaaaacaacttttattaatcatcgaaacatagaaaagagatgaaaaagaatattttaaaagcaacactggttgctgcatttgctttgatagtaggatttaatgtgtataactctcagaaatcggatgtgatgtctgagttggctttggctaatgtggaagcattggctgaatcagaattaagccaaaagtgtggtgactgcagtactgataaataggtatattgttgtactctagttatagaaggattaggtacatttacacttaataaagattaatcccattaaataaaaggagagatttaaaaaagttaggtctctcttataataaaagtaccatgaaactcatatataaacacatattatttttgcttttattgctgtgtatttcttgtacaagtgtatcaaacaataaaataatgtttccaacaaaaaactttaagacaataaagggaaaacaaattttatcagatttgtttattggacggcctttaaaaatgaatattgtggataataagctcttaatgatagataaatatgaaggtaaacaaataacgatgattgatttgataaataccaataaaatcgaacgtattgctaatattggagaagggccaaatgaatttcttaatttaagagatataacttataattcaaaaaataactcattggctttttttgatggaatgctaagacaagtttctttctataaaattaatgagcataagattcaaataaataataatacttttcatcgtaaagtgcgatttaatgcagattgtccctatgatattgttgcgtttggggattattttttagcaaatggatgttttaatgcaaaacaatttgctttattgaattctaaagcggatattattgcggaatttggtgtttttcccggagataataccggtgtggaagttgaaaatagtttttttctaaaaaaccaaacgactctctgtactaatttagatcaatctcgatttgttgctgcgggatatttccatgaccaactcgtcttttatcgatttgaaaataataaaattataaaggtgagagagtattttagcatgaatgctaaaatggtttcaaggcatactaaagatgggaatcaagatatctatagctcatcagaaaatgacgaaacaacacgaacttacagaatgctatattcaacaaaagagcatatttatgctttatattggggtattgccaataaagattttgggaaaacaggaaaggtttgttacatcttaaagtttgattggaatgggaacttaaaagaaggtttcaaagttaataatttattaaaaaatattgcaatagatgaaatctcaaattgcatatacgctgtaacgtatccagaagatgagagggaatccattttaatgaagtatgagatgtgattgataatataaatttaagaataaaatattagctaaaataggtaatcgggccttttcttttatctttgtgttttggtaattttatggttcttctttcaggtcaccactttcaccaccttccatattccttccgactccatgtatcccgctttacaggcaggcaataatgtgttggtgaacaaatggataatgggaacccgcatcttcaatatctgggatgcattggaaggcaaggaggtgaagattcaccggttgccgggagatacgctggaaataaggaacggattctataggatacgcgggatagaggaaaaattaggcaaaaccacatgcggaactgggaggttatcaacgacaaaaactggaataggatgcaaagatgataatggaaaaagaaccgaaaatacaatccacagcaataaaacagatgagagaggaaataaagaagctggttatcaaggaataaaatattcttttactatatttgcattctcatgcacattaggggaaaagctatttctatataatcttactttttaataaatagtcgacaaagagtatgcatatatggaaataatcagaatctgcaagtcatgtatttgctttttctgcggtggagttctttccgacaaaagatgaaaacaacttttattaatcatcgaaacatagaaaagagatgaaaaagaatattttgaaagcaacattggttgctgcatttgctctgatagcaggatttaatgtgtataactctcagaagtcggatgtgatgtctgagttggctttagctaatgtggaagcattggctgatgatggtgaaaacccaatgtgcgaaaatggttgtttggataatggtgatggttgtttatgccattactggtttccgacttatagagaagcaaatctataaaaagaggaattaatagccgaacagcttgattgaattccctaaaagtaaaaacgaaggagaaaaatagaatttgtgataattgaatcttatcctaatttttgcttttctctttttaaaagcaaatacttatgttaagaaaaatagcaaacatattatttattgtgttagccataaccggttgcactaataatgcgacaaccgaaaaacaccagacagttcgtaacaaaatagaaaactgttatcagaaagtaaaagaattccagactggcgatattttgataggctctacaacacgtttatattctatggataatcatctgattattgcagaccataaatcctcaaaccagcttattcatatttttaacatgcaggattttacttacgtgcaaagtataggagaattgggacaaggacctggtgaaattacaattcttggaaatattggcatagacaatatacataagaatttatatatatccgactatggaaaacaaaaaatattcagttacaatgtggatagtgcgtttgctaattctttctatataccaaacgtgaaaatggagatggataaaggaatattcccagatgtatatcaatttttcagcgatacgttggctataggcagaatgatttcccctaccagttcttcttctttcaaacaaatgttggcacgtcttaatatgcaaacaggtaaaatacttcctttgaaagaaaaccatcctgaaatagaaaataaacgtgtttgctttgctgcttcagaaactaaaaacatctgcgtggagtgctatacaggctatgatttaatggtaataactgatataatgggaaatttgaaatataatatttatgggccggaatggaaagaagagccgactgcaactcattactatagtaaagtagcattagccaaagataagattatcgcttcatattcaggtggtaacaagcataccgatgattattatcctacaaaattttttgttttcgataccgagggaaactatcttaaaactttagatataaatcggaaaatagcagacttctgttatgatgacaacaacaatagaattatcatgtcgttcaatgatgatatacagttcggatatttagagttgaatggtctaatttaattataaatattttagagcatatactataaagaattggaataaatggcaggcaggctattaatcacacggcgttctaacaggagcatgtctcttctgtcagaagggggggggctaaaagatgaagacaaacttaaataattattaaaaaatagaaaagagataaaaaagaatgttttgaaagcaacactggttgctgcgtttgctttgatagcaggatttaatgtgtataactctaaaaaggcagaaccaatgtcggaattggctttggcgaatgtcgaagcgttagcaagattggaacagcctaatgtagatgattgtattagtgatcctgattatgattgtgaagcattacatccgacagacccttcaaaagataagcgtagacagcaagctagatggtagctgaattttattttggatatgtaatcctttaaaatatttatcacatatttaatacacataggggtggagtgatttttaattaaataagtaacgtgtttatatttaatcagtcactctacccttacgttaaaacaacgataaaatggaagcgaaaaattataaggtattattattcctgttattaattgtattatgtagctcttgcaatgaaaagcctgtaggtgttaactcctttgacattgttgaaaaggtagttgtttatgatagcatttttgctgacaaagatgtacctttaggaagtgtaagggatatgagtatagctaataatatattagtattaaggcatataaatgatgattaccaattttcgtttattgatgttgcaaaaaggaaaatggtatctaggtgggggaccgttggagaaggtcctgatgaatttattgattttgggtcagatttttttgtgagagattctttgttggtcttcttaacttctgccaaaaaagaaataaattatgtttctttgcctgatattttgagccataggcagtcaataagcataaggaaagaaaaatatccgtataatgtagattttagacctcggaaaatctgtccagtgaacgataagaaaattgctattggttcttttagtaaaggcttatttggtattttggatgcaaacaacgagataattgacacttcctttgatttaccttttttatgcgatgaagtacaaaatatagataagggaagtatttttcagtctttggcaggttcaaataatagaaaaaataggtttgtactttcaatattgtcatcagatatatttgaaatatatgagatgacagacactggtgtatacaagatatatacatctacttttcaacatgtgccacagatatggaaaaagggagagcgttatgctatagattatgataaaagcattgcaggtttgatgaaaatggcagtgtctaatgagtttatttgttttacttattcttctcaaagttacactgaagcaagtaaatcaggtaaagtatctaatgaagtattgtgttttgactggaatggtgagaaaattaaaaaatacattttgccattttctataagtaatatttgcttggataataattatatttacgctatccggtatgttgatgatgaaacggttatctatcgttttaaattgtaaaaactctaaagttttaaaggttggagacttaaaagagcagacattcagagaggagctaatagattacatttcaaagaaaaatcatgggaataagaaagaataaaaagaaattttagttgtaacatttgttctgattagaagatataatgtttacaacctttagagactgaagcaatgtctggcttggtaatattggttatataaaatattttccaccaaaacgcttcatacttctttcaaatcgtttacagataaaaatttatgagaactaatatctatttaattgttatattatccactatctgttttagttcgtgctaccgggaaaaggatttgaagtattccctgaatgccgcaggcaagaaccgaatagagctggaaaaagtactggaacattataaggatagtggtcctaaatatgatgctgcatgttttctcataaagaatatgccgggatattattcgtatgcaaaaagttccggcctggacagtttgagaaaaatacaatccgtcatattccataaaaaacattttcctcgtgatttgcaagacagatggagtaagttctcctacaagagcacacccaaggtgtatgactgtcacgctataaaggctgagtatttaattgaaaatatagacttggcctttgctgcctggcagaagagaccgtggcggcactctctttcatttgacgagttctgtgaatggat

SEQ ID NO: 6779 - DNA, 46817 bp, Unknown
  gut microbiota DNA sequence
gttttttagagaaaaagtgctcttcttattgagaaaataggcgggacgggagaatagaataactgggttagaccgttcgattacaggcatctatgtggatggggtaattcattgcttgttggcaacggatgtaaatacggataatcagatagtgaagtatatatttgattagctatggttgggttgctttggagtcgatgggttttaagaacagtttaaaacccttgcctcttactgttgcaatgtcgtaaggagaatttcttaaagcttcacggatgtgcttgatgtgtggtaagcatccgataaagtacacattgtattttcataaaatagaaaactcgatatcaactttagtcaaaaggaggttgactccttgagttatataccattggaaaccggccaccgtttcttcgcttggtattatttcaaagcaaagaagccggatgcttatataaagtcgatggctacccatcgcttaaataagatgtttgtatgggaacacacgctacaaacatttgaagcagtttctaagcctattcaaaattttctcaacaataatcttataatggtcaacttgaccaacggaaccgtttttacatagattggaattgacaaccaattgatagccggcacctcttattctttttattttatattgcggataatcttgtaatactttccttaacctattaatacttgagtcaactcttctatccaaattcatttcgcccaatgtctcgtactcatttgtccacagtcctttttttatttcgtccctagaaacaaaatgttcagttcctttctgaaaaagcagtaacagttgaaaagcttgcttggaaatatccaactcttttgagcccatatatgcttttgtcttattcgtatccaaaattatatcttccaatcgaatattcccttctgccgcttctccttcactctccgacgctttaacttcggcagcaataaaattatcttttgcattaaatttcttgttcttatagtaggtatatatgagtattaataaggcccctaatcctaatacacaaactacatagaatataatcaataggggtatatattttattattgtccaaatattgtaattcacccatgcctgcacactgacagtttctcttgcatccagaaattgtatcgttgtgcaatatgccgttcggggagaaagagaatcattattactatactgggtctgtcccttatatcgataaataattcccattgaatccgttatgccattctttttcatcttttcattaaagacagccataaatgtatccggatttataggagagtactccgccaagaggtattgggtcactaattgattagccctatgttcatctatactatctttaaaagaaaaagtctctactcctttttctgtctctatttgataatttttaatcttccttcctcctggtcgagaatagattggttccgtattgcttctgacatgataatcctctattatagtttcttgcaaaacgcgttcagccaacatgtggatatcctcttctgcagacggaactaaaaaatagaaaatgccaattattccaatcacgattagaataattaatccaattgtacttttgaatcttgcagccatacttttttctgcaaagataacaaaaataaaaatatggataaaaacataataaaaaagagatgattgtagatgtaatatatctattcatagcatcggtgaggtttccataaggtttcggcaagataaatataaggctttcgtaaggtaaatgtgaggtattctatgctttaaatttaaaaataaaaacctaattttacctctaactaataagatagaaagtatgaaaaagaaaatgatcatttcatttattgttgtagcaacagtaatgagttttataggttcttcctattctaataataatactaatgatttactattagataatatagaagcattggcaaatggagaacaggaaaatggtataacatgtataggagaaggaacggtagattgccctattggtatcaaagtaagagcagtaatcaaatattatagtttagaataatacatgaaacacatttatttattgttttttctctgtttattatgttcttgcaaggaatcagaaaaagagaaaattgctcgtttggtgagggaatgggatgggaaagagatttcctttccttcccattcagttttcaccattcaagggaaagacacggttgatttttctttcgcagatgctgagtataagataattacttatatagactctgtaggttgcaccagttgcaagttgcaattacctcgttggaaggaattcatgcacgaagtagattcattggctcaggggaaagtgccctttgtgttctatttccaccccaaggatgtaaaagagttgcgttacattacccggagggatgccttcacttatccggtttgtttcgatgaaaaggacgattttaatgcattaaaccgttttcccggtgaaatgacatttcaatcttttttattaaaccgggaaaataaagtgatagcgataggcaacccggttcataacccgaaggtgaaagaactctatctgcagagattgaccaatggcaaaatgccttcttcggcagttgccatgacagacgtttccgtcaatacggccaatatggatttcgggacttttccacaatcggaaaagcaggaatacaagtttgtattgaccaatgaaggcaacaatctgctggtcattcaggatgtcactacatcttgcggttgcaccaaggtgagttacagcaaggaacctgtccgtcccggcgcgtcattggaactgacagtgacgtatgaggcagaagaaaaaggtcatttcaataagatgataaccgtgtattgcaatacaaaggcatccccgcttcggttaatgatagcagggaatgcaaaataaatagagtttaatttagagaaacccttccttcccttgggtttctccttaaagaaaggaggattagtccgatgcaaacttaatggaaataatcagaatctgcaagtcatgtatttgctttttctgcggtggagttctttccgacaaaagatgaaaacaattttaattaatcatcgaaacatataaaagagatgaaaaagaatattttgaaagcaacagttgttgctgcatttgctttgatagcaggatttaatgtgtataactctcagaaatcggatgtgatgtctgagttagctttagctaatgtggaagcattggctgatgacgaatctgtaactgttgaatgcccaggaggtactgatgaatgtgctagagttctagttggtaatacagtacatttgttttataaaaaataaaatattgggctctcaatgcgaatgattttatttttataaatgaattcctaggcaaaaacaaagaatataatttctttctattgattttgcctaggatattgaagaaattatatgaagtatatttatctattatttctattctgtttgttcgggtgtactcggactacgaataaacaatcaaatattaaaaatatatatttagagcaatcaaatattcaggattttataggtcttcctattcaattaaccaccttggattcagtattgtttattaatgacttttatggagattccttaattcactgcatttcattaaaagataataaaccaatagccaagttgggagtgaaaggcagtggtcccaatgaagttttgtctccattgtatatatttatcaaagaggattctttgtttatgttttcacgtcctcaatggacattatataatattgacttgcagggtggtaaagtcaaaaaaaagattacagtacctatggaagtaagtttgttgtttccatttcaggataatctttacttttgttcaggtatgtttgatgataaacgtttttggattctcaattctttgggagagaaagtagctgcattgggtgattatcccctactttggaacgaggaagcccatatcccactagcagtaagaagaatgtttcatcaagtacgaggatatggttattcaaggacaaaaggagttgctgtaactgattctcatgtcctagatttatacaataagaatcacaaaggagagtatattctcaaaaaagaggtgttgctatcggcttatgaatatgattttacggataaaggtatatccagccagacacaattaaggtcttcgttcatgaaaggtgccataaatcttgctgtaaccgatgattacatttatatattatttgatgtaaattcgcaagagaacctgaaacgtttgaataatgagatttggaaatttgattgggaaggtaatcttatatgcaaatacaaacccaatattgatatttctctttttacattgagttcttgtaataacattataggactgacgaatacagaagaacctcaaatagttatatggcatgaatagtttcttttatttaatttagcctccaataaacaataggctatggtatggatatgaaaataatcagaatctgcaagtaatgtatttgctttttctgcggtggagttctttccgacaaaagatgaaaacaagattaatgaatcatcgaaacatagaaaagagatgaaaaagaatattttgaaagcaacactggttgctgcattcggtttgatagcaggatttaatgtgtataactctcagaagtcggatgtgatgtctgagttggctttagctaatgtggaagcattggctgatgacgcagaatctggtgaagactttactaatggaacagattgtgttgctgtatgggaaaattatacttgtagaggaaaagatggcaagttatattcttattcaatacccaaggcgaatagctaataaagattcaaaccctctttaagaacaaaaatattaattgcttttgggactaggcttgtaccaattccccaaagaagagaaggaatttatgcaaagattattttttattgtgatagccggtatcttgatgtccggctgtgcttctgagaagaaaaagcaggagcttgaaagagttagcaatattgcatatactaccataacagatagtatctattcgagtatgccgggaaaaattacggctttaaatggacgcgtgtactggcacgatgtgacagaagcggataattttattcatgtggtagatgcatcatccggtaaggaggtgtacagttttggtaatatgggtgatggcccgaatgactttgcaatgccgattccttcagtttctacagagggtttttatctaagtgacttgcagaaaggaatagagcatttgtatgttttcggtgaggatggggcttgccacgtggatagaggcagccttgaaaagaactcggaagtaaccaggatgctccatgtgggcaaaagcactataattgctctgactcccggtgcggaaaatctgtttaaagtgtcatgcaacggaacgacccaagcaggaggcaagttccccttgtcggaaaaagtcgggaatgccttctatctttatcagggcaacatggactataatgcgaaccggaacaggttagtatacagcagtatgtctttcccttatcttgccacttactctttggacggatgcaagctgtcattggacaaggaactgcccgaaaagatagactacaccgttcaggatgggaacttggtgacggctaaagattccaagcgcggcgcgatggaactggcattgaccaagaatcatatcgtaacgcttgacagggatgtggtggtggaaggagagaaacccaaaggagcctctccacgtgacccttccacccttcctcattcactcttcatttatgattatgagttgaaccttacccatattctgaatatgcaattcccgatattgagaatatgtggtgattctcaaggtgatgtcgtctatgcgatagttttgtctccggagtataagctgatacagataaacatttcctcgattaatgatagtaggaatgccaaataaatagagtttaatttagaggaatccttccttcccttgggtttctccttaaaaaaggaggattaatccgatgcaaacttaatggaaataatcagaatctgcaagtcatgtatttgctttttctgcggtggagttctttccgataaaagatgaaaacaagattaatgaatcatcgaaaaaacaaaaagagatgaaaaagaatattttgaaagcaacactggttgctgcatttggtttgatagcaggatttaatgtgtataactctcaaaagtcggatgtgatgtctgagttggctttggctaatgtggaagcattggctagcggtgaagaaggtattggaaagggcttattgtatggaacagagcctgatgagaataaccaatgtcactattgctgctgccctggtgataacgattgcggagctgcagcttgtagcggatgctaaatatttactagtggataatagaaaacattttatgtcttttctcactaatctttctattatccactaaaatttatcaattatgaaattatctatcattacattattattaatattattgctatgtggttgtagcacacatcctcaaaatgagaacggtaagtttataaggattgacatagaaaattcagccaataatccattcaatttatcaaatctttcaaaagaggtgagttacataaaacttgaaacaaatgattcatgtttaataaacagtataaaggcaatattctatattgacaatcagattataattagagacaataactctattttattttttgacaataccggaaaattccaatataaagttaatcaccaaggtgatggaccagaagaatatcttcgattatctgactttgatatttgctctaagaatgagacaatgcacatattggatacgagaaaaaaacaaatattacaatacgatatgaaagggaaatttcagaataaaaaagatattaatttttgggccattgggatgcagctttttaatgattccacgagtattttatatagtgggaatcaaatatcacaaaaccaaagttataaatttacaatctataataacattaagcagagtgtatcaggtggattttaccctatttctcagaaaaagtccaattatctacatgttcataataacactaattttagtaaatatggaaatgaattcttattctacgaattgtataatgacacgatttacactttaacttcaacaaattgcattcctcgctactatctaaattttggcgcttcaagaattccgaattcatatttcgagaaagattataaaaacatcatggaattccaaaatgaaatgagcaaaaatgttttttcgtatggtataagttcattgctcaactttcacaataatatattgctctcttatttccataataagaaaaaacacttcctctattataataaaaacgataatagtaatgtatctttccatcaaataactgatcaaaatctatttaatgatttcatcattgatatcaagaaatataaagtgaacttttattcttacgaaaattatttatttactattttcgacaatgaactctacatagacgggaatagtaaaattaaagacaaaaaaatacaggatgaactctcggcagttagcatagatgataatccaattataagaatttgtaaaattaccgattaataattatggtatcatccgacttgcatccttcaaaacagaaaagcagaaacgcaaattcaccttgaagagcgtaaaaaatagcaataatcaaaagcattctctgcttcgtttaaagataacagaaaggattataaaaacagtaaaactcatgagagcagaaagagggtggaaataaacatatttttctttgccggaagatgttcttcccaccctgcgactctcttctaaatgcacccgaaccatctattggagagattttaatccattgaaaacaaatagaatatgaaaacaaagaatttaattgctgtaatagcagcagcactcctcagcagttgcatgcctcagaaggaggtagccggagacgtttccttttctcgtgaggactttcagacaacaaaagaattgagtaatccacaagaaattgcaattgacagcctgcttaacccggccggtttccgtgtgatgaacgatagcgtgcttgtagtggtgaatcagcccaattgcgagttcctgctcgaactctattccctgaacacattgcagccgttggcacaattgataacaaaaggtaacggaccgggagaaatgttcagctgcgctttaggacttcactctaatgcttccgacaatttctatttgcaagacccgaattcaaagacctgttatatcgtcgatttaaagaccttattgaatagccgcaagttcgttcccgacgagcaattcagatattcatcggaagtcttgcctacttcggatttatgcctattggatgataaccgctacataggatatcacatgtggtatctggatgataagcaattcagcaaagtggattctcccatcggctattaccaaaaaggagaggacagtggcaagggaatggatgattttcctttctttgtggcttccgtgaatggtgctcgtctgtttaagaacccacaaactcaggagttgtggactgcggacatgcatcgtgatgccatccgaatctataatgattcattaaagcagattcgcgaattggtcggccccgaccatttttcaccggagtatacccggaggcaaatagatgctcccgtagccttcgtcacttttgctgatgaatgtgattatcatgcttatacggattattatatcaccgacaagcatatttatttggtttatgaaggcaacaagcatttcgacatgaaaaatctctcacctgtggaaatattcaaactggactttgacggaaacttgctttgcaactataaactagaccgatatgtgtattccatatccataaataggaaagaggatacgctttattgtgcttcacgtccgtctgtcatggagccgcctgtcattttgaagtataagttatagaacatcggcaaacagtccaaaagccttcaagagtataagtaacaaactggttatgagaactaatatctatttaattatcgtattatccactatctgttttagttcgtgctaccgggaaaaggatttgaagtattccctgaatgccgcaggcaagaaccgaatagagctggaaaaagtactggaacattataaggatagtggtcctaaatatgatgctgcatgttttctcataaagaatatgccgggatattattcgtatgcaaaaagttccggcctggacagtttgagaaaaatacaatccgtcatattccataaaaaacattttcctcgtgatttgcaagacaaatggagtaagttctcttacaagagcacgcccaaggtgtatgactgccacgctataaaggctgagtatttaattgaaaatatagacttggcctttgctgcctggcagaagagaccgtggcggcactctctttcatttgacgagttctgtgaatggatattgccttatcgcataggggacgagccgttggaaaactggcgaaagtttttttatcaaaaatattcggctgtacttgattctttatataaaggcaatgatatgatggtagcggcagactcgttaatcaggtttgtaaaacgagaaagcggctatgtatattctgatgaattaagcctgcctcatctgggagccctgtttttgcaaaagaactgtgtcggatattgtcgggagagttgtgacttgtctgtatatgtcctccgttcggtaggcatacctgttgccacggatttcattataagtgctcccgaagcccaaggcggccattcctggaatgtcataaaggatgggaccggaataatcccttttgaatatgatgagggaaaggttactcaaggatatgatgacaaacgtttaaaaggcaaaatatacagacaatgttttggcaagcagaaaaaggatataacgggaataatggacaagccggaggtacccgctgtcttaaagtctccctacataaaggatgtcaccggtgaatattttggcgaaaacagtgtggaagtagaaatagatgagactgaatgtggacaatatgcctatttgggagtcttttcttttccgggctggaaggctatagatatggcgttacaccaaaatggtaaagccagtatgaaaaatatagagcctgatgtcatttatgtacctttggcttctaatcataatggaagtctgttccatacaataggatttcctttttggctgacagataaaggattaaaatatttccagcctgagaaagaagtagaaaccgttgaattattccgaaaatatccgctccgaaaatggacgcgtttccatatcagtgaaatcataggaagccacttggatgtttcaaattctttggattttcgacagagtgagttactctatatggttgctgacacaccgagagtgaattataatcaagtgatatgccatcctcaaaaaaaatacaggtatgtgcgatatcaagcagctgcagataaacctgcacgcattgcagagctaatgttatttcgttcagaagaggacacggtaaatctgccttttaagattataaacggaagtgagccgtgtaaaggaaatgagaaagaagtaaaagagaatatttgtgacggaaactatctgacctatttcctttcagatgaaaaaggaggctatgtaactttagacctcggcaaagatgaatggataaaaaagatagtttatgtgccacgcaatgatgagaattttatcagtatgggacatgaatatgaactgttctaccaaaacggacctgacggctgggtgtctttaggcaggaaaacggcaacggaaccccggttggtttacaacaatgttcccaaaaacgcgctgctttggctgcataacctatctgccggcaaggaggaacaggtgttctatatgcaaaacgggcaacaaatattcttaaacaaatggtaggaaaggtgaaaaggctgaaaaaaataacggactgcttgctgtcggtcgctttctatatatgcatattgataataggatggctggtattacaaacaacctgtttcacgacttttaccatcccgtctgattcaatggctcccaccctgcaggcaggcgaccgcatattggtgaacaaatggataatgggagcccgcatcttcaatatctgggatgcattggaagacaaggaggtgaagattcaccggctgccgggagtcggaaaggttaagcgcaatgatgtgctggtcttcaatttcccttatcctgccaagcaagactccctggcgatggatgtcatgctgtattatgtaaaacgctgtatcgccctgccgggagatacgctggaaataaggaacggattctatcggatacgtgggacagaggaagaattgggaaatatagccgcacaaagacgcatctccggcctgacggaaaacaactcacggggagtggtcatggagagttttccgtggagtaaacggttgggatggacgataaaggaattcggccccctgcctgtcccggcagaagggcaggtggtatcattggatagcacctcaatattattttatcaacatatcataaggtatgaacaaaaaaagaaactttcattgagggataaacttgtttacttgggcgacagcctgataagggaataccggtttagggaaaactattactttgtatcgggcgacaacatggaaaactcccgcgattcgcggtattggggactgctgcccgaaagctacatagtgggaaaggcaacaagaatatggaaatcggaagcccccggcgacggacatatccgttgggacagggtgtggaaaggaataaaatgaaacatataaataaaataatggcaagtgggatttgtctatttatcacctggctcttcatccttgccggtgcggtagaagcggtatgggggcttgcacaggtatatggctttaccgtctccaagcattcgctctatgcccttaccggctctttctacaatccgggaccttactccggtttccttgccatgacgcttccggtctgtctgtatgaatggctgaagcgtaggaaggaaaagaaaacggcaatctattatatagccttatccgtgttggtactccttatttgtgtgttgccggccggaatgagccgctcggcatggatggccggggcggtctcgtcggcatacatcgcatatatgcattaccggaaggggattcacgcctacatccgttgtcacccgagacggacgaaagcgggaacaattctgctgatattgctcgcaggagggatacttgccggtgtttacctgatgaagaaggactcggcagacggaaggctgctgatgtggaaggtgtccgtgcacgccatagccggacaaccgtggcgcggatacggatgggacggtgtccccggtgcctatgggcaggcgcaggaggattatttctcggtgggagattatacagagacggaagaacgggtggcggggtcacccgaatatgtgttcaatgaatatcttcaggtggcgatggcatggggagttcccgtgctcctgatggcgttgctggtggtgggcggaagcggttatgccgggcacaggcagaaggagtacgggctgtgcggtgcactgctgtctttggccgtgttctccttttcttcctatccgttccagttccttctgtttgtcgttgccctggcattgctggtaacagggtgcgcaataaagaccctttcctcccgacgcccattggtttgcatggcgggaaccgtgttcttattgttgtcggcgggctatgggtgttaccgggtgtatcggtggaaggaggtgcgtgagacggcttcgtcggcatggcaccggaaacagatgttttaccgttcgggggcttatgaacaggcggcggaagtctatgcggagatatacgaagacatgaaatggaatgcccgctatctgtttgaatacggtcatgccctgcacaaactgcacagaaatgaggaatcgaatgtggttatgaaggaggcgttgaaggtgagcggcgacccgatgatactgaacataataggcaagaacgagcaggaggcgggtaattatgcagaggcggaatattggctgattcgttccacccatcggctgccgggcagaatctatccttattttctgttggcaaagctatatgcggaaccggggttttatcaacggcaaaaactggaacaggccgcaaggatggtaatggagaaagagccgaaggtgcaatccacggccatcaggcaaatgagggaggaaataaagaaattactttgatattcctatttgtactgaattgtataaatgcctaaaaaagaaaatttaacaaaaaaagaagagggaaaatgagttttattcaaatataatatttttatttgtcttttaaacaagaataacatgactatgaaattacacatattggcttatgggctggtgctggccactacagtggcagcttgttctgatgaaaaaaaagattctaaggaaaaagaaggtgtggaaactgtattgccctcattgcccaatgaggtgacggtggtgccgctggaaaaacgagtattcaatcatgaactgatcagtaatgggaaggttacggcaaaggattatgccgacttgtattttcgcactgcagaagtagtggcccatgtttgggtgaaaaatggagatgtggtgcgtaaagggcagaaaatagcagaactttatttgtttaagttgaataatacgttggcacagcagaaaaatggattggcccagtccacactggagatgcaggatgtattgataggacaggggtatgcacccgataatttgaaagctgtgccggccgatgtattggaattggcaaaagtaaaaagtggttatgagcaaagtaaagcccaatatgagtctgccaaatatgatgtggaacaagctacactggtggcacctttcgatggtgttgttgccaatctcttcgaaaaagaacataacattccaaaaacgtcagaagctttttgccgggtaattaacgccggtacgatggaagttgatttcactgtgcttgaaagtgagttgcctctgattaaggtaggggataaagtggaagtgactccttatgcttccgctgccggtgtacgtcagggaagtatcagtgaaatcaatccgctggtggatgaaaatggtatggtgcgtgtaaaggcgcgggtgaatggaggcaataaactctttgacgggatgaatgtcagagtcagtgtgaagcgttcggtaggagagcagttggtgattcctaaaacggctgttgttctgcgttcgggcaagcaggtggtatttacgctgaaagacggtaaggctatgtggaattatgtgcatacagggctggaaaatatggaagagtataccatcacagacggtctggaggaaggaatggaagtgatagtcaccggtaatgtaaatttggctcatgaagctcctgtcaaggtaattaagaattgagaattgtcattctgaatgaattgaagaatctgaaaagaattagcaaatggtaaagttcttattacaacgccctatagccgtgctgatggcgttcactgcctgttttattatcgggctggtgacgtatttctcattgccggtgtctttgttgcctgacatcgctattccccaaattaccattcaggtgtcgggagaaaactcttcggcgcgtgagttggagaatacagtcgttacaccggtgcgcagacaattattgcaggtagcgggattgagagaaataaaaagtgagactcgtgacggtgcaggtgttatccgcatggagttcgagtttggtgtcaatacggatttggcgtttatagaggtcaatgaaaagattgatgctgccatgaacagcctgcccaaagaggtggcgcgtcctaaagcaataaaggcaagtgcaacggatattccggttttctatctgaacatgacactgaagaatgaccggccttatgagggcacgaatgagcaacagtttctggatatgtgcgaactggcggaaaatgtggtcaaacgccgcatcgaacagttgcctgaggtagcgatggctgatattacaggtgtccccggaaaattacttcagatagttcccgataaagataaactggccatgacgggtatcacggtggaggatatcgagaatgcattggcttccaataatgtggaaccgggaagtatgttggtaagggatgggtattatgaatataatatccgtattgctacgttgctccgtaccaccgaagatgtgaagaatatatatatccgtaagggagaccgtattttgcaattgaaggaactttgcaaagtggatgtcgtatcacaaaaagaaagcgggctatccgttgccggaggtaaaaaagcggttactctggctatcataaagcagagtgacgagaatatggatgaaatgaaggagaagttgaaagaaacgactgattattttgcttctctttatcctgatattgagttcagtataagccgtaaccagacggaattgttggattataccatttccaatttgcaacagaatttgtctttaggattcttgtttattttcattgttgccatattgttcttgggagatatccgctcgccgttggttatcggtatcagtatggtgacctctattgtcattacttttttctttttctatttctgccatgtttcattgaatgttatctcattgtcgggcttgattttggctgtgggtatgatgattgacagctctatcattgtgacggagaatatttctcaatatcgggagcggggatattcattgaagcggtcatgtgctgtgggaactacggaaatgattactccgatgttgagttcgtcactgactaccattgctgtcttcctgccgttgatatttatgagcgggattgcaggtgctatctttatggaccaggctttctccatcacagtgggattgatgatttcgtatgtcaccggtattatgcttttacctgtgctttatctgttattctatagattaggcatacggagcaaaagcttcttgtccaagagatttgataatctgttgaaaaacgaatggctggagggtttttatgataaaggtatcgattgggtgttttctcataagaaaattagtctgttgggcactttggccactttgcctgtttgtgtgttcttcttttattttatggaaaaggaaaggatgccggagatagaccagaacgaactgataatgcgtatcgaatggaatgaaaatattcacgtggacgagaataatcggcgggtggatgagctgatgaaactgacagatgataaggtgactgaacatacggcttatgtgggtatgcaggattacatattgaatggaggaagtgagttgtcttcaaccgaagcggaactttattttaagaccgggacacccacagagatacttccattgcaggatttgttgacgaaggaagtggaagagaaatatcctttggctgtgatatctttttctcctcccgaaactatttttgagaagttgtttgtgacaggggaggcagatatcgtggcagagcttcatgctgccaataaatcaaaagctcccgaagccgagcaattacagcagttggaaaagaacgttattcaggcaacgggaatgactccgacgggtattgctttccgtaatcagttgaatttggtggtgaaccgggaaaagttgctgttgtataacattgcttacgaggaactgaccagggtgttgcgcactgcttttaaagaaaacaaagtgtctaccttgcgttcttaccagcaatatttgcctatcggcattgccggagaagaaaaaagcgtgaaccgtattctgaatgaaactttggttcaaactcagcctgataagaacagacaggtgaattatattccgctgagtgagttggtatcgattgttccggctgaggatttgaagagtattacggccggtaagaacggagagtatattccgttgagtttttatgatgttgaaaaccctacacgacttatgaaggaagtgaaggagacggttaaagaaaagaatgagtgggaagtggatttctcaggcagtttcttttcgaatgaaaagatgatgggagaactgactgttattctgtttgtgtcgctcttgttgatgtactttatcttgtgtgcacagttcgagagtttcttgcagccgctcatcgtgctgttggagataccggtagatacagcttttgcattgattaccttatgggtgtttggacatacgctgaatttgatgtcggctatcggtattattgtaacttgcggtattgtggtgaatgactctattctgaaactggatactattaatgagttgcgtaaaaccggaatacctttggttgaggctatccatattgccggtaagagacgtttgagagctattatcatgacgtcgttgactactatttttgcaatggtgccattgttgtttacttcggatatgggatcggaattgcaaaagccattgtctattgccatgattggttcgatggtagtgggaacattggtcagtttgttcattattcctttgatatattggtttatttatagaaaacatgataaaaatgaagtacgttagtatatggatcataggctgtcttttatcggttggcgtaaaggcacagcagacggtgaaattggatttgcagcatacgatagagattgcgaatgacagttcgttgtcggcattcagatatcaaaatatgtatttatcgggttattgggaattcagaacctataaagcaaatcgccttcccagtttgacactcgacctgactccggcaaagtattaccggtatatcactcagcgttatgactctaatgaggatatggacgtatatcgtgaacagcagatgttcagtgccggtggcggactgagcatcaggcagaatctggattggacaggcggtactttctatatagattcgcaacttgactttatgcgcaacttcggtgatacgaaatctacccaatattccagtgtgcctatccgggtgggctatcagcagagcttgttggggtataatgcatttcgttgggaccgtaagattgaaccgctgaaatatgaaaaggtaaagaaacaattcatttataatacggagaccgtgtcagaggaggctgtcacttacttctttgcattggcaatggctcaagccgactatcaattggctaaagagaatgtgtcttccagtgataccttgtatagtatcggactgcaacgccataaaatagcagccatttcacgtgcggatttattgacccttgaattggataaagtgaatgcgcataacactttggaaaatgcacagatagcgctgaaacgtgctatgttctcattggcttcttttctgaatctggataagaatacgactatcgaattgtctttacccggtcgccctgccgccatggagattccggtagatgtggctctggctaaagcaaaagagaacaatccgtctttcttggagcaacgccagaatattttggaagcagaacagaatgtgaataagaccaaggtggaatctcgttttaatgccagcctgaatgccagtgtcggattcaatcaggtagcagataagttcggagatgcctaccgccaccctttgcaacaggatttggtgtcggtgagtgtttctattccattggtggactggggagtaagaaaaggaaaatacaatatggcaaagaataacctgaatgtggtaaagattgccgcacgtcaggaagagcttagtgtggaagaagaggtgataatgaccgtaagtgatttcaatatccagcagcgcctgattgccagtgccgaagaagcattggacttggcggtgatggcgtatgagcagacacgccaacgcttcattatcggcaaagcggatgtaaacagtctgactctttcattaaatcgccaacaagaagcacagaagaattatatttcggctttacagaattattggttgaattattataagatacggaaactgacattgcacgactttgcttcgggattttcattatctgataagtttgattttaatgtaggtatgtatcgatgagcaactctcgtactttatcttcgtttacgctgatagtcacttttgtctgtttggcgttgataggtttggctttggttccgttattgccggtcaaactggcaccgtcgcgtgttttgccggggctcactatttcatttagaatgccgggtaattcatcgcgggtgatagaggctgaggtgaccagcaaactggaatcgatgctggcaagggtaaacggaataaaaaatgtaatatctacttctgataatggaggaggaagtataacgctggaactggataagcatgcggatattgatgctgcccgttttgaagtgtcaaccattatccgccaaacgtgggcgcagttgcctgacggagtcagctatcctcagattagtacccgccgttcggatgataaagcatcgaggccatttatgacatatactctcaatgcgccctctaaccctatcttgattcaaaactatgccgaagagaacataaaaccggtgctgggacaattggcgggtgtatataaagtagaattgaatggggctactccgatggagtggcaattggaatatgacagtgaacagttgtctcgcttgggaataacactgggagacgtgcaggttgccatcaaccgccattacgagaaagaatttctgggtatttgttctatagagaagggaccggatgataaggactggattcgggtggtgcgcactgctacaggcaaggaaacggagtttgagcccgatgccatcaaactggagacaggagatggaacggtggtcacattggataagttgataaaagtaaagcatgtggaagaacagccacagagctattaccgcatcaacggactgaattctatctatctttatattacggctgaggaaacggcaaatcagctggaactgagccgtcaggtaaaagaccgtatggcggaattgcaggcaaagatgccggccggatatgaggtacatatcggttatgatgccacggagtatattcaaaaggaattggataaaatttatttccgtaccggactgactgtgctgattttattgctgtttgttgcattgattacccgcaatttgcgttatctgtttctgatagtaaccagcttgactatcaacatagccgtagctgctattttctattatatcttcggactggaaatgcagctttattctttggccggtattaccatttctctcaacttggtgatagacaatactattgtcatgaccgatcatattttgcatcgtaggaatctgaaagcatttgtctctgtgctggctgctactttaactaccatcggagcattggttattattttcttccttgatgaaaagattcggttgaacttgcaggattttgcggctgtggtaattataaatctggctgtttcattgtttgtagccttgttctttgttccttccatgattgacaagattaagttggagaagaaaaagacgaagaagcacagacgcacttggatgaagcgttttgcggtttattttactcgcttctatcagggatttatttattacttgtgccgctttagggtgccggcctgtattttattggtattgggctttggcctgcctgtctttatgttgcccgataagatggaaggggaggggacatttgcggaatattataataaggtattcggcaactccacttataaagagaaagtaaaaccgatagtcgacaaggcattgggaggcagtttgcgtctgtttgtcgagaaagtatacgaaggcagttactttaatcgtgacgagggagaagtggtattgtatgtaaatgccaatctgcctaacggaagtacattggagcaaatgaatgcattggtcaagaagatggaaacttacttgagcgattttaaggaaatcaggcagttccagacagctatatatagtgcacggcaggcaaacttacagatttactttacgaaagaagtggaacacagtggcttcccttatacattgaagtctaatattatcagtaaagctttgacgttgggaggaggaagctggggagtatatggtttgcaagaccagggcttcaacaatgatgtgcgcgagagtgccggaagtttccgggtgaagatgtatggttataattatgatgagttggcttattggggagaccgtttgaaagagaaacttttggagcatcgtcgaataaaagaggtgattatcaattctgaattctcatggtggaaggatgattacagcgaattctaccttgacttgaacagggaaaggatggccaaggagaatattacggctacacagttattcaatgctttgggacctgtgttcgggcgtgatatttattgcggaagtgttttgtttgaaaatcaggctgaatggttgaagctgtcttccatgcaagggcagcaatatgatgtgtgggggctggtaaatgttcctttgatgataaacggacactcttataaattagctgattttgcaacggtagagaaaggacagtctccgcagaaggtggcaaaagaaaatcagcagtatcgtttgtgtctgcaatatgagtatataggttcttccgagcagggaagaaagttgttgaagaaggatttggaagcctttaataagatattgccgatgggatatacggcagaggatgagcaggaacggtggtcatgggggaagaaggataatgcacaatatgcattgctcttgattgtgattgcaatcattttctttaccaccggcattttgtttaattcgctcaaacaaccgttggctattatttttgtgattcctatttcgtatattggtgtgttcttgactttctatctttttggcttaaacttcgaccagggtggttttgcatctttcgtattgttatgcggtataacggtgaatgcaagtatttatatattgaatgagtataactccatccgcaaacgttatccgctgctttcggacgtgcaagcgtatactaaagcatggaattcaaagattattcctattttcctgactgttgtatctactattttgggatttattcctttcatgataggtcagggaaaagaggccttttggtttccgttagcagccggaacgattggaggattgattgcttctatattgggcattttcatgtttttgcctatattctctttgaagaaacagaaaaaaagaatgaagtctgaataaaatgaagaaataaaaataacattgtatggttattgcaattcattacttattgtagaataagagacgtaatgccttcttcttatatttagtgttaataaattttacccatttcaaacacatacgtctgcacggaactatacatacgttcgcatggggctacacatacgtatgtgtagggctatacatacgtatgtatggagttatgcatacgtccgtgtggcacaacgaatcggaaagaagattagtatgaaattatttggtggtattatcgggtagttgtaatattgtatgcgtttaagcttattataaaaaaacaaaagttatgtatatggtagagaagagcggcaagttgttatgtcgtatagttcttattatgttgttgttcgtcctgtgtttttgtgcatcttgtggtcataaagaggcaagatatgcattggatatggcagaaaaacgaatgtgggatgaaccggattctgctttaaaagtattggagtctatcgttatgccggaagatttggagggaaaagagctggcagattatgcattgttgttgacacaagcgcaatatcgttccaatattgtcgctacttcggattcattgattaatatcgctgtcgggtattatcaggataaagatgtggaaaaaagaacggcctcattattatataaaggaggagtattaaaagatatgggtaaagatgaagaggctatgttggtctataaagaagcggaaagttatattccaagaataaaagataataggattgtgacattaatttacatgggattggggtatttgaatcaaaagaatagaaactatgctttatcaatcgattattttaagaagtctgtagcggttaacattgttccaaagcaggtattgtcatggaaagtaagcagtataatgaatcttgctaatatatcatattattggggaaatagagatgatgctgatttgtattattctcaattattggatatggtacctttggtcgattctatgcttcagacaaaaatatattataattatggaatctataaaagtaaggaaaaagaatgggcggaagctgagaagtatgtgcgtaaggcgttagataatgcgtcgggagacgtatcatatagagctatgcttttattagccaatttatatagccggacaggacgtgacggggaagttgatagcttgtgtcagtatgcgttaaaaacatcggagccggcagtaaaggctcgcatttattatttcttgtatgaggaaaatgtggcaagaaaggaatacgaagatgctgttacctatttatcgcattatgtattattgtcggatactttgcgttctcaaataaatcggtctgaatatttggaaatacaaaagaaatatgatcaagtagtattattgaataagaatgtagagatacataatcattggtatcttactattataatatcgaccgttataattgttgcgctgattggaatacattatttggtgttgtctataaatagaaagaaaaaagaaaagttattattgaaaagcaaacaggaaaaagtggagctgcaagaaaagattgatgcctgtcaaactaagatagcggaggatgaaacgatgcacaatgaggaaaaagaaaaattgcagatgcagatcactcaattggaagcggaaaaagagcaaaaagatattagtattcgtcggttggaaatcatttgcaaatcgaaagataaggatattccgttggagtatattgaagctttggaaatgataatgaaactgaagtctaaagaacaggcttcctataatccggcagtggatagggagaaattgcatatttggttggatttggtttatgatgattttgccggccgtttgctggaaaagtatcagttgaccgggcgggaaagggatgtgtgttatttgaaagctttggatttttccgatgatgaaatctctgaattattaaagatacaattgcgttcggaagaacgatggatttatcgtatatgtgagaaattcgggtttcccaaaggtagtaaagatgatttcgctgcttatattgcagattttaagaaaagaagataggtgttttattcaggttttgtcgcaaaaaagagtgctgcattgaaatataatgctgataatcagtgaaagtaaatgtcgcaaatcagttggacgattgtttggattattgtggggctctttctaaattcgcaatgtaataaaaacatttgttatgaaaaacgtattgataactatcttttttatcttgtcttttgcacctatgtttgcgcaaacagttcctgaaaaggaaattgattttgagggaagttttattatggacgatgccagatctgcttctctgccgatagaggcttatcttcaagatacacaagttgtcattactttttatgtggacctttccgatgccacggtgacgattgcatcagaagaaaataatcaggaaatggaagaacgtactatttcatttattgattccgctccggaggtttttaatataagtggttactcaaaaggtacttatattataactataacgacaccgcgaggtacgtatttaagtggcttattcagaattgaataaccacaaagtgaagcatgtaagctcatcattacttctcttcatgtttttctgtcttctttttacttgtaaagaggctgaaaaggggaagaatacacgtttggttaaagtgtgggaagggaaagcatcggctttcccttcctgttttatttgtactattcaggagattgatgccatacatttatggaaaaagtagaaagaaatctcaattttataaagaggaataaaataaaatgttttattttgcaggtcaataaacattctaatacttacatatcatgttaactcaaattatcaatggtaagatatttaccccgcagggttggctggacgaaggttcggtgttgatgcgggataataaaatactggaagttaccaactgtgatttagcgctgattggcgccaatctgattgatgccaaaggcatgtatattgtccccggatttgtatgtatgcacgctcatgggggcggtggtcacgattttacagagtgcacggaagaggcattccgcacagctgtcaaagcacatcagaaacacggtgccaccagtattttcccgacattgtcatcttctcctttttcagagattcgtaaagctgtaagtatatgcgaaaagctgatgaaagaaaaagacagtccggtattgggacttcatgtggaaggaccttacctgaatcctaagatggcaggtgggcagtttgccggtaaggtgaaaaatccggataaagaagaatatacttcattgttggatgaaacaaattgtatcaagcgctgggattcatctcctgagttgccgggtgctttggaatttgccggctacctgagatccaaagggatagtggctgccatttctcataccgaagccgaatatgacggtatcaaagctgcttatgaagccggatatactcatgcggctcatttttacaatgcaatgccgggatttcataaacgccgtgaatataagtatgaaggaacggtggaaagtgtctatctgacagatggaatgactatcgaacttattgctgacggaattcatttaccatctactatcttgcggttggcttataagctgaaaggagtgagccatacctgcctggtaaccgatgcgctggcttatgctgctgccgaaggagttgaaataactgacccgaatgtgattattgaggatggtgtatgcaagatggcagaccgttcttcgcttgtcggaagtattgctacaatggatgtattggtacgtacgatggtcaaagcaggcattcctttgggtgatgccatcaatatggtttcggaaacaccggcacgcatcatgggagtagatgatagaaagggaacattgcaaaaagacaaagatgccgatttgttggttttagaccgtgatttgaatatccgtgctgcatgggcaatgggcaatttgatagaaggaacgaatacattgttctgaatatactttttaaatactttagggaagatgtctaaacagttcgaagtaattgtttaggcatcttttttagttttagtagtcataatcaatgggaaaattactacatttgcaatttgtagaattgaaaactcaaacaataaaatcgatatgaacgaagcgattagacaagacgtgaagaaagcctgtgaggtaatgcagaaaggcgggataattctttatcctacggatactatctggggaataggttgcgatgcaaccaatgcagaagctgtgaagcgtgtgtatgatatcaagaaacgagcagacagcaaggcaatgctggtactggtagacagttcggtgaaagtcgatttttatgtacgggatgtaccggcagttgcgtgggatttgatagattatgctaccaaaccgctgactattatctatgacggtgctcgtaatttggccgaaaatctgttggcggaagatggcagcgttggcattcgtataacaggtgaggcgttctcaaaagagctttgtttccgttttcgcaaagcaatcgtatctacttccgcaaacatcagcggtcagccttcacctgctaatttcagtgaaataagcgaggaaataaaacaagcggtagactatattgtcggttataggcaagatgaagtcggacatccgaaaccttccggtattattaagttgggtaaaggaggagaagtgaagattataagagaataagaaagagagaatggatgctttaatagaagataagaagagcttattgcagcgctttattctgtggcgcgaaaaaaggataaaggaaaaacatttcattctgatactgagctttctggtaggtatttttactgcactggcagcatggttcctgaagtttttggtagaatggattaaggaattcctgacagagaattttgactcaacaggggtgaactggttatatttggtgtatcctgtggtgggtatctttttgacaggcttattcatacgtcatattgtgaaggatgatatcagtcatggtgtgacaaagattctttatgctatttcgcggcgtcagagccgtatcaaacggcataatacctggtcatcggtgattgcgagtgccattactatcggttttggtggttcggtgggagctgaggcgcctatcgtgctgaccggttctgctatcggttctaatttgggcagtgcctttaagatggaacataagacgctgatgcttttggtgggatgtggtgcagcgggagcagtggcaggtattttcaaagctcctattgccggattggtatttactttggaagttttgatgatagacctgacgatggcttctcttttgccattgctggtgtcgtgtgtgacggctgctacggtttcttatattctcaccggttcggaggctatgttcaagtttcacatggatgagccgtttttgatggagcgtatcccatcggctatcttgttggggattgcttgcggattggtctctttgtattttacccgtgctatgaattctgtagaaaatgtatttcgtcgttataataatccgtatgtgaagttgaccattggcggcatcatgctgagtgttttgattttcctctttccgcctctttacggtgaagggtacgatacgataaatttattgctcaatggggtatccaatcaggattgggatacggtgatgaacaactctatcttctatggatatggcggtttgctgcttgtttatctggcattgattgtgttatttaaggtctttgcatccagtgccaccaatggcggtggcggttgtggcggtatctttgcacccagtttgtttttagggtgtatcaccggatttatctttgcccatttctgtaacgaatttcatctcggtccgtatattcctgaaaagaatttcgccttattgggaatggcgggattgatgtcgggggtgatgcatgcacctttgacaggtatcttccttattgcggaactgaccggaggctatgacttgttcttgcctttgatgatggtgtctgtcagctcttacctcactatcatggtgtttgaaccgcatagcatttactccatgcgcttggctaaaaaaggagaattgttgactcatcataaggacaaggcggtattgaccttgatgaatatcgaaagcgtggtggaaaccgactttgagaaagttcgtcccgatatggatttgggcgaaatggtaaaagtcatttcccaggcaaaacgtaatttatttcctgttgtggatgtgaatggagagttactgggcattgtggcattggacgatatcaggaacattatgttccgtcaggagctgtatcatcgtttcaaagtggaaaagtttatggtgtcgcctgccgccagaatttatgtcaacgattcgatggaagaggttatgaggaagtttgatgatacgaaagcttggaatcttcctgtgatagatgagctcggcaaatataagggatttgtttccaagtcgaagatattcaactcataccgtcaggtattggtagatttttcagcagattaatagttataagtatggaaaagaaagatttgagaattgtatatatgggtactcctgattttgcggtagagagtctcaaatgtctggttgaaggaggttataatgtagtaggtgtgataacgatgcccgacaaaccgatggggcgtcatggaagtgtgttgcagcccagtcctgtaaagcagtatgctgtgtcgcagggattgcgcgtgcttcaaccggaaagattgaaagatgaatcttttgttgaagagcttcgttctttgcaggcggatttacagattgtggtggcatttcgaatgttacccgaagtggtttggaatatgcctcgcctgggaacgttcaatcttcatgcctctttgttgcctcaatacagaggagcagcccccatcaattgggcagtcatcaatggagatacagaaacgggtatcaccaccttcttcttgaagcatgaaattgataccggagaaatcatacagcaggtgcgtgtgcctattgccgatacagacaatgtgggaattgtgcacgataaactgatgatgttgggaggagagttggtgcttgaaacggtagatgctattttggccggtacggtgaagcctgttccgcaggaaaaactgattcagtcggaagcagaattgcgtccggctcctaagatttttaaggaaacgtgtcgcattgactggaatcagggagtgaaacagatttatgattttattcgcggcttatctccctatccggctgcatggacagaattgtatatggggggagccggtaagcagatgatgaagatttatgaagctgagaaaatcttctgtcagcatgatatgcagataggggagattcgtacagatttaaagactgacttccggatagcggtaaaagatggtttcattaatatattgtctttgcagctggcaggaaagaaacgtatgcatgttgcggatttcttgagaggttataggacagctaatgataaccgtgtagagtaatcacacaaagaacaggtacaaagtaaaaaggcgcagccggtgaatgccgtcctgcgcctttcgttataataaatgagacattatattataacggtcgtttagtttttgggttgagttatggtttagatattgaaattcatgctttttctgttattgttcatcgtgacttctacgatatcggtttcatttttaattgtttttgtttttatcttaaatcctttcaatgtaccttctttaaatcccggcatattttccaatgtaaatgagacataaccactgttggcattgagttgcaggtcatcggccgcatcatgacgcaactcggcacttaaatatccgcgtgcgtccggttgggcatctttcgctatgagtaagctgatagaatgtggtataagatggttccctccgtttaaaaaggtgtagcgtaagttgagatgcgctttgcttatactttgcccgctaatctcaatcgggtctgtgccatagtcttttgcatcattgtcttccacgaagacaggttctttggtcagcactttattcacttgcataatagtgatataaggaatactgtcagcacctgtactctgaggaatggcagtgtaagtataaaatatgcgttgccctttttggtttattttattgtcagacaagatttgcgggttggctatataagtatatccgtttaagtcagtatctatcaaagtagcccccgatagcgtaatgggattgacaatgatggccatgtctgcattataattatccatactgctttggaggtcatctatgtcttcatcgtgactgcatgcttgcgtcatgcaggtcacgaccgacagaaagagtaggagtagtatattctttatatgcttcatttcattatctctttttgaatgtttctatgacgtaaatgtacagacaggatgtttactgcttctaaaagtgttaaatctgcttaagcaaaaaaaatctgcttcgttaatgcagtatttttgcaatctcatcatttatagaataaaatagtgtcacaaacaatgaatgaagcagagttggccgaacgatgcggcaagggagataaccttgcccgcaagcagttgtatgagcgttatgccggacaattgatggctatctgtattcgttatattggtgacagagagacggcacaagatgttttgcatgatggctttttgaatatctttcgttctttcgacaagtttacttacaaaggagaagggtcactcaaagcatggcttgcgcgtgtgatggtaaatgaagctttgggttatttgcgcaaacagtcttcagccaatcaggaaatagtagtggaagaattgccggatatggtggatggagatgatgatacgatggaacagattcctcagtctgtattgatgcagtttataaaagaattgccggaaggctatcgcaccgtttttaatctatatgtatttgaagagaaaggacacaaggaaatagctcagatgttaggaatcaccgagcatacctcttcatcgcaattatatcgtgccaaaagtttacttataaagaagattaatgattatagaaagaggatataggaatggaagagaaagataaatggataaagaatttacgccatcggatggaggactattccgaaccggctcctgctgatctttggaatcagttggagaaggagcttaatagtactcccaaaattattccgttgtggcgtcgctggcaggcagtagcagcaattgccttgctggtggtcatatcgacagtgaccgtatggttctggcattctccttcggcagaatatgtagaaagaaaatctgttgaaatagcatctctttctccttcggcggatatgaatgagataattcctacccatccgtcagtggcacatatcgctcccgaaattacgtcagtaaaaaagaaagtgaacaatgtggaagctgttatgcagaaagctgtatctgcattttataatgaggtgatgacagaaaaaacagcagaagaaaagccgatggaggaaacagataagacggataaaaagagcaaagaaacggaacaggtgaagactggagagcctgtgcagaaaccggctgcaagaactgcccggcgtaataattattatgcatacgccaccccccggaagacaaaagaaaggaagtggtcggttggtgtttctaccggtaacgttcctttttcttccaatatgaattattcgggatatggaagtctggctccattgaataaagaaccgaagaaaaattcaccttatgcttctttggaggcaagaaatgaactgaacgagcctatttattttgctaatctgaatgaggataataatacgaaggtggaacatcacatgcctgtcacattcggcgcgtctctccgttttgagttgaatgagaaatggggtatcgagacgggagtaacctatacgttgctttccactgatttacgttcaggttctcaggattcttattttgaagaagagcaacgcttgcattatgtcggaattcctttgaaggtagatcgtcgtttgtggagtaataaacgttttgaaatctatgcttcggcagggggaatggtcgaaaagtgtgtttcgggcacgatgcacaaggtgggcattgtgaataagcaagacaaagatgcaacagatgaaaagataaatgtgaagccattgcaatggtcgttgtcggctgctgccggtgcacagttcaagattacagagaaagtcggtatttacgccgaacccggtgtggtttattattttgatgatggtagtcaatggcagactattcgcaaagagcatccttttaattttaatattcaattgggagtgcggtttactttgaaataaatgacttctgtttgcaattttaccgagtattcgcaaataaaccatttttttgtactacttttgtaacctatatgctaagaaataagaacagtgaattatggctaaacctctaatatctccttctttactgtctgccaattttgctaacttgcaggcagacatacagcaaatcaatcgcagtgaagccgattggttgcatattgacgtgatggacggtgtgtttgttcctaatatttcttttgggtttcccgtattgaaatatgtagcggaactgacagaaaaacctttggatgtacatttgatgattgtcaaccctgagaagtttataaaggaagtaaaagacttgggcactatgatgatgaatgtgcattatgaagcatgcatacacttgcacagggtagtgcaacagataaaggatgcgggcatgaaagcagctgtaacgctcaatccttctactcctgttgccatgttgacagacattatccgtgatgtggatatggttttgttgatgagtgtaaatccgggattcggagggcagaagtttattacacacacattggataaagtgcgagaattgcgcgagctcatagcccgtaccggttcgcaggctttgatagaagtagacggaggtgtgaatctggaaaccggtaagctgttggtggaagccggagccgatgtcctcgtggcgggaaatgcggtattcaaagctcccgatatgggagaaatgattcataagttgaagaatctttgattattcggcagtgcaattattttcggctttgaagccttactctatactccggctgaccatcccattggtagccggaatttttttatccgatacctgctttcggtctttgaatttgttgtctgtgcactttggagtgatggctgtgctttttgttgctcttctgtggatgctgagaacatgcgcttaccgttatcggtggctttttggaggaatggtcagcctgtttctgctggttttgggaagtacggtgacgcaaatacagtgggataaaataaactgcgattggtcatcggaaaagaaagtgtaccgaggtgtcgttcaggaaactcctgttgaaaaggagaaagtcatggtatgcaaagtaaagacagaggacagacaggtgctgctttctgtttataaggacagtttgtctcaaaccttgcaaagcggagataatatcttgttctatggcaaaattcgttctccgcacaatgcaggtaatccgtatgagtttgattatgcttcttatttgttgcggaaacagattagcgggactgcttatgtgtatgccggatattggcgtgttatggacaaatcgcgtgtgctcggtatcaagcaacaggctttggcttgcagagataagattgtcgggtgttatcggcaatggggatttaaaggagaggaatttgccgtactttccgcattgacggtgggatataaagaagagttgagcgatgagttgcgggagtcttattcggtggcggggattagccatgtgctggcattgtcgggacttcatgtcggaatactttggtttctgttagggtatatgttgcggccgttttgccgtaatcgggcaatgcgtatcctgaaatgggtagtcgttacgctgttgctgtggagttttgcttttgtggcaggtctgatgccctcggtggtgcgtgccgtcatcatgtgtatgttggttgagctcggaacactgggagggaaacgagggaaacctctgaatatattggcaatagcggcattctctatgttgttgtattctcctttttatttgtttgatgtaagttttcaactctcttttatggcagttttagccatttctctgtgttataaagaattctaccgtatccgttttatccgtaatcgtttcttgagatatatatggggaacaacgattgtgtctgtggtggcacaattaggtacggccccattggtaatgtattatttttccggtttctctctttactttttattggcaaatctgctggtggcaccattgattcctgttattatttatctggcattgctggcttttgtctttgcaccggtcgcagaacttcatcattgcattctgttcatgctggaagaagtcattaaatgtttgaattggggtacatggactatcagccgattgccttcggcttttatagactcgttgtatttatcttccttggaagtatgcttgctttatgctttttttatgttgggactgtattattggagtaccgggagcaggaaagcgttgataaaggtgtttgcaggaataaatatgattttggtacttttgctctacattcattttccccgggcaaccgttccttcgatagtgttttataatctgcataattgtgctgccgttcattttatagaggctgataattcttcttatttatgttcagacaggaaagacagcacctatatttatatgaaaaacatagctgaaacctattggaaacggaagaagatgccgatcccccatttgctgttatccgattatgaaggtagaaatgtatggagccataaaggaattgtccattggaggggcatgaatatttgtatggtgactgatgggtattggcgcaacaaatccgccacaaatctgttggatatcgattatatgtatttgtgtaaaggatataaaggagagattgctccgttgcaaaaactgtttcatataaagagaatagtcttggatgcatcgctcggtgattataagtcaaaagcttataaagaggagtgtaaaaccttgggtttggattatattgatatttcggagaaaggttctttccgtattcttctgtgaataaagaataaatttgtatttttgccatttcaaaagaaaagatatatatatgttatcaaaagtaatttcgcaagctaatattgaccatgtggagaaatggtttgagagagctgaaaaaatagtaattgtcacccatgtatctcccgacggagatgcgataggttcttcattgggcttatggcattttctggagtctcaagagaagaatgtgaacatgattgttcccaatgctttccccgattttttacgttggatgcccggggcgaaagatatcatccgttacgacaaatataaagagtttgccgataagttgatagctgaggcggatgttatttgctgtttggatttcaatgccctgtcgcgtattgatgccatggcagatgctgttgctgcgtcaaaaggacgtaagatgatggtagaccatcatctttaccccggtgatttttgccggattgtcatttctcatcccgaaatctcctccacttccgaactcgtattccgtttgatttgccgtttggggtattttgaagatatcaccaaagaaggagcggaatgcatctatacgggaatgatgacagatacaggcggtttcacttataattcgaataaccgggaaatttatttcatcatcagtgagcttctttcgaaaggcatagacaaggatgagatttaccgcaacgtatataatacgtattccgaaggacgcttgcgcctgatggggtatgtgctgtatgataagatgcaggtttttcccgaattcaattcggcgttaatttggctgaccaaagaggaacaaggcaaatttcaatatgtgaaaggagatacggaaggctttgtgaacattcccctttctatcaagaatgtccgtttctctgttttcttgcgcgaggatacggagaaaaacatgattaaagtttccttgcgttcggtcggaaccttcccttgtaataaagttgctgctgattttttcaacggaggcgggcatctgaacgcttcgggaggtgagttttatggcacaatggaagaagctatcggcttgtttaaacaagctttattgaagtacgaagagctattgttggcaaaaaaatagttattttagtataattgcctaaaaacaatataaaagtttgcgggtgatttattacttttgcccgaaattataacagaatcagaatgaagaaattaagtatactgttcacatcagtgtttctattaggattgtttttccagtcatgtaacaatgaaaaatcctatgctgagatgaaggaagaggaaagagaagctattaagcggtttattgagaaagaagatatcaaggtaattagctttgagcagtttcaggaacaagactcaactacgaatgtgaaggataatgagtttgttcttttctcggacaatggtgtgtatatgcaaattgtagaaaaaggaaacgggaatgtactgaaagacggacgttatgaagtgctggcccgttatgtagaagagcagataacggcagatggcacaggggatactctgtctttgaatactattggtaatcttgcaccacatcccgatgaatttatgttaactaagtcgggaaagaatttttcggcttctttcactacagggcaaatggcttctgtatacggcagcacgtttgttcccagtggttggttgattccgtttaattatatcagaacgggccgcgagatttccggtcgggcaaaggttagattgattgttcctcatagcgagggacaaaagaatgcctctgcttacgtttatccttgttactatgaaataacttatcaattaggacgatgacactgattaaatcaatctcaggtatccgtggcactattggtggccatgcgggggaaggtttgaacccgctggatattgtaaaattcacatcagcttatgcaacgctgatacgtaaaacaacaactgtaaagagtaataaaattgtagtaggacgcgatgcccgcatctccggtgagatggtaaagaacgtggtatgcggaaccctgatggggatggggtttgatgtggtgaacatcggcttggcttctactccgaccaccgaactggctgttactatggaaggcgcatgtggcggtattattctgactgcaagccataaccctaaacaatggaatgccctgaagctgctgaatgaaaagggagagttcctgaataaggaagaaggaaatgaagttcttcgtatcgctgaagctgaagagtttgaatttgctgatgtagaccatttgggcagctatcgtgaagacaatacttacaatcaaaagcatattgacagtgtattggcattgaagttggttgatgtggaggctatccgcaaagctgatttccatgtagctatcgactgtgtgaattctgtgggaggaattatccttcccgaattactggaacgtcttggtgtgaaacatgtagaaaagctatattgtgaacctaccggaaatttccagcacaaccccgaacctcttgaaaagaacttgggtgatatcatgggattgatggcaaaaggcggctgtgatgtggcttttgttgttgaccctgacgttgaccgtctggctatgatttgtgaagatggtaagatgtacggtgaggaatatacattggtaactgttgctgattatgtattgaaacatactccgggaaatacagtttccaatttgagctctacccgtgctttgcgtgatgtaacacgcaaatatggttgcgaatataatgcttctgccgtaggtgaagtaaatgtggtgacaaagatgaaagcaacaaatgcagtcatcggtggtgaaggtaatggtggagtcatctacccggaaagccattgcggacgtgatgctttggtgggcattgctttgttcttgagtcatttggcacatgaaggtaagaaagtaagtgagttgcgtgcttcttatccttcttattttattgcaaagaaccgcattgacctgactcccgaaaccgatgtcgacgcaattctggcaaaggtgaaagaactttataaagatgaagaaatcaatgacattgacggtgtgaagattgatttccccgataaatgggttcatttgcgcaagagtaacacagaaccgattatccgtgtgtattcagaggcgtctactatggaagctgctgatgaaatcggacagaaaatcatggatgttgtttacagcttagcaaaataagatattaaatactttaattttttatttgccatatcgggcggcaactcttgttgtcttcttgatatggcaaatgtttttttaccattaaaagaaatacgatgaaaaaaggaacatttatggcattggtatgcctgggactgatggcattgaccactgtcggtcagacttcggggaagaaaggaacatggaagctggtttggcaggaagaatttgacaacaaagccggatttgacaccacatcatggagcaagatacctcgtggaacggcagactggaataactatatgtctgattttgattcatgctacgccatgagagatggaaatatggtcttgcgcggcattgtgaattatacgcaaaagaatgataccgcaccctatcttaccggtggcatttataccaaaggtaaaaagctttttaccggtggaagggtagagataaaagccaagttgcagggagctcgcggtgcatggcccgctatctggatgctgcccgaaaatgcaaaatggcccgatggaggtgagatagatatcatggagcgcttgaatagcgacaccatcgcttatcaaaccgtacattcctattatacctataaattggggtttaaggacactcctcctcatggtggcatcaataagataaatcctgatgaatataacatttactcggtagatatttatcctgacagtttggtctttgccattaaccatgattacacgttcacctatccgcggataagtactgacaaagaaggacaatatcccttttatcagccttattatttgctgatagatatgcagttgggtggttcatgggtaggaggcgtggacccgaaggatttgccggtggagatgctggtcgattgggtgagatattatgaaaaagaatgataccttacatctagtcttctacacggagcatgtcactcattatgccatctgaaatgaaaatacccgggcgtgtcagttttagtgtatcattgactatttccagtgttccttgtttcagataaggctgtgccatgcgcagacaataggcgtacagttcttcaccatattctctgcgaagcttggatagcggcattccccatttggtgcggataccggtgattacaaagtcattatagcgggtgtacaaatcgagctcttcaatctcgaatgccggtatcccgccgtctatccctttgatgtattcattcagcgaagcaatattccattgacgcgagatgccgttgtaggaatgtgccgacggtccgcaacccaggtatttctttccggtccagtaactggagttatggcgggaatgcaatccgggcaggcagaagttggatatttcataatggtcatatccggcggcactcaggctgtcgatgagtgtaccgaacaaagaaacgcttaagtcttcatctgcttcggctactttgtgttgttcgcggagtttccacaaagcagtattttcttcgtatatcagatgataagcggagatgtgttcgggatgcaggtttactgcctgctccaagtctttttgccacgaatcgagtgtttcaccggggagtccgtacatcaggtcgatactgatgttatgaaatcctgcccggcggcagttgttaaaagcatggatagcccggtctgcagtgtgacgacgatgtaatagtttcaacatatcctcgttaaaagtctggattcccatactcaggcggttgaatggcaggctgcggagcatggtgatatattccggagtcagatcgtcaggatttgcttcgagtgtgatttcggcatcgggctccacattgtataccttatatatatgggaaaatatgctgataaagtcctcttgtgacagttgtgaaggagtccccccaccgaagtagatggtttctattgtttctcctccgatataatctttgcgcatttccagttcccggcacagggaagatacataagctgttttcttttcgctttgggtggtggaaaagaaatcgcagtagatgcaacgtcgtttgcaaaagggaatatgtaaatagagtccggccatatatttaaataatgtgcaaaactacgaaaactatcattgctttttgcggtatcgaactgatatttatatttatttgagggattatcggaagaatatatggaattaaggccaagaataagaggatataacgtttaaggacctgataaccctgccgtaaaacatagtttagtaacacctgccttgaggttgttttttttgtctttatttcctaatttgcgctccacttttaaggagatatgagacacatatccgtttgttaataattaaatcttagatatcatgaaagtatatcagactaacgaaattaagaacattgcactccttggcaatgatggatcaggtaaaaccaccctcacagagtcattactctttgagagtggtattataaaacgtcgcggcagaattactgccaaaaacacggttagtgattattttccggtagagcaagaatatggttattcagtgttctctaccgtttatcatgtagaatggaacggaaagaaacttaatataattgactgtccgggaagtgacgactttgtaggtgccgcacttactgcattgaatgtaacagatactgctattcttttgctgaacggacaatacggtcctgaagtaggtacacaaaaccatttccgctacacagaaaaactgggtaaacccgtcatcttcctggtgaaccaactcgataatgaaaagtgtgattatgataatgtattggaacagttgcaaaccatctatggttctaaagtagttcctgtacaatatccgattgagaccggacctaatttccacgagctgattgacgtgctgctgatgaagaaatattcatggggtcctgaaggtggtgcacccaccatcgaagaaattccggattcggaaaaagaaaaggcgatggagctgcacaaagcattggttgaggctgctgccgaacacgatgaaacgttgatggagaagttctttgaatcggaatcactgactgaagatgaaatgcgtgaaggcatccgtaaaggattggcggcacgtggcatgttccccgtattctgtgtgtgtgcaggtaaagatatgggtgttcgccgactgatggagtttttgggaaatgttgtaccgtttgtagatgaaatgcccaaagtacataataccagaggtgaggtggtagaaccggatgctgaaggtcctacttcactttatttctttaaaacagccgttgaaccgcatattggaggagttcaatatttcaaggtgatgagcggaaccgtgcatgaaggtgatgatttgacaaatgcggatcgtggctcaaaggaacgtatggcacagctctttgtatgcgccggtgcaaaccgtatccccgttgaagaactgcgtgccggtgatatcggttgtacggtgaagctgaaagatgtaaaaaccggtaacacactgaacggtaaagattgcgataaccgtttcaacttcattaaatatcccaatgctaaatattctcgcgctatcaagccgctgaatgaggcggatgtggaaaagatgatggtcgtactgaaccgtatgcgtgaagaagatcccacctgggaaatcgaacagtctaaggagttaaaacagactatcgttcacggacagggtgaattccacctgcgtacgctgaaatggcgtttggagaacaacgaaaagttgcagattaaatttgaagagccgaagattccttatcgtgaaacaattaccaaagcagcccgtgccgattatcgccataaaaaacaatcgggtggtgccggacagtttggtgaagttcatcttatcgtagaaccttattatgaaggcatgcctgttcccgatacgtataagttcaacggacaggaattcaagataaatgtgaagggtaccgaagaagttccattggaatggggcggtaaattagtattcattaacagtgtagtgggaggtgccattgatacccgtttcatgccggctattttgaaaggtattatgagccgtatggagcaaggaccgttgaccggctcttatgcacgtgatgtccgtgtgattgtttacgatggcaagatgcacccggtagattccaatgaaatctcctttatgcttgccggacgtaatgccttcagtgaagcattcaagaatgcaggtcctaagattctggaacctatttatgatgttgaagtattcgttccaagtgataagatgggcgatgtaatgagcgatttgcaaggtcgtcgcggtatgattatgggtatgagcagcgaaaacggttatgagaaattggttgccaaagtacctttgaaggaaatgtcttcttattccacttccttgagctcacttaccggcgggcgcgcttcattcatcatgaaatttgccagctacgaacttgttccgggcgatgttcaggataaattaatgaaagaatttgaggcgaatgaaaataaggatgaataacgtaaactgtaagaaatgatatctagaaggaacgcttttcgttaaaaaagcgttcctttttatttaagtaaccttaaacttttaggtttattatttggttttgaacttaattttttattatttttgcaaaccaagcggcgttaattttgttatagtagtcagattattagtttaaatgactttttcggttaattatagagaattgccgtttaaatttggttaatccgttatgtaataaggtttaacgcttttaattttgctggcatgaaaaagtctactatttggatattaggaattgtaatggggctctcatttctgagtttgctttacttgcaagtgagctatattgaggaaatggtgaagatgcgcagggaacaatttgatgaatcggttcggcgcagtttggatcaggcgtgcaggaatattgagttggtagaaacaaagaaatatctggaggatgatgttgttgctaccgaaagagctgcccaattataccggcagcaggccgccaaagaaggaaaagaggaaaacgaattggtcgcacatacacagcattatgctgtatcttcggacgggttggacgggtattccactttcgaactcaagatgaagattagtacaaaccgtccggccaatgttcccaaggcaattatctctaccggtaaaaatatcccgcaaacagccagggcattgcaggaaatcataaaggagagatatgtataccaacgggcattgttggacgaagtggtttatactattttgcgcacagccagtgataaaccgcttaaagagcgtgttaactttaagcagttggatttgtttataaagacggaactgttaaataacggcattgatattccgtatcattttacagtgacagatcgtgagggaacagaggcttatcattgtcccgactatacgaacgagggtagcgagagcatgtaccgcaaggtcatattccaaaatgatccgcctgcacgaatgggaatggtaaatgttcacttccctgatttgaacagttacatattcagttctgttaaatttatgataccgtcactcatttttacgtttgtattgcttgtgacattcatctttactatctacatcatcttccgccagaagaagctgacagagataaagaatgacttcatcaacaatatgacacatgagtttaagacacctatctctaccatttcattggcagcacagatgttgaaagatccggcggtgggtaagtctccggctatgttccagcatatttcgggagttatcaatgacgagacgaaacgtttgcgttttcaggtagagaaagtattgcagatgtcaatgttcgaaagacagaaggcaacactcaagatgaaggaagtgaatgcaaatgagctgatagcgggagtcgttaatacttttacgttgaaagtagaaaagtataacggaaaaataacttccagtttggatgcagagaatcctgatatatttgtggacgaaatgcactttacgaatgtaatcttcaatctgcttgacaatgcagtgaagtataagaaaccggaaggagaattgctgctgaacatccgtacatggaacgaatcgggtaaactttatatttcgatacaggataacggtatcggcatcaagaaagaaaacctgaaaaagatatttgataagttttatcgggtacataccggtaatttgcacgatgtgaaaggcttcggtttgggcttggcatacgtgaagaaaataattcaggaccacaagggcgttatacgtgctgaaagtgaactgaatgtaggaacaaaatttataattgtattacctttattaaaaaatgaataatatggacgagaaattgcgtatcttgttatgcgaagatgatgagaatcttggcatgcttttgagagaatatttgcaggcaaaaggctactcggccgaactttgcccggatggtgatgccggctacaaggctttcctgaagaacaagtatgatttgtgtgtactggatgtgatgatgcctaaaaaggatggtttcacgctggcacaggaaattcgtgctgcaaatgctgaaattcctattatcttcttaactgcaaagacattgaaagaagatattctggaaggttttaaaatcggtgctgatgattatatcaccaaaccgtttagtatggaagaattaactttccgtattgaagctatcctgcgtcgtgtgcgtggtaagagaaataaggagagtaacatttataagattggccgttttactttcgatactcagaaacaaattctgtctattgatggcaagaataccaagcttaccactaaggaatccgaattgttgggcttgctttgtgcgcatgccaatgaaattctgcaacgtgactttgctttgaaaactatttggattgatgataattacttcaatgcccgaagcatggatgtatatatcactaaattgcgtaagcatttgaaggaagacgactctatcgaaattatcaatattcacggcaaaggttataaactgataaccccggaagttgagtaatgaggtcatacatataaaaagtccgaaacactcgtttcggacttttttgattgttaagaatttaaataaacgaatcttttttttaccgcaatcgttgttatacatttaattccgcagcaccatgtcggtgttgtttattaaaatcaataattttatgtgtaacaattcatttttttcttttatgaatgagcagaaagaacttctgctgcaaaacgggcagtttaagaccgccgtttcctattcatgtaccttaaacagttttttcaacttccgtagagggaaagacctcggcatcgaagaggttacttcagaactgatacagagttatcagtcttggttgaaacagcgtggtgtggtggcaaacacctcttctttttatatgcgcgtattgcgtgctgtatataataaggctgttaagaaaaacttgacagtgcagcaacgtccttttgaagaggtatatacaggaattgataagactcaaaaacgtgctttgacgatagaagcattacgcctgctcagaaacctggatttaagtcacaagaagaagctggcttatgcccgtgatttatttatgttcagcttctatacacgtggcatggccttcgtagatatggcccatctgtgtaaagagaatataaaagaaggtaccatcacctatcaccgtaaaaaaacggggcagaaactggttatcggacttgaatcttgcatggcagaaattatagaaagatacagttcattcactaaagattccgattatgtattaccgattcttcattcggataatcctagaaacatacaggtgcaatattataatgcattacgctatcagaatatacagcttaaaaaaatagaaaagttgttggatattcctcatctgcatctcacgacttatgtgccgcgccacgcctgggcttccatcgctcgtgaaaatggtgtttcactatctgtaataagtgagggcatgggacatacttcagaaaaaacaacacgtatttatttagcttctttgagtcaagtagtgatggatgaagctaaccataaggttttatcatcgatttgaaacttatggactttgtatcacctcttacacagagg

SEQ ID NO: 6780 - DNA, 230 bp, Unknown
  gut microbiota DNA sequence
ttgccggcaacggtaactcgtaggttcattatgcaaaaggcacgccgtcacagcttacgctgctccgaccgcttgtaggcgcacggtttcaggaactatttcactcttctattcgaagtacttttcacctttccctcacggtactggttcactatcggtctctcgggagtatttagccttaccggatggtcccggctgattcacgcagaattcctcgtgctccgcgctac

SEQ ID NO: 6781 - DNA, 2142 bp, Unknown
  gut microbiota DNA sequence
caaagtcttcaagtacggacttacccataatgggtgtgttggtgccaatatcctctataaagtcatatacgaatagaagtagataccaaaacttactaacatctagcttatacgcttcaatggtattctgtaaatcttcattagttagaaacttctctttgtaagaatcatccagttttctgtattcccgttttttgtattcttccaaagttcctttgaaagtgttcatttctttgtttctctcgtatctttcttcaacggacaagtttctttccgcatatctgttggcaaatatagcaggtgctgtagattctattggtatcattcccttatctgtttcttcataatctggtagaaagtggttggctacttcccacacatattctaatagtggctcatccagacatttgtagctttcagtccaattaactttcaaatctgaaagttcctctatctgatatagtttttcttctagcatggtacattcattattagttctactgcaaaataacagaaaagtttgtagaatacagacttttatattttatattcttccagattgaaactttcctgcaactgtttaaatgtgtattctttctctttgatacgttccaagacaaaagaagtcattttaggttgctctggtaaagttggaactattacagtccgttttaccttgttgaatctgaaagttataggaagtgcccataaaaatggtttgttcctattatgatacgctatgatagtttccaagtcattcttgtaagtaatgactatgaatccgctatttaaagaaacggaataataaactactttactaagtaattctctgaacatttctcccttgccctccagagaaaggctgtcaagttcttttcttgactgactctttatttcatccgctattcttctgttattggatgcaatttcttcatcaatggctgtcttttccgcttctatactctttatctggctgtctattgaatccgccttgccattcaatgccttgactattgttatattggtggaagccataacattatctatgactgttttcaaatcagactgtagtttggctatttcagaatccttttcttttatgctttgtgtcagttttatattttcagcttctatttctgcaattttctcattgctcttggcttggtaagtttcatccagagttctaagtctgacatctttccacaccgcatatattaaagtttcagcctttatgccaacattggcacatgggctttttattcccatctttattctgtcaagacatctgtaggtaatgcaggatgaggttctgccatacattgaggtttgcccacaaggacacttgataatgcctttcaacgggttataatgtttttgtgcctcaccgctataattcttgttctcctgcactttcttgtgtgccagattccagatttcatctgatatgaattttacgggaagttccagtttaatgcctttccaatatctgacaccgttataaatggaatcatttataattgttctgatagactgttcatagaacggtttgtttcttgctgtcctatatccaagcatattcagtttttctgctgtttttcctagagaaagaccgtttgccacatagttaaatatatctctgactaactgcatacgttcttcatcttccaccaataacattttgggggttgctccctttatataattcggattgggcactgccttaaagccagttggtatattactgtctgtaagcattaacggaaacgcttgtactttactgtctttacctgtagtcatacggcttactattttctttctttcatccgctgctccataggctttgattgcaagcattaaaaagtcagaaagaatgatagtttttccagcttcatataccttgtctggttcgtctagtattactaaatccacgtttctaatgattgtgtgaatctgtgtcaaagtttcaaatatatcatcttgacgtgacagtctagacaactcactaactactaccatgtcagcaacgctattggtaatgtttagaatactgttcaatccgtttctgttgctgactgttccagatatggcataatcttcttctattcttaacagagagtaccccttattctcacaatactttct

SEQ ID NO: 6782 - DNA, 3027 bp, Unknown
  gut microbiota DNA sequence
ctgcctgaaagcagtattcagaacctattgtatggattatcctgattatgagttttattgcacttatcaggcatcacgcaaactaaaagggttacggaatcatcagctacatacggtggccgagttcttcgggtttgatttgaagaatcaccatcacgcattggcagatgcggaagcttgtgcatggatagcccgatatgtgttgtagtttttatatttttccaataataatgatttcctttgatgatgatacaagaagatacatataaaacgataatcggtgtagccgaaggtatttatacagagaagagaagtaaatttatagctattgccattcctgtacataccgttgaagagataaaacagcatcttgatatttatcaaaaaaaatactatgatgcgcgtcatgtgtgctatgcttatatgcttggacatgaaagaaaagactttcgtgccaatgataacggagaaccgtccggtactgccggaaaacctattttgggacaaataaattctaacgggctgactgatattcttattgttgtcgtgagatacttcggtggcatcaaactgggaacaagcggattaatcgtcgcctataaagctgcggcagcagaagcgatagccaatgccacaataatagaaaaaacggtggacgatgagattgccgttgcttttgaatatccttttatgaatgacgtcatgcgtatcgtaaaagaagaagaaccggaaatcttggaacagtcatacgatatggattgcctgatgaagctccgtatccgccggtctatgatggggaaattgcgtgctcgcttggagaaagttgaaacagcccgaattatcgaataacccttttggcattattgttggttcaatggtgtttccgggaggctttgattgaaacatgtttgtaacatgaatgacacatcgcagatatatcggttctctatctttgcagtcgaaaataaaaagtcacattaataataaagatgagaagaacactcgcagccgctgtctttacagctttaagcatagcaaccgcaggtgcgcaactaactattcccaaggaatatcttcctaaggttcacgggactatacgtagtaaatacgagcttcagactactacaggcatgcaacgctttcaggtaagaaacgcccgtgtcagtttggacggaaaggtactgccggttattgcatataaggcagaaatagatttatcggatgaaggaagcatcaagatgctggatgcgtatgcccgcttcgttcctaatgatacatggaatttgacaatgggacagatgcgtgttccgtttactattgatgcgcatcgctctcctcatcagcaatattttgccaatcgctccttcatagccaagcaggtggggaatgtgcgtgatgtgggtgctaccggagctcttgctttagatggtaatttgccgatgaagttggaagccggactattcaatggctcgggactgactcaacaaaaagaatggcatagcaccctgaactattcagccaagctgcaattaatgccttggaaaggttataaccttactttaagcacgcaaaaagtacacccggataaaaatagtatctatatgtatgacatcggtacgtattatgaattttccaattggcattttgaggtggaatacttatataaaacatatgctcacgatgcttttaaagatgtgcacgcttttaatggctttgtaaattatgatttgcctatcaagaaagggctgtttaagaaaatatctttcttgggacgatatgacagtatgggcgatcatagtaacggtgttgccaatgaagaaggacaactttatatcacggactattcccgtcaacgtctgaccggtggcgtgacgctgagtttcggaaaagcttttcaggcagatttgcgtatcaattacgagaaatatttttatgatgacttatctctggctaaagaatcggagcaagacaaattcgtaatggaactgatggtgagattctaatctcaccaacgttccttcatcatttcttccattttcagcagctcatctctatattgggcagcttcgataaattccagtttcctggcagcttcctgcattaattttcgtgtacgttcgatagccttttccatttgaggcttagacatgtattggacaaccggatcggcggcaatactgccgttggatggctcaacgtatgctttcggaacttttacttcatcatcggcattggtatttcctgtgcccagaagagctgcattgcgtgcacgtttaatctgtttcggagtaataccgtgctcctcattgtaagccaattgtttttcgcggcggcggttggtttcatcaatggtcttttgcatgctttcggtaatgcggtcggcatacatgatgacttttccgttgatgttacgggcagcgcgtccggccgtctgtgtcaatgagcggtgagaacgaaggaagccttctttatcggcatccaatatagctaccaaagacacttccggcaagtcaagaccttcgcgaagcaggtttacgcctattaatacgctatatgttccctgacgtaattcatccataattttcacccgctccaacgtatctacatcactatggatataattacatctaatgtcgtgacgcaataaataatcggttagctcttctgccatacgtttggtcagtgtagtgactaatacgcgctcttctttttcgatacgctgctgaatctcctccatcaggtcgtcgatttgattcatgctggggcgtacttcgatgacagggtcaagcaatcccgtcgggcggatcacttgctccaccacaatcccttcactttgtatcaattcgtaatcggcgggagtggcactgacataaacaacttgttttgccaattcttgaaactcttcgaactttagcgggcgattatcaaatgcagattccatccggaaaccatattccaccaggttggttttacgtgcgcggtcaccgccatacatggcgcgaatctgaggcacactgacatggcttt

SEQ ID NO: 6783 - DNA, 11903 bp, Unknown
  gut microbiota DNA sequence
aatcagaaaatcatcgggaaagaaatccagcaggcaataaggacgcgtaccggctacacgaccgtcaaaatagcgcgaataattctctatgcccgagcaatgacctaactcccgtatcatttccatatcgtaagtgacacgttcataaaggcgtttcgcctcataatgcttgccttcttcttcaaatttagccacttcttttgccaaatcatcctctatttgatagattgcctgcaactggctttctttggtggtcataaagagattggcgggataaatcttgtattcatcaaaagaagcgagacgtatgccggaaacagggtccacttcttcaatactgtcaatctcatcatcccaaaacatcacgcggagcaggttgtcgctgtatgccagataaatatctaccgtatctcctttgacacggaaattgccacgattcagttccaaatcattgcggacatacaggctgtctaccaaacggcgtagaaacacattgcggtccagtaatttaccctttttgatttcaatgacattattatagaaatcagaagggtttcccataccataaatacacgatacggaagaaatgaccaccacgtccttacggccggaaagcaaagcggaagtggctgccagcctgagcttgtcaatctcctcgttgatttgcaagtctttctctatataggtatcgctggatgggagataggcctccggctggtagtaatcataataagacacgtaatactcgactgcattattaggaaaaaagttcttgaactctccatataactgtgctgcaagcgttttgttatggcttaatatcagtgtgggtttattgatgtttttgatgacattggcaatggtaaacgtcttgccggaacctgttacacccaaaagtgtctgggcaggcactccttttaatatgccttctgtcagctgggcgatagcttcaggttggtcgccggtcggttgataatcagaaatcagttcaaaattcataattccatgtttataaagactaagctgtaaaattacagttattttctcttataacacgtatacatcctgaaaaaaacaagattggtcgactttttagtattaaaaaacatataactgttgtatttttcggtggaaaggcgtaaatttgcgcaattatttaaataagatgaaaaaatatatcattatagctcttgtctccggcagtgtattaacatcatgcggagagtacaacaaagttctaaaaagcacggactacgaatataagtacgaagcagccaaaagttactttggcaaggggcagaacacaaaagctgcggcaattctggaagagttgataactattttgaaaggaaccgataaagctgaagaatccctttatatgttaggaatgacatattataaccagggtgactttataacggcgtcgcactatttctccacatactataatacatatcctcgtggaacttataccgaacaggctcgtttttattcgggaaaagcattattcttggatacaccggaaccccgtttggatcaaagcagtacttataaggccattcaggagttgcagatgtttatggagtatttccctgccagtaaccgtcatcaggaagcacagcaaatgatattcgatttgcaggataagttggtgatgaaagattatatggcagcccgattatattatgatttgggttcttatacgggaaacagttcatatagcactaccggaaataactatctggcatgtatcgttacggctcagaatgctttaaaggactatccttataccaagttgcgcgaagatatttctatcctgcttttgcgcgccaagtatgatatggccaaggaaagtgtggaagaaaagaaagaagagcgtatgcgtgatgccattgatgaatactatgcctttaagaacgaattccccgaaagtaaatatattaaagaggtggaaaacatttataaggatgccaagaaatacgtgaaggaaattaacgaataaaaaactaaataagaaattatggattacaagaagacaaacgctccgtcgaataccattacccgcaacatggtggaactgtgtgaggatacgggcaatgtatatgaaaccgttgctatcattggtaaacgtgccaaccagattgctgttgagatgaagaatgacctttcaaagaagttacaggagttcgcttcatacaacgataacctggaagaagtctttgaaaacagagagcaaatcgaaatctctcgttattacgaaaagctcccgaagccgactttgattgctgcccaggaatacgaagaaggtaaggtttattatcgtaacccagccaaagaaaaagagaaattacaataaaaggttctttccctaaaggccgtttcactgaagcggccttcttttttgtataaccgttattaaaagattattattatgatacaacgcattcaatccgtttatttattggtagttaccattctgctcatcgtttgtatgtgcactcctgtaggagcctatattgctgaggattacagtgtctcaaagtttactaatctgtgtattgtctctgccgacggcgtaaaggactatgctccttgggctatgtttgtcattctggtagtagcggcattgctttcttttactacgatatttatgtttaagaaacgtatgttgcagattcgtatgactattttcagcactatcttactggtaggttattatgctacactgattacttttatctttatgttgaaggatgatagcatgacattctctgcttcgtggactttatgcttgccttttgtcgctattattttaaattggctggctattcgtgctatcggtaaagatgaagtgttggtgaaagcttatgatcgtttaagataacgattccttcatttggctgaagaatattataaggggttgtgtcaaaaaacgtggataatgctgtcttttggttcgtaggggcgaggtccgctcgcccgaaaacagtttgctttgtgtcttcgggcaggcaaaccctgcccctacagctgacgatgggataggccggtttagttttgacacaaccccttataacaataaagcatattttttataatacaccggcgtctgtgtcgctattgttaatcttcttgttcttgctttgatattggcggccgaaactgaagttgtaggcaaaggtcaggaaagccatgtgagccgactccttcacatgccatgctcccttggagccggcgtagcgattcctgttttcctgttcgcgtttatagttatcagagaaaggattgatgattcctgctcccaaattgactttgcccaagcgatattgcaacataaggacatgcaagttctcgccactgctcaagctttcgccaaagaaactgttgcggttgctctgtatcatgaagtatcccataaatcgtttatacatggcggttgcctccaattcgtaataccagtttgtataggtgtgattataatccgttccgtgactccaataacggctcagccccgtactccctcttaattgcagtacatcccaaagcattcccacgcggacagataactcattttccaaagactggaagcgatggtggttggcatagctgcgtatgaatttcccgttctcacgataagtctgctccatgatgacatcgggcgcattgcgatagttggtataccaatttatctgcactttcttcttgttataccccaatgtcaggttcaaccggtagttgttatatggtttcaaatcagggtttccacgtctgatttgcaatgagtctatcaattggtctacagcacttaactgagatagtgaaggctcattactgtttaaactgccattcatgcgggcataaaattcttcattaaatgtataactcaggctgaaacgtggattgaattggtaagtttcataatcttcttgtccgatttgttggtaccaggaacgggtgacacctacccccagcgtataattcatctttttccattttccgttatattgcgcataggcatacgtgtcggcttgtttcatctgtgtgttatagttcagtgttccgctatactcattgtccgaatatgcctgggtgtgtttgatacccgaactgaaacggcttttcttgaatgtcttttcatagattccttccgcgatgatggagtatttgtcaccctgcacacctgagaagtaatcggcaacaaactcattatcgagaatttcctgatagttttggcggttatgactcccgatatatgttcctacaacgttcaatgccagaaactgcttcttctttagttccttctgaaaatagatgtcgaaccagggacgactgttacggttgtgagcaaagtcaagtctttctgtggcaagttcgggatattcacgggtatacagtgtgctgtggaaaccggtccgtggtttgttttcattccaaaatccgatggaggcgttcaacatataattatccgcttcctgcaagttataactgataccgccccattgtgcgtattccgaagtaacatcaggaatgccttcttccgtccggtgcagaaaagtaccgtcttcctttgcaaacgtttcttcattggtgcgccatgcattctcgaatttatgtgaatatgcgccataccatattccgaattcggatttcttgtagttcacttttcccgacacattatagtttccccacatcacatagggcgactgctgagccgaggtgctgacagaacctccaagttcataacggcggacaatgtagtttaccaccgctcctgcatctccgtagcgcagtccggggtcttccagatattctattcggaggatatccgatgggataagtgcctgaatttcttctttccccactttgcgtccgttgatacacagttgtacagaacttccgtcattcagggaaacgctgccatccagaggatttacattcagtcgtggaagcatcagattgcgtaataaatcgacaccgctatttgaagcagtgatttgttgcttgttgggaaacactaattttcggtcgaacttactgaccacattggttgcggaaaccgtcacttcttccagttgttgggaggcttcttccagttccagcgtacccaaatcgacagattgggaaagtccttgcaggtcaatgacgcttttcttaaaaccgatggcagagatgaccaatttataacttccttccgccactttttctattcggaaaattcctttgttgtcggttgcggcaccgttgacaaaagtcgaatcattggtttgcaggaccacattggctgctatcgccgcttgcttagtgcttgcttccaatactttaccggatatgcgtatttgttgtgcatggcatatacctgccaataagcatacggtcattaaaataccaatttttttcatgatgtagtttttttcgtgtcttcttggtcggagaccaattaatactgtttatcggattagacggtaataattaacttttagtttcaaatgaaatcgtaataatagttaaaaagaaaatgaccgggacacacatacgtatgtatcggtctttacgtatatacgcatgaggctacacatacgtatgtataaagcaacacgtatatatgtgcagccctacacatatatacgtgtcatgcgacctttgaccgaaaggcaatatcttcttcggatgagcctgccttatttggttatatcgaataaataagttgcccttacgcctatataggagtgggcagaccgaccgaaataatctttttttgtactcttataaaagtctcccaaccccatgtaataacgcccttccaacaagaagtgtccgatgcctgtgcttaattccagtccggcgccggctgcaataccataatcaaatttattttctacagccttaccgtattgctctgttaccccattggggcgttgtgaagtatcccaattatcactcatttcttctttatcgcttaaaaagaaaccgatttggggacctgcattgataaagaactttactcctcggttcagtgcgtcttttccgaaagcaagatgagccaaaagaggaatctcaacatagttcatggtgcggctgtatgtatttccggagccatcctcaatcttttcactccaaccgcgttgtgagtaattgatttccatttgcactccacacatcatcttgaagtatttttcggacatatagcgcatggtgacacccatctccatgccattcaaggtattttgtttgattttaggatcaaaactaacagagttcatgttcagtcctccatttattccaactgcaaaattatgtcgctcttcacctaattgtgcagttgccggcaaggtgaataaccatgccagaaccaatatacctatatatttatagttcttcattattcaaaatcgagtttaatcaattcatagttcttcgtaaaatgaacaaagaacactttccggttgataaagcctccccagttatttacgcgttcaaatttaaaacctgtctgaataggagtgactgtcactttattcagcttgtcttccaagttgcttccatattgtgataaccctttcaggaagaaatagcctgtgtcgaatcctaacattccatatttggggaatgtgttcgacatatccttgctgtaccatttgcgataggcagaagagaatcggatagcttcgggaaataaattgttagtatagaaagaagaatagaaataagtatccaattcataaaaactggccaaatggtcgttagtatacgtttgccattcggggtagccgaataattgcatccgataatcaggattgtcacgcagggtaacaattaactgcggtaataatttaatcagagcaatgtttgtaccggaagtaggaataaatacattgtccaaagtagcattcatggccccctttaatgattcgggagtaatggcctcaccttttaattcagtaaaaggtatgtgcttgcctttcaattcctctttcagtcccttaataaaatccgctttgtctttatcgccatcctctgcatcaaggaatattacattggcattggtaaatttgcgtgtaaagtgctcatatacttccgaatatagataagattgaggagtattaatctgataaatagacgggttgttgaacacctcattaccctttgaagtaaatggaatcactaagcggatattatttttcttggcaaaatccgccaccggtttaacctgttccggataagcaggaccgaagatgatattcatgtttttcatttcatctttggcaagaatggattttaccgaagaggtattattatatgtatcataagtgtatatatcaatagaaacacctttttctttcaaactgtctactgccatcaagaaaccttcatagtactctaccatgcggatttgttcatcacgattaccgctgccgtcggtcatgaacggaagcataacggctgcttttatggtggcaatcttaggattttccttcttactcttatcaaagagctcattgtcggtcggtatagtagtcggcgatacaggttgctcctgttccttttggctgtttccggcagatgtgtaggggatacacaaaaactttccttttttgagtttctctgtacggagttcgggattggctgcaatcagttcggcttccgtaatgccgtatagacggctgatgctgtatatcgtttcttttctttccacccgatgcatatcccgacatttaggttttaaaggggtggaagcggaagaaacagctccggccgattttacttcattgataatggtttcctcactgctctctgtttgtgcagggataacaataacctgtccgatacggaagttttccgcactgagtcccggattggccttacatatatgttgtgcagtgacaccatatctctgcgtaagcttatacagagtttctccggcctgaatggtgtgaaacgtttgttgtccgcttcctgcgttcttctgcggaatcttcaatctctcaccggcctttatttgttccgagcttcccggattcagtttaatgatatcggcagtagtaacgttatacatactggctatcgaatacaaactctgccctttggtaatagtgtgcagaaaatagctgtcagaggaatgcgtctgagccatcattccgactggagcaacagacaaagctgcgaccagatataatgcttgaataaatttcatttgtagtgtgttgattatactaaggggcaaaagtacaaaaaaaactgttttattcacattatatggaaagaatagcaaataatattaggctttttaattaattatttcgtccagaagcattaaatttgcctgccaaaagtagctgaaagcataaatatatgattgaagataaagaattaattaatgtatacggtgcccgtgtgcataatttaaaagatatagatgtagaaattccacgtaacagcctgactgtgataaccggacttagcggtagcggtaaatcttcattggcatttgatactatctttgctgagggacaacgcagatacatagaaacattctctgcatatgcccgtaattttctgggtggaatggaacgtcctgatgtagataagataacaggattgagtccggtgatttctatagagcagaaaacaacgaataagaatccgcgttctaccgtaggtacaacaaccgaagtgtatgactatcttcgcttgttgtttgcccgtgcaggtattgcatattcttatctctcgggagaaaaaatggtgaaatacaccgaagaacagattcttgaactgattcataaagattatcaaggcaaaaagatttttatgctggctccgttggtgcgtacacgtaaaggtcattacaaagaacttttcgaacaggtgaggaagaaaggttatttgtatgtgcgtgtggatggggaagtgcgtgagattgttcacggcatgaaactcgaccgttataagaaccatgatatagaggtggtcattgataaactggttgtaaatgaaaaggatgagaaacgcttgaagcaaagtgttgcaactgccatgcagcaaggggatggactgattatgatattggatgcggaaacagaaacggtacgccattacagcaaacgcctgatgtgtccggttacaggattgtcctataaagaacctgctccccacaatttttcatttaattctccgcaaggagcttgtccgcgatgtaaaggattgggatatgtcaaccttattgatgtagacaaagtgattcctgatcgtgaattgtctatttatgaaggtgccatagcacctctgggcaagtataaaaatgcaatgatattctggcagatagaagcattgcttgaaaaatatgatttcagcattaagacacctgtcaaggacttgacagacgaagccattgatgaaattctttatggttccgatgagcggattaagataaaaagcagcctcatccatacttcctccgactattttgtgacgtatgaaggaatagtgaagtacatacagatgatgcaggaaaaagatgcttccgctacagctcagaaatgggcggagcagtttgccaagaccgatgtctgtcccgaatgtaagggagccagattgaacagggaggcattgcatttccgcatacacgataagaacatctatgaattggccagcatggatatcaatgagttgtatgattggctgatgaaggtagatgaatttttagaggataaacaacgcagaattgcgagcgagatattaaaggaaattcgtactcgtttgcgtttcttgcttgatgtgggcttggactatctgtcattgaaccgcacctcggtgtctctttcgggaggagaaagccagcgcatccgtttggcaactcaaatcggttcacaattggtgaatgtactctatatattggatgagccgagtatcggacttcaccagcgcgacaatctccgacttatcaattcattgaagaaacttcgggatacaggcaactctgtcattgtggtggaacatgataaggatatgatgttggccgcagattatgtagtggacatgggaccgaaagccggccgtttggggggtgaggtagtattcgccggaactccgcaggaaatggttaagacagagacacttacctcgcaatatttaaacgggaagatgaagctggagattccatctgaacgaagggcaggaaacggaaaatccttatggctgaagggtgcgaggggaaacaacctgaaaaatgtggatgtggagtttccattgggaaaacttatctgtgtgacaggggtgtcgggcagtgggaaatccaccttgatcaatgatactctgcaacctatcctgtctcagcatttttatcgctccctgcaagacccgttggcatacgacagcatagaaggactggaaaatatagacaaggtggtgaacgtagaccaatctcctttgggacgaacaccccgttccaatccggcaacgtataccggagtcttttcggatataagaaatctttttgtcaatctgcccgaagcgaagatacgcggctataaaccgggacgtttttcattcaatgtgaccggaggacgttgcgaagcttgtggcggtaacggttacaagacaattgaaatgaatttcctgcctgatgtcctggtcccatgtgaagtatgtcatggcaaacgttataaccgtgaaacgctggaagtgcgttttaagggaaaatccatagccgatgtgctggatatgactattaaccgggctgtggagttctttgagaacgtacctcagattctgaataaaataaaagtcttgcaggaagtagggctggggtatatcaagttgggacaaccttccaccaccttgtccggtggagaaagccagcgtgtgaaattggcgacagagctttccaagcgcgatacgggaaaaactttatatatattggatgaacctaccaccggcttgcactttgaagatatccgtgtgctgatgaccgtgctcaacagattagtggacaaaggaaatacggttatcgttatcgaacataacctggatgtcatcaaactggcggattatattatagatatggggccggaaggaggacgcggcggaggacaacttctatccacaggtactcccgaagaagtagccaagagtagtaaaggctatacaccccgatttatcaaagaagaattaaagaattaagattattcggtatgaaagagaaaatagcaaaaacaaatgcagcgcgtctgcttgataaggctaaggtttcttatgaactgattccttatgaggtggatgaaaatgatttgagtgccattcatgtagctgccagtttgggagaaaatatagagcaggtatttaagaccttggtacttcacggagataaaacagggtattttgtctgtgttatccccggagaacacgaggtagacttaaaactggctgccaaagtatcgggcaataagaaatgtgacttgattccgatgaaagaactacttcctttgacgggatatatccgtggcggctgttctcccattggcatgaagaaacactttcccacttatatacatgaaacatgcactgaatatccgtttatttatatcagtgccggcatacggggattacaaattaaaattgcccccaatgaccttataaaagaagctaaagcggaagtaacatcccttttcatcgaataatcatgcaaaaagagccactttcgtggttctttttttttcagattggctaaaagttatatctttgcaaaaaatcaatattaactattaattataaatcttattacttatgtttgaaggacagcctaaaggcttatatgcgttagctctcgccaataccggcgaacgctttggttattacacaatgcttgcgattttcacactctttttgcaagctaagtttggatatac

SEQ ID NO: 6784 - DNA, 254 bp, Unknown
  gut microbiota DNA sequence
gttatttgcacctccccgaagcttatcgcagcttatcacgtccttcatcgcctccgagagccaaggcatccgccatgcgcccttgcttactttctttattatcgcacactgttgccagtgcgggatgatatatacttttagctctttactactaaaattactgttttgcttgtacaatatgtcatagatcgtttctcttttcagagagagtggagaataacggattcgaaccgttgaccctctgcgtgcaaggc

SEQ ID NO: 6785 - DNA, 2497 bp, Unknown
  gut microbiota DNA sequence
ctgtcagtccgctatccttcaggtcttctgtccttgaatgtaagctccaccttgtaattctcatccattctgagcgatgcctcatagggttttcccgccttggtggtgaatttcaggaagggggtagcttcccctgccatcagccgtgtcatctcttcgtctctcatcgtccgtccgttgaacatgcgcggaagatggaacgcgcagtcgggatctccgcatttggccaccctgtcgtagagtgtcactttgcctgtcccacatttcgggcaggcgcaccttgtcacacccgggttcccgacctgcagggcgagcagttccgacacgatcttccgtgcatactcatggacacccttcatgaactttccggcactgagccttccttcctcgatttcacgcagcgcctcttcccaggctgccgtcatagccgcatcggcgatcagcttgtctcctacgatgccgtatatctccagccccttcttggtcgggatgagacggtttccgatacgctctacgtaccgtcgtgccaccagcaagtcaatgattcctgcacgggtgcccggtgtcccgagcccgcacctctccgtcattttctttttgctttcaccgtccgccgtgccgccggcgttttccatggcagccagcagtccggcttccgtgaatggtggctgcggctttgtactgtcttccagtatctctgtttccaataccgccagcgtctctccccgatggaactgcagcagggattcgccttcttccgccatgtccggtccgttgtaaatgtcccgccatcccggatacttcacccgtgaggtttcggtctcgaataccattccgccgtaatcggccctgacacgtatggcctccttgacgcatccttcggaaaatgcttccagcatccttccggcgatcagggaatagatgttctgctcgtccggggagagtccttcgggcatctctcccgtgatgagaagggcatggtgtcctgctacgctgtccccgtccaccgcatgagggttcagtcctttcccgagcagcctttccacgtgccttccgaagcggggatgccctttaagggaggcgacgagcgtgggtgcctgcttgaatatgtcttccggaatgtggcggcatccggttctcggatatgagacgcaccctctttcgtagagcctttggacgacggcgagtgtctgtccggctgtcatgcccaggcgtgtattggcttcccgctgcaggccggtcaggtcatgtggcagaggcggctcctccatgatctctttcttttccacggcaaggaccgtacagcggcctttacccttcaggctggcccgggctttttccgcatcctctttcctttcataccggaggggacacgtgaaaagcactttctgcccgtccttgcagacaccggtctgcagatggaaacagctcacgggcacaaaatccctgttttcaagataacggcggcagaccaatgccagcgtgggagtctgtacccgtccgagcgagtggttgcccatgccggcagctatccccagggcgatgcttgcgttcacgcccagtatccagtccgcttccctgcgtgccctcgccgccagggcgaggttgtcgaagtcaccgtcctctctcagatttttgaaaccgtccaggatggccttttccgtcagggaggatatccacaggcgcagggccggtttacggtaaccgagatagtccagaagatcccggctgaccagttctcctccacgccccgcatctgtggctatgacaagcccgtcggcgttttcaagcaacctacggagcacttccagttgccgggtggctaccgggtcggtgacatacccctcctccgtcctgacttgtctgacaacgaggcggaacgggaccggaatgaggggaagcgcctgccgttccacacgggcgggtccgtaagcggacggcggtgcctgtgccagcaggtggccgtaagttcatgtgacggcatacccgttgccgtaaagatatccttccgccttttcacgggcgcccagtacggaggcgatgctccttgccatggctggtttgtctgtaagtacgattctcataatttttgtctttatcaggtgaataattggttacatgctcatgcctttgtttttggcctttgtctttttgacttttgcgttccggaccgttcttttctcctttacggtaccccttccgtttttttccgccttttcggagagcggtacggcatcttccgtcccatggggaacggaaggggccttcgggctgtcgggccggcgggcgggaagcatgtcatacccgcccgggccggcatccagcctcacgtgttccaagggacgcagatattgtagccctttcccgccagaggtgaactcgtagatgaccgtctcccttccttgcagcaggctttcgtagttctggtaatacaggctctccggcggcacgccgttctgccgcagcatcgtaagtattcgataaactccctcgtata

SEQ ID NO: 6786 - DNA, 9219 bp, Unknown
  gut microbiota DNA sequence
aaataaagtgttatatatcagtatactatatataattttagttctgcaaaaactttggtaatttcatttataggtatgcaatctcaggaagtgtctattaagccaacaataaacattgttttaaaacctgatacagaaacacttgacgaagttgtagttatcgcttatggtacagctaaaaaagaatctttaacaggttctatttccgttgtagataataaaaaaatagaaaaacgcatcacaacaagtgttaccggtgcgttagaaggagccgcaccgggtgtgcaagttaacaacacctatggagaaccggggaaagctccatctatccgtatccgtggtttcggtacattagtcagcggagcttcagaaccactttatgtggtagatggtgttccttttgatggaaatatggctgaactaaattctaatgacattgcaagtatgtctattttaaaagatgctgcatcagccgctttatatggtaaccgagcagctaacggtgttgtcctaatcacaaccaaaagcggacatgctaccaacaaaccaagcattacactacaaatgaatcagggtatttataatcgtggtattcctgaatatgaccgtttggatgccgaccgctggatggaagcttcttggatggcaaaaaaatatgccatgatgtctaataaaggtatgagtgcaacagaagccggacaatatgcgactgaacatcttattacagaatccatcggacgcaatatctataatgcagcagacaatcaattatttgatgccaatggtaaactgacagcatctcgcttatccggttatgatgatttagattgggcagatgccattgagcgcaatggtcatcgtcaagattacaacttgtcggcctctacttccggtgaaaaatacagtatatattcttcaattggttatctgaaagagaaaggttatgtaaaagcaacagattatgaacgctattccggccgtatcaattctacatttacaccgaataaatggtttaaaggaggtgtgaacctgaccggttcgtggactaagcgtaactataatgacaatgccaccggtagttattattccaatccgttctacattactcgctatatggcaccggtgtatcctgtgtatatgcataatgctgatggtagttaccaactggatgaaaatggtgaaaagatttatgatacaacttctccatatttgggcaaccgtaatatcgcttatgaaatgttgttcaataaagaagaaagcattcgtaatgtattaggaggacaagcttttgccacgattacattaccgttaggattgtctgtcacagtaaaaggagacttaaacaacagtacaagtaataacaaaaaatatgataatcccaaaatcggtgatggtgctaccaatggtggtcgtctgacaagctatgcatatcaataccgcacagtaaccttacagcaaatattaaattggaattatcaattcaaagaaatacataatatagaagccatgattgctcatgaaagttatagttgggagcgtaaatacacatccggcatgaataccggtatggctgtagacggcaatttaacaatgggcaatttcctaaccaactcttacttcaacggtagcgatgatgaagacaagacggaatcttatttggcacgtgtaaaatacaactatgataatcgttatttcatcgaaggttctttcaggcgtgatggttcttcacgcttccataaagacaaccgctggggtaacttctattcggtaggtgctagttggaatatgaaaaatgaagccttcttagaagatgtggaatgggttgatcatttaaaaatgcgtgcttcatatggtgaagtgggtaacaatatgggggtcagctattatgggcacatggctttatacaccattgataagaatggtggcaatcctgctctattgaaaaagtcattggcagctcccgatataaaatgggaaactacccaaaccgtggatgtggctgtagaaggccgcttgtttaacaagctaaacttccaaatcggttatttcgacaagcgttctaaagatttgctgttcgaagtccgcttacctctgtcagccggttcttatccatggcaggacaaggtcatgaacttgacacaatacaaaaatattggaaccgtttccaaccgaggctgggaaatctcattaaatgcagacgccatagacagtaaagattggaaatggaacattggcgttgatgccactttcttgaaaaacgaaatcgtaaaattgcctgacggaaaagacattctgcacggtatgcagaactattcggaaggtcattctatttatgaattctatacataccactttgaaggagtagaccaattgaccggtacttctctttatacacttgatccggaacagaaagttaaagctgaagaggcaggtgctttagtaaatatcaatggacaagattatgccactgctacctcttatgctcaacgtaaatgggcaggcagtgcactccccactgtatatggttctatcagttctgccctatcatggaaaaactggaatctgaacatgttgttcacttattctttaggtggaaaaacatacgatggttcttatagcagcttaatgggtgtatccgaatcaggtgccgcaggtagtgcttaccacaaggacatcttaaattcttggaacggtgctccggcaggtatgaccgaaacttctcctaaccgtattgacccgaatggtattcctcgtatagattactacaaatcttctgacttgaatgctaccagcgaccgttggttggtaagttcttcttacttggtattcaaaaatctgagtttatcttatgaactacccaaaaagtggatgaagaatttaggcattgaagggttgatgttgaatgccggtgtagaaaatctttttacactaactgcacgtaaaggtttaaacccacaatattctttcaatggtggttcggatgacacctatgtaaccgccagagtttataactttggattaactgtaaaattctaaagaaataactttttaaaacagacatagaattatgaaaaaatatattcaaaaattgtttgtaggtagtctaatggcaggtaccttgttggtttcctcttgtgcaagcgactatctggacacagctcccacagactctaccggttctgctgatgccatcggaacaaccgacaatgccataaaggcactgaatggtattgccaaactcatgagcacccaacattactatttcggtcaaggctttgccggagaaaacaatatcattgctcattatgaaaattatccgagcgaaaactatctgtataacttatatgcatccggctggtcacctattcataatcaagagtttcatacacgtactaactctatttacgatgcttatgcgtggtattactattattctatagtaggcaatgccaacacaattctggcaaacatagataacgcagaaggcactgaaagtgaaaagcaatttataaaagcttcggcactaacattcagagcctatgcttttgaaaaattagtgcactattattgctggcgctggcaagactccaacaatggtgcatcacaaggtttaatacttcgtttagacgaatcaactaacggaatgccttattctacattggctgaaacttatacccaaatttataaagatttggatgaggctatcagtttatatggcgaaagtggcatgaatagaaaagaaggcgatgtatggatgccgaatgttaacgttgcccatgccatatatgctcgtgctgcactgacaaaacaggattatgccaaagctttaagcgaagcaaaattggcgcgtgagggctatccattgatgaacaatacagaatactatgcaggtttctgcaaccctacaggtgaatggatcatgggtagctttggaggttcacaggaaaacaactggtattggagctacggagtgcaatttgcctgcaacggttactatgccagcacgcaacagaccggtgccggagctatcggacgcgaattaattaaccgcatccccaacaatgatgcccgtaaagctttatttctcaccgaagacaaattcccgggctacaacttcaatgatggttcagtcatggacttaacatatggcattttaggtatgggtgaaaaagaaaaagaagccgatgctctatgggatgaagccgcagcttattgtaaaaagatggctgtcagtggactgactgctccttatgaagctggttatatgtacttaggaggacaattaaagttctatgtattcgacactccgggtgtaggttacttaccttttatccgttcttccgaaatggtattgatagaagcggaagccaactacttcctaaacaacgaagcagctgcacaggcggctttagtagagctgaatgctacttccggacgtaatgcagaatatacttgtaccaaaaccggagatgcgttatggaacgaaatcatggactatcgtgaacttgaactatggggagaaggctttgcatggagcgactataaacgctggaatcgtgatgtcattcgcaatggctttgacaaaggtggcaatgcacacatctctattgctacgactattccggcaagcggcgccaacaaatggacatgggatgttcctttgaacgaaactgattacaatgatgaactgaaagttagcggtaactaacagttaatcatcgactacaaaaaagagagtgtcaaaaatgcttttattaatttgcctttgacactctcttcgttttctcttataatatcttccctatttcattccaatcctctattattcctgtaggctgaaaagaaaacttcgttgttttttttacattatagaatacttgtccgagccctgcatccttggcaccagctatatcattctcccaattatcccctatcatcaaagaagtatgcaattctgactgagtggctgacatcgcaaagtaaaatatttcaggaaaaggtttatgcacaccgatatcctccgacaaaactacttttttaaagtatttatcaactcccgccgaacgcattttttgttcttgcaactctctaaaaccattggaaaggatatacaaattgtattttgaagacaaatattccaatgcttcaaccgcatgaggcattgtcttcttcttgtacactatttctgcaaaaaaatcatccgaatatgcttttaccaatgctttatcttcaacacctacctgttgcagaggataagaaaagcgcatatcattcaactcatcttttgtgatatgtccggcaccatattctccccaaagtatttcatttcgcccactatatatggtataaaactgatgaaaggagtcaaagtatcgctcaaaatgatacttttcatacatgtcctgaaacgtatcgcgggcattttccgaaaatgcccaaaccgtatcatccaaatctataaatatgctcttatacatatacattcaataattataaaaaaggggttgtgcctgattgagacgcaacccctttacgggataatttatatattattttattttacctgaataacaaggtatcttgatacactccaaaactgactaggattagttatcttcaaagttaactgcccttttgcatccttcaccaattcgtatgaacctgcaggatgagtggtcaatagttctgcacgttttgaatacaatttgatttccttgtctgtacgaatatcaatctgagtaaaataatctttattgaaatcgtcatttttaagcacgtcaccattcttaagaattttctgatctttcaattccgattttgtaccaaagacaaaccatgcagtattcaaagctttatcctgactggcaacagtagcagatttagcttcattctcagctgtcaaatcacttacattttggcttaatccggccactgcatcatccaattctgctatacgaatattctttgaagcaagctctgcctgtaaagtctcaatctgttgttgtttagcctctaattccttagtcaaattggcaatagcttttttcaactgtgcagaattatatttactgttcttcaattgctcttccaacttagcaatctgttcgcggttagcctgtaatttttcactaataaaacgaatatcatcttttatcttatttgcactgttttcacgaatagagccactctgcaaatcaacacggttttcagcttcgtttatttgtcggaaaccttcctgaacctcattaaatgcacccataatttcgtccaattctgcatttctgctggacagttctaccattaaagaatcattctgagccttcatagcctcattctttgctccgttaccgcaagagctcaacagggcaacagacaacaatgataaaattactaactttttcatctgctttactttttaaagttcattatttttagtcctcttttccaccgagcacaatgacaatctcgccacgtggctcgttctctgtgaaatgcgctataacttctgtcaatgtaccccgtacactttcttcgtgcattttagaaatctcacgacatacggaaacaggcctgtcggcaccgaaaaactcggcaaattgagtcaaggttttcactaaacgataaggtgactcatagaatatcatcgtcctcttctcttcctgtaaagaagtgagccgagtaacccgacccttcttttgaggcaggaaaccttcaaaacaaaaacgttcatcaggcaaaccggaggcaaccaatgccggcacaaaagctgtagctcccggcaaacattgcacctcaataccattccttacacattcccgtacaactaaaaatccgggatcagaaattccgggagtgccggcatcagatatcaacgctacagtttcgcctgctttgattctattgacaacgccttcaaccgttttatgttcattgaatttatgatgggactgcatcgcattctttatttcataatgtttcaaaagaatgccggaagtacgagtatcttcagccaatatgagatcagcctctttcagcacgcgaatagcgcgaaatgtcatatcttccaaattccccacgggagtaggcactacatacagttttcccataaaaaacactcctaattctgttatatgatgacaaatgtagaaagaaatcaaatgtataaagttaattgatgctattatttaacagatgttgcacattcctttaacattatatcttttattaataaaaatattagggattatagcccttttttggggtacaaatagtacatttgcagccgtaactaaaaccaattatcactatttaaccatggtagttttttcagaagaccacatacaagagacacgtagaagaggaagaatagaagtaatttgcggttccatgttctcaggcaaaacggaagaacttatccgacggctgaaacgtgccaagtttgcccgccaaagagtggaaatatttaaaccggccttggatacccgatactctgaagaggaagttgtatcacatgacagcaactccattgcctccacccctattgatacttccgccagtatcttattattctcttcagataaagatgtaataggaatagacgaagcacagtttttcgacgaagggttaataaacgtatgcaatcagctggccgacagcggggtgcgtgttattgtagccggactggatatggatttcaaaagaattccgttcggacctattccggctctatgtgccattgcagatgaagtaaccaaagtccatgctatctgtgtaaaatgcggtaatttagcttatgcttctcatcgcataaccaaaagtgacaaaagagtactgctcggcgagaaagccgactatgaaccattgtgccgtgaatgttacaggaaagctattgaggaagaacaaaccatccaataagtccacatcattatgttacagaagaaaataacatttgacagttttatccgtggtattctaagcggaattgtcattataggaatactctatttagtcaatcgcttaagcggagtattacttccatttttcgttgcgtggctcatcgcctaccttatttatcctatggttactttctttcagtataaattgcggttaaaaaatagagtcatttctatttttgctgttatgctggtattaatatgcatcggtattctgacatttatcggactggttcctcctattgtagaagaattcggaaaattaaaagaactgctcaccgattactttgtggaaggttcaaaacaagcagccatccccggtaccgtggccaattttattaaagaacatatcgatatgcttaaaataaatgaggctttgaatgaagaccgtattgctcaaaccatacgcgatgtactgcctcaggtatgggctatctttacacagtctgtcaatgtggtcgtgagtatatttacctcttttatcatactgctctatacttttttcattctgctggattatgaagccatagccaaaggctggataaaattagttcctgtaaaacatcgcgatacgaccatcaaaatagtaaatgatgtacaagaaggcatgaacaagtacttccgtggacaagcggtggtagctttttgtgtaggcattttattcagtatcggttttctgattattgatttcccactggcaatcggcttcggattgtttatcggtctactcaatatggtaccttatttacaactcattgcttttatccctaccatactattagcattgctcaaagctgccgataccggagaaaatttctggtggatattattttgtgcatttttagtcttttgcattgtacaggtcatacaagacggattgattgttcccaaagtaatggggaaaataaccggtctgaaccctgctatcattcttttgtccttgtctgtttggggagcattgatgggaattgtaggaatgattatcgccttgccgtgcaccagcttaatgctttcctactatcaacgatacattcatataaaagaaaaggaattttcgagtgacaataacacgcctgataatcaatagataatagaacttattaaaaaataaatcaaaaaaagtaagcaatatatttggaagtttaaacaaaaacgcctacctttgcactcgcaattcggaagaatagcaataacaaaggattgattcgctagctcagcaggtagagcacaacacttttaatgttggggtcctgggttcgagccccag

SEQ ID NO: 6787 - DNA, 494 bp, Unknown
  gut microbiota DNA sequence
tcaaaccctagcccgaaggctcggcttctactttctctttatattattaataaacaatcttcgcagtacaagaggttcttatggaggtaatctctttagaacctacttttaatctttttctgagcgtcgctccagaaaggaggtgttccagccgcaccttccggtacggctaccttgttacgacttagccccaatcaccagttttaccctaggacgctcctcgcggttacgtacttcaggtacccccggctttcatggcttgacgggcggtgtgtacaaggcccgggaacgtattcaccgcgccgtggctgatgcgcgattactagcgaatccagcttcatggagtcgggttgcagactccaatccgaactgagagaggcttttgggattagcaccacgtcaccgtgtagctgccttctgtaccccccattgtaacacgtgtgtagccccggacgtaagggccgtgctgatttgacgtcatccccaccttcctc

SEQ ID NO: 6788 - DNA, 352 bp, Unknown
  gut microbiota DNA sequence
tgcgggtttatcattcccagcggcgtctctcccagcctgatgctccccttgccgggcgtgtagaatcccagcatcagcttgaccagcgtggtctttccgctgccgctggcacccacgatggcggtcaccttgtgccgggggatgctcaggcacacgtcgtccagcacgtaatccctgtccgcgccgtcatagctgaaggacacgtggctgagcgtgatgtccctcttttcgggcagggcggagagcttggaggcgatgtcctgctcctcgtcctccttcccgtgtatctcattgagcctttcgaggcttatcttcgcatcctgcagctgctgtgcgaacccgatgaacgacg

SEQ ID NO: 6789 - DNA, 822 bp, Unknown
  gut microbiota DNA sequence
ggggatgttggctgtgagcctcttgcagctgatattccctttccttacgcaatcattggtggatgtcgggattcgggacgggaacctgggctttatcacgctgattctgatagcccagctcgtcgtctccgtttcccagctttccgtggagttcatacggagctggatattgctccacatgaacacgcgcatcaacatatcactcatatccgacttcctgataaagctgatgaagctgccgctgcgtttcttcgacaccaggatgataggggacatcatgcagcgcatcggagaccataaccgcatcgagagcttcctcaccggctcatcggtcgcaacgctgttctcgtttgtcaatttcttcatcttcggatggatactggcctgttacaatccggtcatactgggcatcttcctggcagggaacacgctgtatgtgtgctgggtgctcgtgttcatgaaatacaggagggaactggacatcaggcggtttgcacaggcggccggggaacagagcagcctgatacagctggtgaccggcatgcaggagataaagctgaacaactgcgagaagcagaaaagatggcagtgggaaaggattcaggtgaaactcttcaaaatcagcatccgggggctggcactgggacaggtgcagcagacgggctccgtcttcttcaaccggaccacgaacatcatcatctccttcatcgctgccaaggcggtggtggacggacagatgaccctgggcatgatggtgtcgctgacctacatcatcgggcagctcaacggcccggtcacgtcgttcatcgggttcgcacagca

SEQ ID NO: 6790 - DNA, 242 bp, Unknown
  gut microbiota DNA sequence
actcaggtttcctgatcaacgctaatcggatcagggtcagtcgggtcctaaggctcagccgaacggcgaggccgatggcagaaccggttaatattccggtactaccctttagggtgacgtggagacgcagtcgtgacaatgccgccagctgacggaatagctggttaaagggtgtagaagttgattgtggcaggcaaatccaccacaagattcgaacctgacagtatggagcgtccttccgg

SEQ ID NO: 6791 - DNA, 7188 bp, Unknown
  gut microbiota DNA sequence
tgaatattcctgcaaaaatcagccgagggattcgctgtataaatttataagacttatcgggtattgccgactgtaatttttcacgaactttctcaatcagtgtttgtgtattaccggctgtaagaagagagagtatactttcgtcatccagtttccgatgtgtagttttacttcccctacatcctaattttgttatattcatccattattttattagttattgtaaaagtaatgcttttcttacacaaaaacaagtatacgcccatttatcattaaaataatattacctttcttctatttgtttttccgatagtttttgattacctttatacactttaaacttagaataaaaacaatatgcaaacaaaagaattcgattacgattcagttccccaaggcttcgcccattgtctgaatgagcagtgtccgcaatccgctgactgcctgcgccgtaaagcggctcttcatatcccgacagactgccagtttatcaaaatagtgaaccctacctacactcctgaaatgaatgcgaaatgcccatattaccgttcgggagaaacagttcgattcgcctgcggagtggcgcatctgtacgataaccttccacacaatgcagccgttgccatcaaacggagtttattgtattatttcggaagaagcggctattatcgtttttatcgcaaagaatcccttcttaacccgaaagatcaggcatttgtccgccagacattccgcagatacggcataacatccgaaccggcttatgatggcttcgtggataaatacgcttggtggtaatgaaaaagacatctcctttcggcagcagtgaaatatgcaattattcgaatcaatgtgtttcccgaatgatacagattgtttctgcctattgaacaacctgtttccgcctattgcacacattgttctttgctccggaacaaagtgtttcaaccgcatgaaacacatcgcaggaaagtatgtaactgaaggaagtaaaggaagaatgtatcaacttgtatagaaggaaatgcacaaaagatacagagtcaggtaaaagtgagagcattgttctcactttttggtttatgtctcatccccatctctcacccctgaaagtctttattcatcgatgtttcagatatattgatgagagtatgagagcaaaaatcaaaattcattctattttggagaaaggcgattttacagacgatcctctcactatcaaacgggtaggaaccactaccttcttcgggctttgacttttttgcaaatgttgcagaagtaaattacatgatgccacacccatctcataagtttggtgggtaatggcagtcagcgccggttccacataattggaatgtaactcatcggtatatccaattaatgccacatcttgcggaatgcgcagtccttgctcttttatttctttcatcgcagcaaaagccaacgtatcattcatggcaagaatggcttcgggaggacagggcaacgccagcaacttccgagtagcttcacgtccctcttcataagtcattttttcacaaacaatcaattccctctcaatgggaatctgatattgcctcaacgcatccaaatatccatgttttctttgctttactatatccagatgattggctcctccaataaagcctatccgcttcgccccatgatgcaagaaatgttcggtggctgccttacccgactctgcattgtcggcaactacgcaagaacagcgaccgtgcaaacatacccggtcaaagaataccaagggtacacgctgcataatcagtgattcaaagtgagcatagtccgttgtctcttgtgaaatacatgcaataatcccttccacacggatattcatcagatcttccacacattgcttttccaattcatattgttcataagaagacgttattataacagaataatgatttttacgtgccacatcactaatgccactgataatggaagaataaaaatgagtcacaatatccggtacaataatcccaataatacgcggattgttcttgagcagacttattgcaaaaggattggggcgataattccactctccggccaatttctttactcgttcacgcatctcttcccctacctcgggactatctttcaaggcacgtgaaacagtagatacagaaacacccaactcttctgccaaatcttttaaggacacatgctttttattattcatatccatccaaacttttcacaaaggtagctataagtactattaacgcaaaggtttgcgtactttttctcaaaagatccccctgcaccttacctatatattactttactttgaagccacaaacagattaaatagcattttaaaccaatgaaatacaatgaaatcggaaaaaccggaatgtacgtttcaaatcttagtttcggtgcatcttctttaggaggagttttccacgaagccgatgaagcaagaagtatggaagctgtatttgccgcagtggagaatggaataaattttatcgatgtgtctccttattacggccattataaagcagaaacagtattgggaaaggcactgaaagaaattccgcgtaacaagtattacttgtctaccaaagtaggacgctacggtgaaaacggggttaatatctggaattattcggggaaatgtgccactgaaagcgtctataaaagtatggaaagattgaatgtcgattatatcgatcttatcaatgtacatgatattgaatttgccgacttgcatcaagttatccatgaaacgttgccggcattagttgagctgagaaacaaaggaatcgtgaaacatgtaggcatcaccgatttgcaactggaaaacctgaaatgggtagtagagcattcagcctccggcacggtggaaagtatattgaatttctgccattattctctgaatgatgaaaaactgaacgattacttagactatttcgaatcgaaaaatattggaatcatcaatgcttctcccctttcaatgggattactttcacaacgtggcgttcccgaatggcatccggctccggaagcattggtcaaggcatgtcaaaaggctgtgcaacattgtatgtccaaaaattacccgattgaaaaactggcaatccagtactccaccggcaacccgcgtatcgccactaccttgttcagttccgccaatcctgacaatgtattgaaaaacatcgcttatgccgaagaacctgccgaccggaatttggtgagagaagtacaagagattatcggcaaacaaatgcgtgtcagctgggctaattcataacaaagcgcataacgctgtttagaaagacggaaaagccgctgtatgactgaaatataaataaaaattaattaaccaatgaatgaaagaataagaagaataacaagtatagccatagtcgcatgtgccactgcactctcggcatcggctcaaatcaccgacagaccacgccctgccgaatgggataaattaataccgggcgggaaatatgtagaccgttttgaggccatgcaaggcaataagctatccgataaggtgtggggagcccaagaagtacttccacggtttgttgacaatggaatagaacatccggatatttctttttggggtggaaatattctgaaaggaaaagagggaaaatatcaccttttcgtatgcggatggccggaaaatgcagaaaaagggcacatggaatggcctaactctaccgtttatcatgctgtgagcaaacaactccacggaccgtataccatacaggataccgtaggaaaaggccataatcccgaagcattcactttaacagacggtcgtattgtggtttatgtcatcaatggttactacatagccaacagtatgaatggtccatgggaattcaaacagttcgatttcaacccgcgcgacagaaagattatagaagggttgtccaacctgacctttgcccgccggcaagacggctcccgcctgatgatatgccgtggtggtggcgtatggataagccgtaccggtatttctccttataaccagataaccgaaaagcgtgcctaccccgatgtggaaggcgaatttgaagatccggtagtatggcgtgactcactgcaataccacctgatagtgaatgattggctgggaagaatcgccttttaccaacgttctccggatggagttcattgggttacggaacaaggtgaagcgtatgtacccgacatctcccgacacaaagacggaaaagtggaaaactggtttaaatatgagcgcgccaaagtatatcaggacaaggaaggacgtcccatacaaatgaactttgccgtgatagacaccatcaaatgggaagaccatggaaatgaccgccacagttcaaaaaacatctgtattccactgaaaaaagacttgcttctatctgttctcaatacagttcccatcgatgcttccactccgactatcgaagtaaggatagccgcagaaaaaggattcaatccgtccagacaattggatatcccttctttgcgtttcggctctttcaatgaggtgaacttcggtcggggatgcaaacctttgagttggaaaaaggaaggaaaagatttaattgtcactttcgagggaaaagggagcggtatcactgccgaagagttcgcacctaaattaataggcaaggataagaaaggcgaatttgtcatcggttacgcccatctgccttatatcaattataaaccggctatcctctctgctttacagccccggtatgacgaggcaaacaagcaatggaaggtggaagtgcaaaacttcgggctttctgcttcggaagaaacaacattaaagataacttccaacggactgaccgtggcagaaaccttgttgccgaaattaaaaccttacgaaaccaagacagtctctataaaaggcgagaaccgactggaagaccaacgattagtgagcgtcaaattctatcgaaacggcaacgaaacagccgtgaataaattttaagttttcaacaggtatccattatattgaatataacaacttatatatcccatagcctgggttgtgtcaaaatgtggataatactgtcgcttagtttgtaggggcgaggttcgctcgcccgaaaacagtttgctttgtgtattcgggcaggtaaaccctgcccctacagctgacgatgggatagcccggtttgggtttgacacactcccgatatgatacctgtttattctatcgacagaaagatgccggactgtccttgcgggtcatacagtatatatttccccttacccacagcataggacaattttaaagttccgttgacactgaccaccgactcttgcggatgtactccattagtcaccaggtcttcataagtaaatacattacagaatccttttcctttcactttcataagaaccagtttgagcaggataggtctataagcggaagattcattctgtttttccacaatcagcataccgccgatggaatcggccgacaaaacagtggcccgggaagctgtatctactatcaacaacccttcctgtttttcaataacagcctttgccgattctttccggtttaccagtatttcacctttaccgactattacatccgtcaaaggtttataatccggattcgctttttttcttgtttccgtgacagcaatgctgttcctgcgcaaaatatctccccgctcattctgaatcaataaatagccgggctccttttctcccccataattctgctctacaatgataccggtatcttcatccttctttatgcaaaccacgtccaacaatggactttgctcgaacaacgactgattagggttcaatttctttttctgctgaaaagcaatctgtccggcattgataacttccactattccatcattcttcagcaagcggattctctctcccggtatttgttcgatgatttgtccttcatacttctcgcccgtacgcaatgccaccacatcaatcaacccggtcaaatcggttgtggccctgggagcacgtttgatagcctgtatatctttccaatccagataataggaattaggagtaaaatcaagatatttgatgacttctcctttttccagtatacgcactttgcggggaacaacgttccagtttgaataaagcggggtattcgtttcccggacgacggcagaatcgaggactactgtatcattctctgctgtttctgccaaaatgatgtcagtcatttgcagaaacttactacctctgacagtctttaccagcaatgggttatctcctacccaagctttccacgggtcggacagtgtttctatctcgatatcatactccaacacagacttcacctgtttcaccggaatataaaccgttgccttttctgcaaaaaagataatatcttttcccggatgctgaacagaaatataaccttcgagcacagagccgtttttcagcacaaccgtctcataaggttcggcaccggcagttaaaaccagcaggtttaataatagtatccaacaaaatctcttagttttcatcattttatcctttaaaaattgacaaagaaaggttctacagttatacttttgctcactttattcatatcaggaacagtaaccgtcacaacgcgtttctcttcttttataatcttagtaaaggtagcataaatctttttgctctgtccggcatccagactcaccttttctttcttcgttattagttgattgcccgttataacagcctcaaattctaccgcttcccccgtttgatttgtcagggtgactacaaccgaagcaacatcatctgcattcgccttcacctttgaaggagcaatggcaataccgattccggtatcattgcctgcaacatttgaaacattttttatcatgctgctattccaaagctgcaagttttctccttcaagcaaaagattacgagtctcttttttaggcaaaaccagcgaaaagatgcgagtgcttttcgcattcccgggctggctgagattcactttctcaccacggtcgttggagcagaaaagttccagttccgcttcctgccaggcctggggcactgtcaccacataatccacagattccattccggcatccaccgactttaacgagcctacggaagaacggcattggaaatatcccggataaagtttcagcaaaccatatttattatccttagaagcaatggcatatcctctgc

SEQ ID NO: 6792 - DNA, 828 bp, Unknown
  gut microbiota DNA sequence
ccctgtttataaccatacaaatcatcttccgaataaacagtcggaccatcatatactatcctggatttagttccctttgccgatttatccgcatgctgtccaatggcataatactcatcaaacgacaagacaatattattgtctatcttaagcaattgccctgaagtattgataacacaataacgattgtcttttgttatcaccaacgcttctccattcttaaatgtcgtccctgtatatatatcacctatatcggattgcagcaccagattttgtccgttttcgtttacataaaaaactttatccttgttttttgcattcagtaacccgctgacagcattaagccctacagaaaaaagattttttcctttgcaaacagaagcccaaccttcagaaaacgggtgtgccacactgtatgcaaaatccagtatcacccggccattaggcccaatatatccaaatcttccctttttattgcagaccggcaatttgccttcagaaaagaaagtatagtttcccacataccagtcctcggatatttgcgaggtagtcttatccttatgcaaaatactcaccaacttgttcttaccatctacaaaacgtaataccaatgagcagtcttcaaccatattggtaatggaatcggcatacacaccgactattattttaccgtctttgtccacaactcccacttgtttccctattttcaccttgtacatgtcttcgccatacggagtgatagatgaatactgaggagctatcgcccacttagccgtttgagcattcatcccaaacggaatgaatgcccaaatcattaacagccggcag

SEQ ID NO: 6793 - DNA, 6364 bp, Unknown
  gut microbiota DNA sequence
cctaccaattcgccatgcttattgaaaataggtgacccgctggctccgccgactgcttctccctggaattcaaaatcatatcttccaggcactttgctgcacattgtttcccgaatatccggttcgagtgaatgatttgtcttctccactgcacgatacgcacctgccggataaccgatggtatacaatttttcttccagcggtttcagcttttctgtattaaattgttttacatcgaaaatatattcgatgtcggatggagttttctttttgttcaactgcaagatagcaatgtccttttcatccgtttcagaagcctttacaacatagcatctctcaaagtcatcataatgggtatagttttgtccgggatagccaaccgatatataatcggacgcaccggatatggtatacttcgtttgtcttactctgttaatcaaagcattgagtgatttcaccctttgtctgggactttctcccaacgctttttctatcaaaacattaccgacaggactcgacgccagaagtgtcaaatcgctgtctgtccttacttcttttgtcgggatcagctcttccaaaaactcctctatagcttgtctcaacatatcttctgtttcaggattcatataagccttgtcccaaggataggcaacatgtctgttagttcccatacgtccttcgcggtcaataaaaaatgccgttgccgtataactgaacttattatatcctttaggaatattatcggaaccgacaacccgggcatgcttgccgtccgttgaacaaagaactgtgtaaggccgactgcccaacagaacatcatcaaatgtaacagtgtaataatagttagccattacccaaacaacagccggtctgaatttggtaggatcgacagtcttacgccccaatatccacactgcccccaaaagaaccgcagcagccacaccgacagcggctacccatttaatccatggataaggtgtagggaaaggcaattgttcggttacatccacatccccacaaagtacaatatctccctttttcacccgaatttctttacccggttgtatctttacaccattcactttagtgccatttttacttcccaaatccgtcagataacactttccgtcttttgccaccttgaacgtagcatgaaaacggctgacaaaggcaccggaaataaccaggtcgttccgaaagttcgtaccgatattaagaatcgatttatatttactggtattttccaaagcaggaacccggctccattgcaattcaacatcggcaaatttcacataatccccccgttgaatagtaacttccttgttgggagtaattttcttgccgcccacaaaggttccgtttgtactgtttttgtcttccaaaatgatttcgccactatccaacaatagaatttccgcatgatggctactcacaaattcgctattcaatacaatattcgaggaagacgaacttccaatttttagtagtttcattgtatattgtttttttattagtattagtatataataggtacagcctgttctttcttggatgcagaatcgttctcttttttatctccgtttttcttattctcttctttcttgtcctttgtttttttctttgggaagaaacagcttgatacctcattcttccctttcttttcagagagagaatcctgcttcttcttcacctctgcctgtggtgccacctccttttccggaagcaccttctcctcctgctgacattcaataaccggaagccggggagtatcatccttcatatcctgtataacaacaatggctgtaatgattaccgccagacctattaccgccataatgccatatctgtaatatctttgaacatcaggtatctgattccaatccaattggcgcacgtgtgcaaaagaaaccacatctttacgggtgacagggtatgccgtatccgatttcaatttaacaccattgacaaatgttccattttgccccatactaataatctccatctttccggtcgcatggattttcaaaatagcatggcggcgactgactgtactatccgacaaaacgatattacagctttcatcacgaccaatagttaatatcttcatactcattaattttataactattttattttatctctaatctcttttacccgattaataatggagtcataatgactttgcgccctgctgctgttttctttagctatattctgtttcaaaagaagcaaaataccatattcgcgtccgttcttctctttgccattaaactcgttttcagagatgccatatttctttttcaattcaggctccaatttttgaaccattgccaccgtttccttcaatttttgttctttttccttcccttcagaaacatcacgtaactcctgcaaattattaataatgtcatccaaccgttctatgatgtcatactgattgattataacctccatatattctttcgctttacccggattattggttatgatctgtgacaacgaatctatagtcctcttttgttcttgttccgactttctcagcttttcatcaaactctgcctgaagtttttcgctccataccttttgcaaagcttctatatccaactcttcactcttggaggaagccaccgcttgacccggcaaataaaagccctgaatgatgttgcctgctatactgacacaacagataaatatcaaggcaaataatatattccttatttttgtactcatcttttcttttaatattgaattagaatttgtttcaattaatgctacggtcagattatcatgcttgccgccatttgcgattccctcttcatccacacgaatcacaatactttcgacagctcctcccaaagaagaagtacccgccacaatatcaatcaacttccgttccggaaacattccccatattccatctgtacacagcataaaacggtctcccttttcataaggcagctctacgatatccgcttcaatgtcactgttagcacccaaggccttagtaatcatgtttgactgctccgacaaacgtgcctgctcctcattaatagtaccgttcctgaccatctcgaaaaccattgaatggtcaaatgtgcgaaacttcttatgtcccctgcgaaattggtatatcctactgtctccgacataagcggcaatggccgaatactcattaatcagcaaagcggtaaccgtagtccccatgccgcgtaatgcaggtttcttctgtatctctgaaatcaatgcctgattcgccatttttatggcttgttgaagaactgtcagaggagaatccgaaagcttgccggaacgtactgtctgaataattacatcagtagcagtagacgaagcagccttgcccgaaggtccccctcccatcccatcgcacacaacaaccaataatcctaatggagtatcggcatatccgcatgtatcctgattttcggccctgccaccttgcctggaatcgacaaaaccgacagcaataggtaattgtgtatttattggtatcataaggcaaacattaataatataataattattccaaccagacaacccacaccgaccatgaccaaccatgtcggtaccaccggtgaaggaggagcacttaaagccttttgtaacgccatcttaaactctcccgatgattggaaacgttcgttttgctgtttttctgtcgctttgcgaagcacatccacaaccgctttcggtactccctgtatatccggcaatacttccattcgctgcctttgtatagtctcctcccttgtagaagaatcaaaaggattataaccggccaacaactcatacagtgttactcccaattcatagatatccgttgttttatctaccgtcaattggacctgtccgggttctatgatttgttcgggagcagcatatttgggagtacctatcaaacccggagacgtcatactgacagaatcaggtgtataagcaatgcccaaatccattaatctgatattagagccatgctctatcataatgttagccggttttatatccatgtgaacaattcctttctgatgaagataatccaaagcatccatcacaggataaaggctttcgcagattcgcttgaccgcatctttcctattccgcaaatgagtattaacatgctcgtccaatgttattccctgcaccagtctgctcacaataaatatcgggccattatatggatttagctcgcaatagcctatcatctctaccaagttacgatgccgaaaaagcaatgatgcttctaatttggctctttcacgaatgcttggtacattggcatatttatccaccacgcgcttaattgccactctctcctgagtctgacaagaccgtcccaaataaacagtgcccatagcaccggcgcccaagggtggctctgtctggttataaaagaaccattcaccgtttacgcataaatagatttcatcacctttttgtactatatttctataattaggtttcattggagtgcttctattcttctggaacatttacttatatattcattatcattcgcttgcgtggcaaatgtcaatcctcgtttgaaatactctaaagccttcggcaagtcccgactatcggctttacctgtacgtatttcaccggctaagaaatcacagcccaattcatacaaggctttataataggttgaatctgttttgacaattctactcatcatctgatgtgcatccttaccgtctttcttcaatgtctccgataaatagttctttatttgttgaatagaatcagacgaatcttctcccggatagtgcaaacgcgctaccaaataagctgcatccaaagaagaacgatatcctttttgagctactttctccaataaattcaagccatcgacagctttacccgaatcactcaacaatgtaaaagcttccagtgtaagctgaccggcagtctttaccatcacagtatgccctgatatagaatctgtcaccctttgtcccgatggaaccgaagagtccaaaatcgtattattcatttcagcttcccatgccgcaatccgtttctcagtttctatcctttcaagctccgcttgctgtttttctttattatcggctataattttccaagtaatgcttccacctatcagcacaaccacaatgaacactgcagcccatacattcttttgtcccatcttgcccacaattgcctgaacagtctctataatattcccgaacttttcctgttccgttgccgaaggcatggaaatcttacttatttgctctactgctactctaaactctgctgccgattgataccggtctttctgcttcttggctgtagccttggctataatttttcgaatctctttctgtggcacttgctgcaaaggcattttgtgatgcaactgcatttccagaacttcatgagtggccccctcaaatggtacatgtcccacaataaactgaaacagcattatcccaatggcataaatatctgtcgtttcattttggtgcaccacatcgccaacaaccaattcaggagaagcgtatgttgcttttcccataaattgtccggcggtagtcagttgctggtcttgtgtagtcagtgtagaaagctgtttagcaataccataatcaataatctttattttccgatcagaggtaatcataatattactcggatcaaggtcacgatggatatatcctttgtcgtgcaaagccataatccccgacaatatatttttgataacaagcagcgcaaagccacaacgatccgtcacatattgattatacagctcttgtgcaaaaggaatatccactccattattgtctgtcgtttttccttttaataaatcacacaagactactccgtgcaacagttcacttaccacatgataatgctgatggacaacggttggagaaactacttcatctatctggataaaaccaaacatttccaccagattctcattatgaatctgaatggaagcttctctccgcgctctttcgatgacgtgtgcgggcaaatcgtcaaacaaaaatttgattgctacatccacacatacaccggtcttttcttgaatccgcttaccacgatacaccgaacccattcctcccacaccaaggggctggctatccgtatctacctcataacgaatgtggtttttcttttcatttatactttgtatgcaaataatagacatatcttttccttcatttaaatttaaaaggtctgcaactgttacataaacttagttcctcccggctctgtaccttgaactccgtccattgctactgttccattattcatcggacgattattatggtcatagggattaaagctgccacctgtacctttaggtgcagcaaaaggaaaatccacatcc

SEQ ID NO: 6794 - DNA, 11476 bp, Unknown
  gut microbiota DNA sequence
gaccgattgtaatcaaatcattattaaaacactcatgggcactgtaatccagttcctcttcatttacgaatatgccatttttggaacctatatccttaatcgaagccagtatcttatgtgtagttttcatctgcttgatattcagttccgcatgaatatccgacacagtaccttccttcaaacatatatcacaattaccggaacgcccgattttatttgagccgatatgaagaggccaatattcaccgataccctggcgggatatagaatacaaaaatccgactaccggagctccccctttggcactcgattcgtgccggccaacattgggagccacctcttccattcccggaaccattgttccgcgacttcccatgtcaggagttgtagttctcgaatacatattgttcttcttgtttgcatagtatgaattttccatacccggtacagatgttttttcttgtgacatagtatctattgttttaattgttccttatttaattcacaaagattgtttttttatagaataaaaaaaaaccacacaacgcgtataaggcgctatgtggttcatattagtatctaagcagataaaaataaggattatccctataaaaatttatttagagagtcaaacttattcctaatgatataccattcggcatcattcctgtatcagttcatattttacttcaggaaaccatcgttccagtatattgtccacttccgattctatctcgggagtgacatacctgcacactttcttataagcatagactaaagaaaatgcctcatctatccagccgatgacgggcaaccgtttggcagaaatcaaatctatcgggagtattaaataagataaagcggcaactattaacattttatccgatgacggagtttcaggactcctcaacacataatataataaaagtaccggacgagccgttgttcttcccaccaattttgcataatctgctattttttcccaccaaaaatcataatcgattttattcataattcttttcatactcgcttttttatatggttttctagtcttttgacgcaggtattctgaaaaaagttgcacttttaagaacattttttttcaaatgaggttatatttgcagaaaagcagtatcacagatgaaaaaaacccttctaacattagtacttgctttctgcgtattggcagggcaaggacaaacttctacgacagcatcgggcgttaatactacagaattaaattccaagtgggcccaatttacccagttggcagaaaagaaacaatataaacaagctatagacgaaggagtgcgcgtcagcatactctttaccgaaaacagacaatataaagaagctttcgccacctgtcgccagatggatgcattgatttataccaatgaacaagaaactaaaaaagcaaattatccactccgctatcaggtgaccaaagaacgcttacgcatgtacacccgtctgaaaaatgcagagcaatgtaaaaaacaactcaatcaactgcatacttatgcagaccaaataaaatcggattccttatcggaagatcttctctttaccgaggctaattattaccaaacattcggtatgccggacaaaagcctcgcatgctataaagaactgtttcgaaaacgttcgaaaggaaaagacgaaaaaggcatagagcaatgctataaagatatgctgagttatgcagaacagaacaacaatgcgccactggccggtgccatgcgtaagctctacacgtcttggcaagattccatccaaacagtaaaagcagctcagaaactgacaaccctgcaacaaaaatatgatgaaaaccggcaattgttacaagaaaaagaagataagataagtaccaatcttttcattatcattgcactttgtatcctgacagccattcttgcggctgcgcttgtgtttcttgccgccttacttttcaaacatatacgccaagtgaaaaagttaaaacacagtctgggtatcgctaatgagaataatgaacaaaagtcaagattcatcagtaacatcagtacacagatagaaccgactcttaacacgatggaagaagcgactgaagtgttctcggccaaaatcctacaaaagaatatagaagctttgagaaaactcatgactgacattcaaacatacgtcactttggaagagacacgtgaggaacattatccgctcaaagatatgaatataaatgccttgtgcgaaaccattatggaaaaggccaagacaaacttcaaacccgaagtggaagccgtactcaatgtaccgagagtaaatattaagacaaatgcagaagcgctggaacgcatcttgctttatttattgagaaatgctgcactacacacagataacggcaaaatcacattagagtttaagaaaagaagtgcacacacaggacagtttatcattaccgataccggtacaggcataccgaccgaaataaaaggaaagctgttcaagccatttgccgaaatccatgacttaacgcaaggcaatggactgggcttaccgacctgcagcctcatcgcctataaacttaatggtactttgcatctggataacgaatacaagaaaggaacccgatttgtgctggaattacatgacaaataagaaacctactgttttgaaagcgccaatatatcagttcccgtagggctttgaaatactttcaatccgaactggggaagaacagccagtacatggtcaaaaacttcggcttgcagacgttcataaggtatccaatccttattggctgagaaaaaataaagttcgatgggcaagccctgcggagtaggctgaagttgccgtaccatgagggtaaggcttgtattcacccgtgggtgatgtcgcaaataccgctccagataatgacggaagacatgcagattcacctcctcttttccggtcctttcaaatccttccaaccagccgcgtttctcaaagttcttcaactgttggggagtacagaaatgcactgttgtcatatcaatattcagtgaacgttttattcttcgcccgccactttctctcataccgcgccaattctgaaaagaatcacttactaaagcatacggtggaattgtggttatagtattatcccaattctgtactttcacggtagttaatgtcacttctatcaccgtaccgtcagccccatatttaggcatagtaatccagtcacccggacgaagcatattattggctgaaagttgtaccccggcaaccagccccataatggtatccttaaataccaacatcagaatagccgcagaagcccccaaaccggtcaggatattcatcgggtctttatcaatcagtgtactgataataataattactcctatacatatcactatcaacttcaacatttgatacacccctttcaacggatgattcttcaacttctcatgttcactggaaatggtataaagtgaagtgagaaaagaacaaatcaaacgcattgacacagcagtaatatatacccagcatagtttaaggataaatgttaaagtcacgggttcatgcggaaaagcaaaaggaagcaatgcatataatataacaggtggaatgagatgacatatattatccagtacaacatcattgaatagataatcatcccaagtagcctgtgtctttgccgtcagtttctttatagtaggaactactatttttctgcaaaaataatctgccacaaaagcaatgataataataccggctataataatgatacgctgggttatgcccaggctttcctgatgcacacccatctgttgcaataagttagtaagatcgttgtttattgtatccatactacattcgtttttccgcaaagatactaaaaacgccttattaccaacaaaggtaacaaagcgtttttctttccggctaaaaacaattattttttcttagtcaaccatttctcctgaatattctgcatcacttcataccagttaggaatataaatggtagcaaaaatcgtattcactgccataccgaataccactgccgcacccagcgccacacggctaccggcaccggcgcctgtggcaaacaacaacggcatcacacccagcacgaaggtaaatgaggtcatcaggataggacgcaagcgcacatgccctgcctcgtatgccgcctcacggataggattgccggctttacggtaatcacgggcaaattccacaatcaaaataccattcttcgcagacaaagcaatcagcagaataataccgatctgcgtatagatactgaccggaactcccatcacccagcaaccgagcatcgcacccagaatagctacgggcaagcccatcacagcagcgaccggacttgtccagctttcatactgtgccgccaacaccagatatgccaccagcaacgccataatcagaataatggtagtggtattaccggaatgagtttcctgataagcaactgaagtccattcataaccaaactcattgcccaattgattttttatcaagctccccacagcctctatcgcctgtccggaactgcttccggcagccggagtgatagtgatggaagcggccgaatacatattataccggtttatctggtccatacccagcttctgctctatctgcgtaaaactgctgaagggaaccatctctccctttgaattggccacactcagtttcagcacatcatctatcaccttctgtgcctgctcaccggcttccagtttcacttgataaatacggccaaattccacaaagtcgttgacataagcctgtcccatgtaataccccaatgtagagaacacctggttcaactgtaagcccatcaactgaactttgtcacggtctatattcagaaaatactgagggacatctgcctgatacatactactcatggaagcaatggccggttcagtgtgataattgaccagcaaagcctcaaccgccttttgcagttcctcggcacccaaagacttacggtcttccagttcaagctgcaagccgcctgtattacccatacccggaatagccggaggaataataccaaaaacctgagcctcctgaatcatggcataagcctgtccgttaaaacgattgaccactgcctgggccgtatgctccttgcccgcacgttccttccaatttttcagcaccacaaaataagtagccgcgttaggcaactgccctcctcccatgatactgaacccgtttacgcccaaataagtcttcacttcgggatactctgccaaaatagcatcaatctgtttacccaccctctgcgtacgttccaaagaagaagcagccggaagctgaatggcaatcataaagtatccgtcatcttcttcgggtataaaggtactcggccatttcacaaacatcagaatggcaatgattgatataaccacataagagccgatggcaatgaccggccgtgccaacaaccatttcaccgaagcgtcataaacccgctgcatccagtcattcatactgtcaaaccaccggaacaagcgtgctttatgagccggagtgggacgtaacaacaaggcacagactgccggcgtcaatgtcagtgaattgaaaccgcttatcaccgtagaagccgcgatggtcaaagcaaactgcttataaagctgcccggaaataccgctaatcagcgtagtaggaataaatacggcaagcagtaccagcaccactccgacaataggcccggtaatctcccccatcgcctgctcggtagcggcacgagcatccagtttcccttcgtccagaatacgggtagcattctcggtcaccacaatggcatcatccaccacaatggcaatagccaggatcaacccgaacagagtcagcgtattgatagagaagcccaaggcagccattactgccaatgttccgataagggatacagggatagtgaggcatgggataagaaccgcccgccagctttgcaggaagaaaaagataaccagcaccaccaggataatcgcttccacgaaagtcttcatcacttcgtcaatggagtcatgcaccacatctgtggtatccaacgtcacattgtacttcaccccggccggaaatgtctcggccagttccgccatgcgcgcacgaactcccttggatacatccagcgaattacttcccggcagctgatagacggcgatagcagccgtaggttgtcctttcaacctggaaacaactccgtactcggcactacccagctcgattctgccaacgtccctcagacggagcactttcccctggtcttccactctcaatatgatgtcgccgaactcttcgggagtagagagacgtccctttacattcagcgtatattgaaaatcattatcggccgaactgccgatgggctgtcccacataaccggcagacacttccatattctgactttgaatggcagagtaaacctgctgcggagtaatattgcggatacgcatggtttcgggattcaaccatacacgcatggagtaatcaccggctcccatgacattcaccgctcccactcccggtacacgggtcaactggtctaccagattcaaattggcataattggtcagatagaggccatcataaatactgtcaccgctcagtgtaagcatcatcacaatattggatgactgcttctgcaccgttactccttgcactttcaccgcttcgggcagggaattcaatgccacactgacacggttttgcaccattacggtagccatatcgacatccgttcccacttcgaaagtcacggtcagcgaataagcacccgatgcggaagaattggagctcatatacaacattccatccacactgttcacctgctgttcaatggggatacctacggtctgtgcgaccgtttcagcattagctcccggatataccgcactgacttgcacggtaggcggcgtaatatcgggatattgcgccacgggcaatatatttaatgtaacaagtccggccaccacaaataacaaagccagtactgtggcaaatataggccgttctatgaagaattttgaaaacatacattattgttttttggtggttccactttccattaccggattaattttcatgccttgacgtactttcaacagagccttggtcacatatctttcgttcggagagagtccgcttttaacaattctcatatttccatccgtcaactgtcccggctcaatatgacggtaattgacaatattactatcattcaccacatacagatattttccaagctggtccgtaccgatagaagcatcgtttaccaatatggcattgtccgcttcgccgtacggcagcgtcacactgacaaacaatccggggcgcagcgtaccttcgggattatccaactcggcacgcaggcgaagtgttcccgttgtcaacgttacattcggagacaagtaatccaatcttgccttccatgtccggctaccatccgcacccaaacttaaagtaacgaagtgagcagcagccggaatcttgctgttgttctcctgtaccaactgataagtcaggtattgattatccgcgatattaaaataagaatacatccggtcatctttataaactgtcgctaatttcacaggttgtaaagcccctccgatgtaagcacctaccgaataattggaaatatccaccacaccgctacatggagctttcacatagcaataactgagattggttcgtgctgtctttaaagcagcttctgcattgctgaccgccgcctcacacgaagtaacggtgctctcagcctgcaaatattgtatgcgactcaccgcatcgctttttatagcctctttcatacgctgataactgctgacagcataatccagattggcctgagccgttttaagctccgcctctgcctgcttgacggcattttcataaagcgtcggttcaatcacaaacaacacctgcccctgctttacccgcgaacccggagcaaagttctttgcctgcaatactccattgacccttcccaccaaatctactgtcgattcagcttcgagataacccggataatcctttgtgagtgtgacattctgcaccatcggacgcgcaacatcaataggcaaagcttccattgtcgtgccggaagactgttttttattgcaagccgtcaaagtaaaagcggtcagtgcaatgattatcattaattttttcatatcttggtataggctttaatttattttacttctgttataagaatcttaccaccctcctcccaatgcctgatacatctgtacaaggcaaatcaacgaataaccttgtgcctgcactaaggcattttcataagaaagcagtgaacgctgtgcatccaagacattttgaaacgggctcagtccctgcttatacaagtcaagagaaagtttaaacgcttcttttccctgattcaccatctcacggcaagccacaatctgcttaatggaattccggtagctgctcattgcattatccacctcttgcacagccgtcagcaccgtattgttgaaccgattgattgtctcatccaattgagcacgttgcagtttcaccgcattcaggcgttgccctccgttaaaaatagtccaacttatagaaggagcaatactccaagtcatactgcttctttttgtcaagtctttcatatcatgcgaagcataacccaaagaaccgttcagaaagaaagaaggtaaccaatccgacttggatgccccaagcagtgcagcctgtgcattcacttgcctttctgccgcacgcacatcgggacgccgcaacaagagttgtcccggtactcccacttccaccggttctatatagtccggcaacgggcgactgttttccaaagatgacgccacatcctgtggataaagtcccaacaacacagccaatgcattggtatattggataataccggattcgacagaaggaatggaagccaatgtactatagtaaacagatttggcctgtgcaacatccagtttcgacaccaaaccggtattataacgcacttctgtaatttccaccacagccttctgcgacaaggcgttacgctgcaatacgcctaattcctgctgtgcttccctcagattaaaataagcagatgctacctctgcacaaagagaaaccatcgtagcattatattcttcacgactggcggcaaaactctctttctgagctttcaccctttgacgaatagcaccaaacacatctgcctgccaactcatcttcactccggcatcaaaataccccacacgcgactgagactgtccggttccggtattcccactggtttgctgtctgctccacccggcatcgagtgacaaggaaggataatatccggcacgcataattctcagattcgcctttgccatgtccatacggttcatagccatcaatgccgaaggattctgcttcaccgccacacggatgagtgagtcaagggtaacatcttcgaacaccttccaccaatggtcatccaccggcaaagcctgttgaaacatggcatcctctgcctgccatccggcaggcagaggatgagacaaatatttttccgcctgttgccccttcacccccagtgaagaaagaaacaacataaaaagaacaaaacgtattctcgccataatcttatcacttaattttcaaaacatagtgataaacagcgtagaatacgttttgtttgagaggtaaggcactttaactgcctctatgtataatgcttattttccaaacagattattaatcaccgacaaagaacctgtcaacaatccgcctaattcatcctggttaaacatgaccacataattggacggagccagctggaattcgatttggtcaatgccattcttacctgttttcttcaagtcttttgccttgatattgtaatatccgaaacgacggaatgtctgatatacatcaccccattcgatatcaatggattgcaatacagaagcacctcccgaaacagtaggcagttccaatacctttccattgcccagtgtcagcaaacatttgctgtcatccgggatttccacttcatgtcctgagccgatggtcacagccaaagagtaacgaatcgtacttttatactgaaatcccgctaaagccacatacacattcattccatttgatactcccaagtccatacctgaacaaaccacggtacgtactcccgcatcattggttttatcataaatcacatcctgcgccatagcagtgacactaagcattgtcactacaaataaaaataacaactttctcataatccatttatttaatatttcttttactactatagtacatacctattttcgtaataacaaaatacgactaaataggatgacaaagctaacaattatttttctaaataaaatttattccttcctatttcgttcattctcaaataaattcctacctttaggcagttgtacaaccataaataaaaatagaacatgaaaaagatgctaatcaccctgcttctggctatatccaccggcagccacgcaaccgttctgaaaaacgctacagacacattcccccttgtttccctacaacagaaaaaggtaaacgataacataacacaagacggaaaattacccaaagcctccgtcatcttttggatagatttggataaaagtaaatccaacagtggcaaaacgattcgcaatgtcaaagcaaaggtttctataaataaagaaggaaaaataaaagtactggaatacaacaagaaacagcctttactcattaccaacaaaatagacaaatgtcttaaaaccttccgtgtaaaaccggaatggatagcaagcggaagagtgaaagtgggagaaaatattgtttttctgcgcttcttggacgaatactagcatgcagacaaattgctcaaacttcacaaaaatgtgcatatttatcggcatatccttttgtcgcttaaatagtttgcttaaatttgccgccaaaacagaacattactaataccaaatatattaaagtatatgagtttaaaaattgtagtactggcaaaacaagttcccgacacacgcaatgtggggaaagatgccatgaacgctgacggcaccatcaaccgtgcagcacttccggccatcttcaatccggaagacctgaacgccttggaacaggcactcagactgaaagacacacatcccggctctacggtaactattctgaccatgggtcccggacgcgctgccgaaattattcgtgaaggtttatacagaggagcagacaatggatatttattgactgaccgtgcttttgccggtgctgacacgttggccacttcatacgccatcgctacggctatccgcaaaataggcgaatatgacctgattatcggcggtcgtcaggctatcgacggtgataccgcacaggtaggtccgcaggtagcagaaaagctgggattaagccagattacttacaccgaagaaattctaaacgtggacgaaactgcccgccgcatcaccgta

SEQ ID NO: 6795 - DNA, 993 bp, Unknown
  gut microbiota DNA sequence
cgcgtcattaaaagcatgggaatcaaaatggtgctgagtggcgaaggggctgatgaagtgttcggcggctatctctatttccacaaagctcctacggcccaagcctttcatgaagagaccgtgcgtaaactaggcaagctccacctctatgactgcctccgtgccaataaatccctcgcagcatggggagtggaaggccgagtgcctttcctggacaaagattttctggacatagccatgcgcctcaatcccgaggcaaagatgtgccccggaagcaccatcgaaaagaaaatcgtccgcaaagcctttgcagacatgttgcccgacagtgtagcatggcgacagaaagagcagttcagcgacggcgtgggctatagttggattgatacactgaaagcccttaccgccgaagccgtcagtgacgagcaaatggcgcacgcagccgaacggtttcctatcaatacgccgcaaaacaaggaagaatactactatcgcagcatcttccaggagcactttcccagtgaaagcgcagcccgcagcgtgccaagcgtgcccagtgtggcatgttctacagccgaagcccttgcgtgggacgccgccttcaagaacatgaacgaaccaagcggacgggccgtgaagggagtgcacgaagaagcatatgattcataatatggcaacgtgagtctgattccaacaatttcatgcatatctttaccgcttctcttacagcatgtattcaaagaagagatgctttgcaccccgaaatcttgcgcggccttgccttcgaaaagaggaaggctgcgcggtgcttttgccaacgttttcgaaatagagtggaaaaaacagccctttccatgccgggtatcagaaaaaaatggtgtaactttgtatagctataaaaaagagaagaagaaagatggaaacaaaaaaagcgcctcaaatcccttacggcatctcggactttgtgcggatgcggactgaaaattattatta

SEQ ID NO: 6796 - DNA, 668 bp, Unknown
  gut microbiota DNA sequence
agccgtatgcagggcaagtgtaaatctactttatttgacttttcaaagttacaccttgcttaaaataaagaaatacagaatgttatgagatatagagtgtattctcattttgatttctctgtaatattgaatacagttggatatgtgaaactctaaaatttatagctatgaagaaattaataaagaaaccaattggtaacagagagataatgcggaactatttctctactattggacttgttcctataatgaagtccaagaaaagatgttaatgattaagtgttcagaactgaaaaagccaacttatccgtaattggctaggctggctttttgcattagttacagtttcactagactattcccatgtgaaagtataaattgtagtttctgttcttgtttcattattatctaggcgtttgtaagtagatacttcagtacagctttccacatatccgtctttatcaaatgtataggtatattgctctgtagtttcgtcaatttcatctttgctatatattttgtctggaagttggttgcatctcattcctgccaattcgggatgtgcttccaataacggacgtaaatcatccacactccataccattatcggaagatatcctttacaggtttttccgctataagaaaattcattagcactgtcataatac

SEQ ID NO: 6797 - DNA, 29431 bp, Unknown
  gut microbiota DNA sequence
ataaataacttattattaattatttaagtgagcataagagtatcctgaaacttaagactaaagatatttttgcatttgtcttgtgatttttcttctcaaaaagttttaattatcaaaactttgtgtaaatttgcagcgaaaagtgtatctcttagtaagagatgcactttttttcttctctctcctgaaatcttattcaccacgttcccaacaggttaagcatcatcaatcatttgttttacatccaactcgaaaatcttaacagatgtcaatgtatcataatgaaaagaccttgaagttttcaaaaaagaccaaggagtttctgagaaagacttaagtgtttttcaaaaagaacaaagtctttttctaaaacacttttatcgattgataaaaagaagaaaaaggcaaaaattaacccggtagaaagtttattgcatacctcctttcacacataacaactgctgaaaccgcctgtttatgagaaattagtgtgaaaggcatcatcactttgcccttcatactaaactcaaaaagagaatagattatggaagcgataaaaggtataccttacggaatgtcaaacttcacggatgtgatggaacagaactgctattatgtggacaagacaatgtatctgcccttattggaagatcaggcgcactacttcatttttattcgtccccgacgtttcggaaagagcctttttctggatatgctccgcagttattatgacctttcccgaaagaatgactttcgacggggattggcgtccggcccttgattttatagcccgcgcttataaggacaactcatcggtacgcagcagcatagagggcgaaaggaacattcaaggtttcttcaccgcctacctgagtatcaatgcctattacctgaccatgcccgaagtggagctgaaccacggtttctgcgacatgttcctcatgccggacctgcagcgatatcctgaggtggagcacagctacattctggaactaaaatatctcccgaaagacaagttcgaggcacagtcggcggaacaatgtgatgcagttctgcggatgggagctggcaaggatggaagaggtataaattgtcctcccgataaaacagatgcaccggactgggactgcccgatgtaaaacacagtggaacctgatacagtacatacgaatgcataaacttatgcctgcgtacgttcaggttcacacgtcacttccgcttgttgtcggataagccattgcgctttcaaaaaaactttatctttctaataatctcggcatgttttgtaatccacactgattacaccacctcctcattctcgtttcagccgcacttcccaaatcccttcaaacttgccttcaacaattccactacctcccgaaaagcccgttgaaaaacccttaagccggctttggaaacaattcccccttttcaagaatatccggacttagccctttataatatgttgacatccgttaagattctcaagtcaggagcgaaacagatgattagcgagattcaatcatctggaaatgtgatgaataaagttttaggagatagaagaaaaaaagtgcatctcttagtaagagatacacttttcgctgcaaatttacacaaagttttgataattaaaactttttgagaagaaaaatcacaagacaaatgcaaaaatatctttagtcttaagttataggacacttttttatcggcttaaactattaataataaagcggttatgtgcgttcggtgtatctcttactaagagatgcaccgaacgcaacccttttttaagggtttgaaaagtgagtaattatctgaaatagagacgataaaaagaaagtacaatggactacctgtttctacaccgcgacaagcgcacttttacttccgaaaggcagaaaaatctgcttttcagagctgctcatatttattgggagcagaagtttgcaggtcgtgagccggagaaagcaagaaaagtcgattgtgaaatatataaatatgtattgtattacttggaagtgcgccaagtgtttcttgacccggaaatctcgctgaagaaactaagtggaatgattgaaacgaaccagacttatttatccaatgtgataaaccgctacttcggctgtcacctgaaagatttactgaacaaatatcgggtggaatatgccaaggaactgctccgttcggacaaatattcacccgaggagataccccaatattgcggattcctgtcacgaagcacgttctacgccgccttcaagaaaatgacgggcttatctccaaaaagatatatgaaatatgaaatgagagcacagcactcagaatcaataaattatgtataaccaattttagttttttaaatttataaatttaaagtttttctattatgaacaaaaagtttttaagtgcaatcctgttcggagccttaatggtttcgtcaacaggaacatttgtgtcttgtaaagactatgatgatgacatcgagaatttgcaaggccaaatcaactctaacaaggatgctattgcagctttgcagaaactggtaggagaaggaaaatgggtaaccaacatctctcctgttgaaaacggtttcgctgtaaccatgagcgacggtactactacctccattacaggtatcaagggggcagatggcaaagacggtactgaatggactatcggtgaagacggtttctggtacaaggacggtgaaaagaccacttctcaagctatagcaaaagacggagaagatggtaagccgggagctactgctccttctcccaaaatcgacgccaatggaatgtgggtagtttacgaatgggatgccgttaaaggtgaattcgtagaaaagactactgaaatctctgcacaaggtactagtgcctatgttgtaaagaaggatggcgtttatgtattgcatatcgctgacgaaaccggcaagttccaagaggtgactttgcctgctacttctgatgcatttgtagtggaagctcctgctgctgtagttaaggttaaattccaaactgcaaagtggcaacctgctgtaaagaatactacagaaaaagcaaagaaggcatataagacattgactgagaaattcactgaccttgccggtattgctgcaaatgctatagtaaaacaaggtggcgaattgccgatattggtaaatcccgcaaatgtggaattgactgataagtttgatttctctttgcaactggctaaaggaaaagttcttgatattgcattgtctaaccctgttaaaggtattgcagacgactggaaagtaaacaatggtagtatgtctagagccgctaaaacagaagattgcttgtggacattggacgtagaacctgcatacaatgaaaaagataaaaaatatgcaactactgagaatgaagaagcatctttggttgtagaaaacgaaaagggtacagttgtcaagactgcttttgcatatcaagtttctgcagacgaagtgaatgaaaacgttgatgtaaacgctggtactgtaacttatgctcctactattgatttgacagctgttgatgctaagactgaaaaagccggtatcatctatgcaaatgaatacaaaggtaaagctattgtaaaactccgcgaccagttgaatattgaacaatatggtttgtctttggacggaaatgtattgactattgccaatatgcctgccaatgtatctggcattactgttaaattgaacgttatagcacttggtctgaatggttctgctgttgataaggatattgatgtaacagttaatcaggatattcaagtagccggtggtttggaagacaagaatgtaacattatctactgagaaagttagcggtgcttatacacagaatgttctttgggatgttgctgacttccagtttactactgcaactcagaaggatgcattcttcaaagctggtaagacaatgagtgtttatctgttggacgaaaatggtgacaagcctgaaacagcaacatatacttatacaacagatgataacaatcttgctcagtataagagtgacggcaaagcaacagctacatcatacagtgacttcgctaagttcggttttagcttgaatgctgcagactatgtacccggaacttatgcaattgtatttgaagcaaaagacgatgctgcaacaattgtgaaatctgaagctaccatgattgtttctaatccgaaggcagaagatatcttcaagttggtacctgactttactacagccaatgtattgcaagttatcggtaactacgctacggtagctaataaggtggtttacgatttggaagacggtatcttggctcctgatttcgccggtagtgacgtaacttatatcgacttggatcacaaagcttgggaagaagcgatgggtgctgatacagaaatgggcgcaatagactggattgatgatctaggtcgtttaagcgtataccaaaatgcttggaatggtgatgatactaaagctaacgaatatatgttgaacaaggaacgtaatatccgtgctacttataccttgtatggcaatgctaaaaacactattgactatgacttcaaggttattgttaagagctcggtttatactgctgatggttctaacgtaacagtaaaagctattactggcgcctttggtaaagaagttaatatgacttctaatatctctgctgtttatgctttgggtatcaacaagggcaaggctctgacattattcggaaacgcaggcggttctactgaaaaagatgttactgactatgacgctcctaagacagatgctgccagtaagtatgtagtgaatactgatgctactcctatcgaaattgcgaaggctgacctgattaaattcggtatgactgttgatgcttatactgcattgggagcagatgataagttcttcttgactgttgaaaacaatgatgtaacagtaggaagtgagaatagtactttgaaaggctgggaaactatcatgactgaggttaacaagtattatacttataacaacggaacatggggtgacaaggatggtttgtcagcagacgaaaaagctgcaagagacgccagtgctgaagttgctttgttcaaagcttacaaagataagttggcatacgataccaagaaagaaactgtaacaactcaagctaaaccggcttctgatgaaatcaagtctgtaacatttgcatgggacgatacaaaattggctgagaaatttgtgacatcaaccacaatcggtactgacggtaaatttacagctaaagcagaagctgacattaaagcatctgatttggttaatggtaaggctgagctgaaagtgaacatgaaggttacagataagtggggcatggtaatgaccaagacttatactgttactattaaaaaataatcatactataaagtaaaagcccgcttctccttcgtgagaagcggcttctacccaaagtagaaattatagactctttcaagcggggaaagaaaacacttcctatcaacggaatggttctttccccgcttttttatatcaaatgataaatagctggcagtttgttatttatatggacacagattgaatattcataagctgccattgaaaaaagaataatatataatcttgaagatatggtttatattgaaagtgcggaagctaaaaaagaattgggtagaattgatgatattttaaatgaaaaacaccttctaatcggaggtttggctgtaaaatacttctatccggccagagagtctaaagacatagatcttgtttgctctgatgcagtcagaaacacgattattcgtgaattatatcctacaaacgaatgggatatttttgatgagaatatggatgaatatcgtcctgattaccatataaagaacaagaaaaatggcttaatcatttcttttggtcccaaaataaaagaaagagaaccatatgcagatatcgattgggatttattagtaaaagaatactccatagcatttgaaaacaaaagagtaaagtataaaaagatttatataccatcggcaggtgcattagcgtttaccaaattaatatcttttgttaatagagaaacacacaaagacatacaggatttgcaagactttgtcgatttaaccaatcataagtcgtgcgctttagatgatttattcaacttgattgatagagttaccgataaatccaaattacgtgagaacttttggaagaaaatagcatcaaaaaaagagtgcgcctcaattattgcaaaaggaaatatatttaaactggccgattttttcactgaaagcaaaccgtctcctcaatctaatggcttcgcagatgctacaaataaagtgaatatcttagaagataatcctattatctttttttcgcaaaagaaacgtcccttagaagctgatatatcagacaatttgaagaatgccgaagagttcttttttatggcaagaacaggagttaactttttaggctctcataagtctgccgtatgtcatgcgatagacaatggctgtgtgtgcaaatttcttattgtgaatcaacactcaccggctatcgattatggacagttaagacctatagttgataggaaaaatgtgccggtgtcatatcagtggcttcaagaaatcaaagaatatgataaaggcagaaacagagtggaaatccgtgttctgaataatttccctcctttcggcattgaatattttaaaaagaaggatggcaaaaagataataaatgtcagaccctattttttgacaaattatgaacctgaaaaaaggccgctattaatggttaaagaacacagcgaatggcaaaacatcttttatagcgaatttgaacaattatgggaaaaagctcagatttggggaaatacacgaggatggggaaaacccaaacgcattgttttggatggttcgccgggaggaggtaaaaccactctgcttagtggaacatcacaaagagatatatataatagagaatttaaaggcataaataaatcagggtacactgtgtttggaaatttaataaatgcttctatagaagatatgagaagaaaaagcgcaaacaaaagcatccaaccacctgatgactggaagttgttttttgaatgtgcaacagaccgtgccataaaatattatgaagctgccaaacctgatttaatcactttctatgacaggggaattttctatttggaaataatggctgagagaaataactgcaaagagatgttgcctgagaagtacttttcatttataaatgaaaatagatacgatgatcctatttttattgttcatcctattttaggtatcgaaattaaaccattggaaggtgatagtaaaacaagggtttttactgacgatgaaaggattgaacaagacaagaaaattgtcgcattatacaaacgtcacagatatagggttattgaaattccatcaccggatagcccggatttgataagaaacttcgaagtggttaacaacagtgtcaatgaccgtctgagtataattaaaaaagaattaggcttatgaaaacaccacaattatgggtaaccatcgataaacggggcttttcaaaagaaggtctcaaaaaattattggaatataatattgcaggtataagaatgaataccggacgatgtccgtatacatggatttatgaagtgcttgaagaattgagcaggctaaattatccactatctcaaattctacttgacataggaaatacaaagccacggcttcatttaactgagacaaatggtatggagttggacaatggttccctattttcaatttcagaccaagcaaaagatggagtaaatgccatattaccgcataagcgtttttttgaagaagttaatttaaatgatattgtatattttggtgatggcgaaattgaagctgtagtcgaaggggttcatcagaatacagtaacattacgctctctttccggtggcagactgggcaatcatgttgcaatcggcatcaaaggaaaagagttttttaaatttcttattgatgaaaaagaaatcgcagaagtaaactcagtcctgcatcgtttcccaatcagtcttattttatcttttattgaaagcggagacaatcttgtttgggctaagaaggtctttcctcacgcggcttctgtcattcccaaaatagaaaccggcacggcagtatctaatattgaaagtatattagcacagtcggacacaatatttgttggacgtggagatctggggctctcattgggtattgaaaaaataggaatcatacaaaaagaaatcatacagaaagcacaaaaagcaggttgcaaaatatctattggaacaggaactttggactctttaaaatggagccaaatacctcttcgtgcagaaattattgatattactaattcgtgtttagaagggattgattacatagcattaacatccgaaacagcagcttctcaacatccattcaaagtacttgatttcatacagcacatattgaattacatcaaaggcattgattagaggttgacactaaggggtgattcatatgagataccaacgatgccgcggctttctttcctgacaagtatcggcaagttctgccagataaacattttctgtgagttgaataacctgcaaaatatccgtatgtttccctcaaacctgtcagccataccccggctcggcaaaggatttccgtatcagctgacggatttgaagttttttgtacctaatacggtatccttttaaaatacaaacttttttagaaaagttctttcaatacttgcttgttggcttcatcgattacagccgtatccaacgatgacaaataaatcatggtcgttccttcggaatcatgtcccatgctttcgctgatgacagacaaaggaatacgtttatgttttgccacactagcccatgaatggcgcgcgcagtgcattgtcaacggatgggttagtcccaccatcctgcctatatccttcaacctgcgattcatgagagtgatggcatttttatactgccttctttcatccacaccgttgtccttaagaatgggaagcagataaacagtgtgattccaagaatatttcttcacaatattttccatgcatctctcccacctgatatggagtaactgccccgttttcttccttttatacgataaaataccctccgacaaatcttctttatgcaaataggccatatctacaaaagacattccgcgggtatagaaactaaacaaaaacatatcacgcacataatccaaggtagaatttggaggcaattccaacaatcttatctgctttatcacactgaggggaagagcgcgcttgatagttttacacactcctgtatagacgtgcttaaaaggatagcgttgcaaagtaattccttgctccacggcacggttgtatacagcccgaagtatgcgcatatagaaagaaatagtattcatacttaccccattcacctttaaataggtttcataagccaccatcatgtctgagtccatttcacttagcgacacatcctcgccattcgtaaatctcataaaactattaaacgcagtcgcataggtttcacctgtgcgagtttgttccaactctttcaaatgagtaatgttcgtttgcataaagagtgccagagactttttacttgaacacctgttctttaggttaattgtaatcatcgtaatctaatctttaaattatttttttgacttaacagcatccgacaaagataagttgtctgtttttttattcctttgcaattaggaagataaaacgatgaggacataaggtattttataaaataggatattctgccatacttgccgaacatgcatatctgtatcaatcccgctaaaaaaaagaatctcattttctagaattatatttcttcgacctgcctaaaatcccccatttcatcggaagaacggttaagggaaataaatctcatttccacttaaccgttcttatttacagcatgattggcaaactgacctgccatagaaaaaaagaaaagttgttctccacctttgtgacaaaaacaaaggcatacaaggggaaaaatccgcccccgactacaggcggttttgaatatccgtgttactcaaattatgttttttacgcttgatatcggcaccgaagttatagcttaccccgatacggaagctcgtataggtaaaggtattgttgaacttcgcatagagtccgttggagtagctggtcccctgcatattcttcaccaaaaaatcacttacattcaggctcagattcagtttgttgcccaacatactataacggatacctccactggctccatagaaaccttcccgatgactcacctggtcatgactcggtccggaatagtaaccggaaagactggcaaccaacgttttggctgtattcagatagaatgtgttacggatattgatgttataatcccaaccggaatttttaggatgggtttcgggcgcgctggaagtggtcctgttatactttaacgtgtgctgggcaaacgtctgcaaccaccccaaacggaacgtataagagttggtaataccgaaagaacggtttttcatatagttgtcccacaatgaggaaaggacatgcgtttcctcattcagcatcagccgctgcgagaatacatcagtggcatacgaatagaatatagagaaattcaagttgttcttcagggtataagagagctctgcattataacgataactgggtttcaggtcttcctttccacgatgctcgctatatttgttttcgtaagtaaggaaaggattcaccatattctgtgccggacgcgaaatgcggctggatatattcatattcaacacattatcttcattcggcttatacatcagatagaaagtagggaacaagcgggtatagtcatgcttgtccgttgtctgctgggactcggaaatgcctgttgtccgagtatgctccagacgtagaccggctttcattgagaaatgggagccaaagttatggctatagtcggcataaagggcatagatttgttctttataccggaaaaagtcattttgagtgaaagacacattggagttgtcatagttcagacggttacgcgtgtcggtaaaagatgctttcgcacctgtcgtaaagctgtaactgtcaccgggaaggatgaaatcgagtgcagaagagattacatctaccgtacggcgctgattcttatcataattaaactccgagccggggattatttctcctgtcggcaggtggctttcagaatcaaaatcgaagaatgtattggacttgtctttcagataatcgacatcccatatcatcttgtgtcctttatctccccatgacttatcgacatggaagtttacattcacacgattctgtgaatagtccttatcatcacggccgagcataaatgaatcggtacgaagttcctgaatgtcgtgcacttcggtacggttgtccgttacattattgggagcactgttgatataggtaagttgggtacctatattccattgtctgcccatatcgatatctatccctccgtctacataaaaggaagaaagagaataatcgctttcggaacggctgcgccatgtctggtcggtatagaaacgcccgttacgctccacatagccggttttaccgtaagctccgctaccgttcaggtaagcggttacgcgttgacgattgaactgtaggctcaggccgccatacccatagttatatttctcaccatacagataagagccgaaagcgttgcctccgatatggtctttgacacgttccttgaggcggatgttaaggataccggcattgccttcggcatcatagcgggcaggaggagtggtaatcacttctaccttgctaatttgagaagcactgtaggagcgaagaaaattaatgagttcctcaccggagagtttggtctcacggtcgttgatataaatcttgattcctccttttcctatgatgtcgactccgctttgagacacgcgcaagccgggtacatcgtgaaggagatccaatgcattaccgcctacgctggcaatagagtttcccgcatcaaagaccacacggtctatctcacgcctgataacgggcttggcggctgtcacagtcacctcactcatcgctatggacgagtttttcaataccaaactgcctaaatcagtatctttggatagggtaagaggcaacgacaaatcctgatagcccaacagggtaacacgcagtaaatagttccctttgggttcttgcaactggaagcaaccattcgtatcggtaatcattccatcctgatacatactgtcagtggagtgaagcaatatgacgttggccacttcgacaggagttcccgtctcatctttcacacatcctgataatcgataagtttgtgccgtgattgttccccatgtacaacataaaaggacaaatagggaaacaagtctttttcgtaataaagttttcattctgtaattcgttttgtttagcacaaaggtaacagcaagaaggggcttaaacacactaaatcaggaaataaaaagtcttaatcagagagtattatttcactgattatcaaatagtttgatttataaaagtcttaaatagggcgaagcgaatcttaatggagactaaatccgtattatgttgcctgcgtattatttatatattccacaatatctcctttctcatccattcccaacttctttctgattgctgttttgcgaacatacacgctggccacgctctgttgtgtcaccaccccgatttcttttgtcgagaagtcggcgcacaacaaacagcatacctgcttttctttctcggaaagcaagtatccgtaaagcgtctccatccgggaataaaatccgttataaatagtatcgataaccggataaagatcggcccacaccaaaagagcctcgacagggacttctttgttggtaatccccgatatgcggcgcagcaagtcctgattctgcgaagtgggagcagtcgccaccaaacggataatacccagttgcttcaacagtatctttttaaagaaggcgctgtcatgctctgactcactcgctttattcgcgtcttccaatagccgggtaagtgtttcgatgcggtcttcggcttccgccaaacgcaggtgtcgattgcgaatataaaagaaaacacacaaaccacccaccgcaaagataaataagaaagtgaccagtaacagttgtgtatgctgacggtcgattatcaatgtataattctgacgttcgagcttgatttttgtatccatctgttgctgtatggtgctctgcttgttccaatctgccaagataagggaatcgccaaaccgtccggttctaatcgtcgagatactaccttccatagcgtagtccaccacattctgtaattcatagagcaaaaggcgtgtactgatgttcacaccggactgctgctctgctttcgcttcagcttgccacgccatatccagataatatgcagccgaatcaagttgccgcaaataaagaaagttctcaaccaggattgcatgggtgacagccatcttttcacgatataccggcatcaactcccaaacacggcggattagtgcatttgatttctccaccttctcggaacgcatcaggttagaagcatagttccgcatataatggcataaatatgctgtatctttattggcttcagccatcgcaatgctcttctcataataataagtgcaagagtcatcgccaaccagcccaagattaatggcgagaaaatagaacattcctgccaaagcaggggaagtagtgtcaggggaataagccaaggcctctttcacatggctggccacctcacggtaatctctgcgaagctcgtaaacaatattcgccttataataaagcaggtcgcggacattgacagagtcattggcttgctttgcctgtgccactccgctatccagctctgcaatggcatcatccaaccggtctatccatttcagatagttcgccttcaggatataacctttcatcactttctctcggtcgccatgtttgcggaagtaatccaccgctttaggcaataaagaatcttctgtcatcgatatatttcttgcgctatggaccatcgcttttatccatacataactcatcagttcttcttccgagaagtcggccaaatgttcttgctgttgcgcaagcagagacaggacactatcaggataatccgtcatcaatgaatcggcgcgttgcagtaaagcacggtgattggacggacgacatccggcaacagacagtaatatgataataattccccaaagaaaaggtaatttcttcatgatataaatgacaaagttatgctacaaagatacaagatttaaacaaaaacgcatggttattccttataaagaattatatttgtaaacgaactctacaaaccccatatctgttatgaaaaggataggattcatatattggctgacagggttctgcgtactctgttcctgcaactcgaaagcggaaaacgacgcgcaacaatccgccatcttcgaagcccgggattccattgccgaaactcctgccgaaattatggtgaaagaactggctgccgaagatataaaaatagaaaaagagctgctttatgacaagcatactttaaaagatatctacccttataaggatacaacacgctgctttcaatgggaaaagataaaagagaggttagctttgttggaaaatatccggcagaaaccatcacaatggtgtatccttcagaattataagaaccggaatggagaagctccgctggtcaagaattttaagcgggatgcttataaacgtgtggctgatactttaggggtggaacgatatcagggagtaccgttatatgagctcaatgatacgctcactccggtacgttatggactggatgggttgctgacgcgccatctgggtacaaaaggaaagtttacgaaagtcacacctgtatatataggaggagaatggtatgcacctaccaaatatgtgaaactcattcccgatactgtcgtttttgataaagctatctttgtagaccgccataaccagaatatcacgactctggaacgaaagaaagagggggaatggttggtacgcagcatgaatccggcaacgacagggcaacggcggccgccctatgcacagcccacaccattgggtatgtttgtcttgcaagaaaagaagccaaaaatgattttcctcaaagacggttccaccgcaaccggagggtttgctccttatgccaaccgcttcaacaatggtggctatattcatggtgtgcccaccaatgcaccggcaaaaggtattatcgaatatagctatacgttaggaacgacaccccgttcgcacatgtgcgtgcgcaacgcaacatcacatgccaagtttatttttgactgggcacctgttaatgagacaattatatttgttttggaatagaaatgtgcgtaactttgcacccattatttagttttcacctatgtacaaagcttttttatttctattcctatttcttttcccattcagtaacgtatctactcggacgtctgtctccgaggagatgacagatatggtcattcctgaaaacgaactaacggatggcgaagttttatttgaagaaatgaatttgggaggaattgtaaactttccggcattccgacaagctgtgcaaggttacaacaaaatagaacagaaaaagaagcccgtattaactcttatcgacttcaccaaaccatcgaccgaaaaacgtctgtttgttttcgatatgaaagaaagaaagctactttactcatcggtagtcgcacacggcaaaaacagtggggaaaactatgccacttctttctccaatgcggtcggctcatataagagctcactcggtttctatctcaccggaagcacttaccggggaaagaacggttattcattattattggatggactggaaaaaggaattaacgactgcgcacgcgagcgtgccattgtagtacatggtgctgcttatgccaatccttccgtatgcaggggcgggagattaggaagaagtttcggatgtccggcattgccgcaggcacttaccaaaccgatcattaatacaattaagggaggcagtgtgctctttatctatgccaacaataaagagtatatggcaaaaagcactattttaccgtctctacaaccgcaggagttattctccgaaactcgaaaaacgacgaaccgggcgtcttctttctagaataaaaagttcttttctatttccttttcttccttttttccataaaaactaaaaggaaaacacacattaagtcatactcaaatggagttatccaatcaaaaaagacggaaataagtgataattctatcaaatgttcatcccgccaatcaacgagaatcgcttaaaaatttccatcatgcatccttatccgaattagaggatttatttgtacttttgctcgcaaacaaaaacactcaacagttatggtgctcaattatatttggattgccttcttcctaatcgcctttgcagttgcattggtaagacttgtttttctaggagatacccaggtcttccccgagattatcaattcaaccttcagttcttccaaaactgcattcgagatttcattgggattgaccggcgtgctttcactctggctcggaattatgaagataggcgagaaagggggagtcattgctttgttctctaaattgttgagccctctgttttgcaaactttttccggagattcccaaagggcatccggtgaccgggagcatttttatgaatctggcggcaaatatgctgggattggacaatgctgccacaccgttaggtttgaaagcgatggaaggcttacaggaactaaacccaaagaaagacacagccactaatccgatgattatgtttctggtcttaaatacctccgggctgacactcattccaatcagcatcatggtatatcgtgcccaactgggggcagctcaaccgactgatatttttgtacccattcttcttgccactttcttctcaacgcttgccggaattatcactgtcagcatttaccagaaaataaacttgcttaaccgcactatcttgttatttctgggaggaataagccttttggtagcaggtatcatctatttcttcaatactctttcccgaacacagattgatatttattccaccaccactgccaacgtcttcttattcttgataattatcggtttcatcatagcaggaatgaaaaagaaaatcaacgtatatgatgctttcgtagaaggagcaaaagaaggattcagtaccgctgtacgcatcatcccctatctggttgcaatcttggttgcaattggtgttttccgtgcttccggtgcgatggattatctgattgacggcatcgaaggtgcagtcaaactatgcggcatcaacagcgattttgtgggcggactgcctactgccttaatgaaaccgttaagcggaagcggggccagaggacttatggtagatgccatgacgacttacggtccggactccttcgtcgggcgtctggcgtgtatctttcaaggctctactgatactaccttttatatcctcgctgtctactttggcagtgtaggtatcgtaaaaacccgccatgcggtgccttgcgggctgttggcagacctggcaggagtgattgcggctatctttatttgctaccttttctttggataaaagaggattatcagaatactttatctatctttgcccgtctttaaaaatgagaaaagtatgattagttatcagacagaaggcattgaaatgcctgccatcaagaaaagggaaactacagaatggataaaaaaggttgctgccgactatggaaaaagagtcggtgaaatagcttatatcttctgctcggatgaaaagattctggaagtaaaccgccaatatttacaacatgattattatacggatatcattactttcgactattgtgccggcaaccgtctttcgggcgatttattcatcagtctggatactgtccgcacgaatgcagagcaattcaaccaaccgtatgagcgggagcttcaccgcgtcattatacatggtatcctgcatctctgcggcatcaatgacaagggtcccggagaacgcgaaataatggaagcagcagaaaacaaggcattggaaatgctgagtatctgaaccgcttcttccattaatatatcaagcactccctgtcaccggatgctgtcttctccgattttcaaactctgcataggttttgaaccacctaagtcgtttcattagccggactatgcatttccatcctttcggttatgcctgtctgtaagtcggattactacagacttccacagtggactgtatagtctgttacggcagaccgtacagtccaccgtagcagactgtacggtctgctgcaatggactgtaataatcttccgtttaaaaggctttgactgaccctaaaaaacggcttatccttcccttggtcggtgagtatgaaatgtcgaatccccaagaaaacaatgtgccccgaaatacatcgccccaaacagagaacttcaataagaaaacactcgattcctgacaaaataatccctcgattctcttttttatcatcctttttcctctctctatcattttctaacaatccctcaacctactttctgacaactttttagtaattttgccacggtaaaaagaaataaatcaatggattttaagtacgacgtaattgtaattggtgccggacatgccggttgcgaagcagccgctgccgcagcgaatctgggttcaaagacttgccttatcacgatggatatgaataagattgggcaaatgagttgcaacccggctgtgggaggcatcgcaaaaggacaaatcgtaagagagatagatgcgctgggaggatacatgggaattgtaaccgaccgcactgctatccagttccgcatgctcaaccgctcaaaaggacctgccatgtggagtccgcgtgcacagtgcgaccgcggtaaatttatctgggcatggcgtgaaatattagagaacacacccaatctgcatatctggcaagatacagtagaggagttgatagtcgaaaatggtgaagtaaccggactggccacttgctggggagttacattccatgcaaaatgtatcgtgctgaccgcaggaactttcctgaacgggctgatgcatatcggccgcaaaaagctggcgggaggacgaatcgccgaacctgcttcttaccatttgaccgagtctatcactcgtcacggaatcattgcaggacgaatgaagaccggtactcctgttcgtattgacggtcgcagtgtacactatgaactgatggaaacacaagacggagaaaatgactttcaccgtttctctttcatgagcgaaccgcgcaagctgaaacaactgcaatgctggacttgctttacaaatgaagaagtacacaagattttgcgtgaaggactccccgactctccccttttcaacggacaaattcagagtatcgggcctcgctattgccccagtatagaaacaaaaatcgtaaccttcccggataaagaacagcatcagcttttcttggaacccgaaggcgagacaacgcaagaactttacctcaatggcttctcttcttctctgccaatggatatccaacttgcggccttgaagaaggtaccggctttcaaagacctggttgtttatcgccccggttatgccatcgaatatgattacttcgaccctacccaactgcaacacacgttggaatcgaaagtaatcaagaacttgttctttgccggacaagtgaacggaacgaccggttacgaagaagccggaggacaaggtatcattgccggcatcaatgcacacatcaactgccacggtggagaaccattcaccttagcacgagacgaagcttatatcggtgtattgattgacgacctcgtgacaaaaggtgtcgacgaaccctatcgtatgtttacctcacgtgccgaatatcgcatcctgctccgtcaggatgatgccgatatgcgtctgaccgaacgggcatataaactgggacttgtcaaacaagaccgctacgagcacctgtgcagtaaacgcgaagcggtaaactccatcattgattttaccaggaagttctccatcaaagcagcactcatcaatgacgctttggaacatttgggaactgcccgcctcactcacggatgcaaattaatagacttgataaaccgcccgcaaataacaatagaaagtattgccgagcatatcccctcgttcaaagaaatgctgaataatataaccgaccgcaaagaagagataatcgaagcagccgaagttcttatcaagtatcagggatatatcgaccgtgagcgaatgattgccgacaagattcaccgcctggaagctatccgcataaaaggcaagtttgattataattcgctgaactcgctttctaccgaggcccgtcagaaattaataaagatagaccctgaaacattggcgcaagccagccgcatcccgggagtttcgcccagcgatatcaatgttctgctggtgcttctcggaagataaaaaggcaatgtttcacgtgaaacaagttatttaattattaaacaataaaacgctggttatgagcaaagaaacgctattagctaatttaagagaaatacctgattttcctatcccgggtattttattctatgatgtcactacactgttcaagagtgccgagtgcatgcaggaaatgttggacacattatatgagatgtacaaggataaaggcatcaccaaagtggtgggtatcgaatcacgaggattcatcatgggcggtgctttggcagcacgtttaggtgcaggttttgtaatggcacgcaagcccggcaagctccctgctgaagttctggaggaaacatacgccaaagaatacggcaccgataccatccaaatacacaaggatgccatcagtgaagaggatgttgttttgctgcacgacgatttattggctacaggcggaacaatggcagccacccaccgcttggtacaaaaatgtggtgccaagaaagcatatatcaatttcattatagaattaaaaggactgaacgggagaaaggcatttcctgccgatatcacagtggatacactgctgcaattataaacttcgcctgcagtcgaaaaatgtacctttgggggtgtgtcaaaaccaaaccggtctatccgatcgtcagctgtagaggcaggggttgcctgcccgaagacacaaagcaaactgttttcgggcgagcgaacctcacccctacgaaccaaacgacagtattatccaggttttgacacaaccccatattccgaataatgtatccgcgaatatctgcaaataaccaaacattacccctacaaccaaagatagtatataaacctttggagcagacgtatgaaatccgtctttatcccaaaacaataatattgtaacaatatggagaaaaaagaagagattagcaccaatgaatatctgagaggaatcgttctcaaccttcccgaaagccccggcatttatcaatatctgaacgccgagggaacaattatctacgttggaaaagccaagaatttaaagcgcagagtctcttcttatttcaacagagaacatcccaatggaaagacacgagtattggtcagcaagattgcagacatccgttatatcgtagtaaaaacggaagaggatgccctcttactcgaaaataacctaatcaagaaataccgtccgcgttacaacgttatgctgaaggatgacaaaacctacccttctatctgcgtaagtaacgaatactttccccgcatcttcaagacacgtaaaattatacgtaacggctccggctattacggcccgtacagtcatgttccatcgatgtatgccgtactcgatttgattaaaaagctctatcctatccgtacctgcaaattaaatcttaccccggagaacatcaatgccgggaagtttgatgtctgcctggaatatcatataaagaattgtaaagggccgtgcataggacgccaatctcacgaagactatatgaaagatatccgtgaaatcaaagagattttaaaaggcgatacacagattgtaagtgacctgctcatggaagagatgcaagccctggcttccgaaatgaaatttgaggaagcgcaaaagataaaggaaaagtatgacctcatagaaacctatcgttccaaaagcgaggttgtcaattccatcattcataatgtcgatgtattttccattgaaatggatgaaaactcggcttacatcaattacctccacattaccaacggctgcataaaccaagccttcacattcgaatataaaaagcgtttgaacgaaaccaaagaagagcttttgcaactgggaatcgtagaaatgagagaacgatacaatagtacttcacgcgaaattatcgttcctttcgaggtggatatggagatgaacaatgtaactttcaccattccccaaagaggtgagaagaaacacttgctcgatctatccgtcatgaatgtaaaacaatataaagtagaccgcctgaaacaagcggacaagctgaatcccgagcaaaagaaagtacgcatcctgaaagaaatacaagaccagctccacatggagaaaatgcccgcccacatcgaatgttttgataattccaacatccaaggctcgaatgccgtagccgcctgcgtggtattcaaaatgggtaagcccagcaaacaagactatcgcaaatttaatattaaaaccgtagaaggacccgatgattatgcctccatgaaggaagttgtccgacgccgctacacacgccttatcgaagaaggttctcccctgcccgacctcatcatcaccgacggtggaaaaggacaaatggaggtcgttcgtgaagttatcgaggacgaacttcatctgcgtattcccattgccggacttgccaaagaccgcagacaccgcacttcggaactgctttacggatttcctccgcttaccatcggcattaaacaaagcacaccgttatttcatcttctagagaatatacaagacgaagtgcaccgattcgccatcactttccatcgcgacaaacgaagcaagagtcaggtagcctctgccctggacagtattccgggaatcggcgagaagcgcaaagccgcccttctgaaaacgtttaagagtgtggcacgcataaaaaaagcaacacaggaagaaatagccgccgtagtgggcgaagctgccgctaaaaatatcaaagaaagccttacagaatagaagggatttttctacctttgcatatatactatctgcaaaaaacgataaaaaataaaatatgagaatagttatacaacgagtaagccatgcatccgtcaccatcgacggggtctgcaagtcggccatagaaaaaggattaatgatattagtaggtattgaagaagctgataatcaagaagatgcagattggctatgtaaaaaggtaatcggcttgagagtatttgatgatgaaaatggagtaatgaataagtccattctggaagcagaaggtaatatattggttatcagccaatttacattattcgcctcctacaagaagggcaatcgcccttcttacatccgtgctgcacgaccggaaacagctattcccttatatgaatacttctgtaatgaactcagtatcgctcttggacgcgaagtgggcacaggagaattcggagccgacatgaaagtcgaacttctgaacaacggccctgttactatatgtatggactcaaaaaacaaagaataatatgacactggaagaagcacagaaagaagtagaccgctggattaaaacatacggcgtgcgctacttcagcgaactgaccaatatggccgtactgactgaagaagtgggtgaactggcacgtatcatggcacgtaaatatggtgaccaatccttcaaggagggcgaaaaatgcaaccttgcagacgaaatggccgatgtgctttgggtactcctctgcctcgccaaccagacaggtgtagacctgacggaagcctttcatcggaatctcgaaaagaaaacaaaccgagacaaagacagacataaaaacaaccccaaattataaagaattatggaacataaccacgattgtagccacagtcacgagcatggtcacgaacatgaggatgctcacgacaagtatatggaagcacttgccaaatacaacacccatctgaatgatgaagatgtaaaagcaaaagttacccatttcatcgaagagcatttggctgaaaacaatacaccggaagttaagaaattcctcttccactgcattgatctcaccacattaaaatgtaccgactcggaagaaagcgtaatgaaatttaccgaaaaggtaaacgatttcgttgacaaatatcccgatttgagcaatgtagccgccatttgtgtttaccccaatatggcagagatagtaaacgacacgctggaagccgataacgtaaatattgcctgtgtatcggggggatttccctcttcacaaacattcattgaagtgaaagtggcagaaactgccatggctattcatagcggtgcagacgaaatagacattgtcatctcggtcggcaagttcctgaccggtgactatgaaggaatgtgcgatgaaatcgaagaattaaaagcagtctgcggagacaagcacttgaaagtaattctggaaacaggagcactcggaaatgcttccaacattaagaaagcatctattttatcgatgtattcgggcgcagacttcatcaaaacttctaccggtaaagaaaatcctgccgcgacccccgaagctgcctatgtgatgtgtgaagccatcaaagaatactatatggttaccggcagaaaagtcggctttaaacctgccggaggcatcaataccgtgcacgacgcattggtttactacactatcgtaaaagaaatattgggcgaagaatggttaaccaatgaattattccgcttaggaacaagccgtctggctaatctgctcctctccgaaattgttggtcaagaaactaaattcttctaatcactacaccatacaactattacaaccgattccatcgctgtgagaagcaattccacgacgatggaattgtttttataccaataaaaggataaacaggaagttatttctcacgttctatcacgtaatcaatataagcagtcaaagcatctttaatggttgtatcagcagtagaaggaagcaaatccaatgctttattacgataatccaccatcacctgtctggcatactctataccgccattctttttcacataatcgatgaagagggatatttctgcatctgtagcatccaaggatttaatgcgaagcgccaattggcacatcttctcatcacccaaagtattcagcacatgcaatgccggcaatgtcaacttaccttcgctcatatcattgcctgtcggcttacctatctcaccggaagagtaataatcgaaaatatcatccttaatctggaaagcaatcccaatcatctcaccgaataaccgcgcattttgcaccatttcatcggaagagttgacagctactgccccggcttcggcactggctgtaaagagtgcggctgttttcttacgaatcacatcataatagacttcttcagaaaattcagaagcattgatattagtcaattggataatctcaccttcggcaagattctgcccaagccgtgccaccaaatcgacaatacggatagaacctgtcatggcagaatgtttcagactggtagccaacatatagtctcccaccaacacagacaccttattattataaatagcatttaccgatgactgtccgcggcgtttatcactttcgtccaccacatcgtcatgcaccagacttgctgtgtgaagcaactccaatgaaagagcagcatgaagtgcagaataattgatttcaccgaataatttggccatcagcaacgtcagaataggacgcatcatcttgccattcctctgcttaatataggtcaatacctcactaagtaaaggattggaactttgaagcgaagcgtcaaacaaggatttgaactcttcaaactccttaacaataggcaatctgatttgctgtaacttgtccatacaggttaatttgagcacaaaagtagtaataaaacgcggaatacggtatttttttgtacttttaccatgaaaaaactaaagatttttaagaatggacaaactttttctgctggatgcatacgcattaatatatcgcgcatactacgctttcatcaaaagcccgcgcattaactccaagggtttcaacacttcagccgtactcggctttgtcaatacactggaagacgtattgaagaaagaaaccccaacgcacattggtgtggcattcgaccctgccggacctactttccgccacgaggcatacgaacaatacaaggctcagcgcgaagaaacgcccgaagcaatccgtttgtccgtacctatcataaaagacattatccgcgcttaccgcattcccattctggaagtgccgggctatgaagccgatgatgtaatcggtacacttgccaccgaagccggacggcgcggtatcactacctatatgatgactcccgacaaggattatggtcaactggtgagtgacaatgtatttatgtaccgacccaaatatggtgacaaggaatttgaggtgatgggtatcgagcagataaaggcaaagtttgacattcagtcacctgctcaggtcattgatatgttgggactgatgggcgactcgtccgacaacattcccggttgtccgggtgtaggcgaaaaaacggcacagaagctcattgcccaatatggcagcatcgaaaacctactctcccacacagatgagttgaaaggggcattgaaaacaaaagtggaaactaatcgaaaaatgattgagttctccaaattcttggcgactattaaaattgatgtccccattacattgaacatggatgaactgaaacgcgaagaacccgacgaagaggaacttcggaagatttttgaagagatggaattccgcacgctcatcgaccgcgtttttaatcgtgaaaagaaaacggcttcggcaggtgcgacttcaatgtcacacgacaaagcacaaggctcacttttcggtgaccagccttcactatttgaccaaccgagcacttcaccatcttcacaggcttcatcacaaggcaatctctttgcagaatttgaagacgagaatacaggaaacggaaattattcaaatctcgcatgtttagaaaattcaaaatacgactatcaacttattgatacagaagaaaaaagaaccgaattaatacaaaagttacttacaaaagaaactttcagtctagacacggaaacaacaggaaccgatcccatcaccgcaaaactggtaggaatgagtttcagctacaccgaaaaccaagctttctatgtccccgttcccgccgaacaaaatgaagcacaaaaaattgttaatgagttccgaccggtatttgaaaaagcaggagtactgaaagtgggacaaaatatcaagtacgatatgctggtgctaggcaactacggagtagaggtttgcggtccgctgttcgacactatggtagcacactatgtgctgcaacccgaactgcgccataacatggactaccttgccgaaatctacctgcattaccagacgattcatatagaagaacttatcggacctaaaggcaaaggacagaaaaatatgcgcgacctccctcccgaagctatatataagtacgcgtgcgaggatgccgatgtcaccttaaagctaaagcatgcactggaaaaggaactgaaagagcaaggagccgaaaaactcttttacgaaatagagatgcccctagtccccgtcctcgtctatatggaaagaaatggcgtgcgtgtagacacggaagcactgaaacaaacctcggaacatttcacagcccgcatgaatcaaatagaagaagaagtacatcaattggcagggacagagttcaacattgcatcgcccaaacaagtgggggaagtcttgtttgacaagctacgcatcgtagaaaaagccaaaaagacaaagaccggccaatacgtgaccagcgaagaagtattggaaagcttgcgcggaaagcatgaaatagtgggcaagattcttgaacatcgagggctgaagaaactactcggaacttatatcgatgccctaccccttcttattaatccggcaacgggcaagatacacacgtccttcaaccagaccgtgaccgccacaggacgcctcagttcgagcaatccgaacctgcaaaacatccctatccgcaacgaagacggcaaagaaatccgcaaggcatttatcccggaagacggatgcgagttcttctctgccgactattctcagatagagctccgcatcatggcccacttaagcggtgacaaaaacatgatagaagctttccgcgaaggagacgacatccatgccgctacagccgccaaagtatataaaatagccatcgaggatgtgacacgcgagcaacgcagcaaggccaaaaccgccaacttcggtattatctatggcatatcggtattcggattggcagaacgcatgaatgtcccccgtcaggaagccaaagaactgatagacggctatttcgatacctatccgcagatcaaggaatatatggacaagagcatcgaacgcgcacgtgccaacggttacatcgaaactattttcggccgtaaacgcttcctgccggacatcaattcacgcaatgccgtagtacgcggatatgctgaacggaatgccataaatgctcccattcagggaagtgcagccgacattatcaaagtagccatggttaaaatattccaacgctttcaatctgaaagtatacgctctaaaatgatacttcaggtgcacgatgaattaaacttcagtgttgtgcccgaagagaaggaaaaagtacagcaaatcgtaatggaagaaatggaaaaagcctatctgatgcaagtgcctctaaaagcagactgtggctggggaaacaattggttggaagcacattaaaaagaacatataatcactaacacgctatatataaatatattaaaggagaccagcagttggtctccttcctttatctgcctattctgattgtatactcaaaaatctatttatcctctttccctaaagaatctccggtctgccagtccaaagataaacaaccgccattcacccactattcctctgttattcaagataaatacataaactcctttctctctctttaaatacattctgttacatattgaaagcacctaattcttaatatttgtttatttagggatattcagtaaatgtctctaaaaaataagatgg

SEQ ID NO: 6798 - DNA, 221 bp, Unknown
  gut microbiota DNA sequence
ccgccagctgacggaatagctggttaaagggtgtagaagttgattgtggcaggcaaatccaccacaagattcgaacctgacagtatggagcgtccttccggacaatccaatagtgcatgtaatcatactgccaagaaaatccgctaaacataaccttcagggtacccgtaccgcaaacggacacacgtagtcgggttgaatatactaaggcgcttgagtga

SEQ ID NO: 6799 - DNA, 342 bp, Unknown
  gut microbiota DNA sequence
cggccgccgtttactggggcttcaattcaatgcttctcttgcgatgacatctcctcttaaccttccagcaccgggcaggtgtcaggctgtatacagcgtctttcgacttcgcacagccctgtgtttttgttaaacagttgcctggaccgattctctgcgccctcccgctaacgggtagggaccctttttcccgaagttacagggttaatttgcctagttccttaaccgtgaatcactcaagcgccttagtatattcaacccgactacgtgtgtccgtttgcggtacgggtaccctgaaggttatgtttagcggattttcttggcagtatgattacatgcact

SEQ ID NO: 6800 - DNA, 822 bp, Unknown
  gut microbiota DNA sequence
ggggatgttggctgtgagcctcttgcagctgatattccctttccttacgcaatcattggtggatgtcgggattcgggacgggaacctgggctttatcacgctgattctgacagcccagctcgtcgtctccgtttcccggctttccgtggagttcatacggagctggatattgctgcacatgaacacgcgcatcaacatatcactcatctccgacttcctgataaagctgatgaagctgccgctgcgcttcttcgacaccaggatgataggggacatcatgcagcgcatcggagaccataaccgcatcgagagcttcctcaccggctcatcggtcgcaacgctgttttcgtttgtcaatttcttcatcttcggatggatactggcctgttacaatccggtcatactgggtatcttcctggcagggaacacgctgtatgtgtgctgggtgctcgtgttcatgaaatacaggagggagctggacatcaggcggtttgcacaggcggccggggaacagagcagcctgatacagctggtgaccgccatgcaggagataaagctgaacaactgcgagaagcagaaaagatggcagtgggaaaggattcaggtgaaactcttcaaaatcagcatccgggggctggcactgggacaggtgcagcagacggggtccgtcttcttcaaccagaccacgaacatcatcatctccttcatcgccgccaaggcggtggtggacggacagatgaccctgggcatgatggtgtcgctgacctacatcatcgggcagctcaacggcccggtcacgtcgttcatcgggttcgcacagca

SEQ ID NO: 6801 - DNA, 291 bp, Unknown
  gut microbiota DNA sequence
tgttaataaatactaaaccgctatcttaaatagatattcttgccaacaatttcatattctataccgggaaccaatattttaatgatttgaagtacttgctccaacgattcatttctattaaaatgaactctcaaactttgattctggtaaatagatgtacgcacatggaatttcacaccatacacacgttccaaagtatgaagaacatcattaaacggcacattgccaaagaacaaccctcccatacgccaatcggagtgggaaacagcattcactttatgctgctgtact

SEQ ID NO: 6802 - DNA, 3596 bp, Unknown
  gut microbiota DNA sequence
ctgcacggaatacaaaacggccgatacgaccaaatccgttaatacctactttaatcattttgtttaaattttaaaggttttataatatagcttttaaacactctacgttggaatgttgttaaacgtttaatatttatttcctaaacgcggtgcaaaaataagaatttgtttttatattcgcacataaattcatattaaaataaaaaaaaatgggaaaaagtagctttttgcaagattttaaagcattcgcaatgcgcggaaacgtcattgacatggcagtcggtgtcatcatcggtggtgccttcggtaaaatagtatcttccattgtagccgatgttatcatgcctcccatcggattactggtcggaggcgtaaactttacagatttgaaactacaattaaagcctgccgaagtggttgacggtgtagagaaagccgctgtaaccctcaattatggtaatttcctccaagccacgtttgatttcatcatcatcgctttctctatatttttatttatcagattacttgcccgcctgaaccgcaagaaagaagaagttccggcttctcctgcagcacctcctgccccaagtaaagaagaagtgctgttaaccgaaatccgcgatttactgaaagaacaggcagacaagaaataactggaagattttagaatagaaaaggaaggggatttttacacattcgtatgtgtgggtctattttatatatgtgtagcttcacgcttacgaacgtgtaagacgatgtttttcatgtcattgttaccagttcggcaactgcaattgcctgattagccaatcccgtttttgctttattgtaaaggcaagatgaagctacagcatatcaaagcatgaagttttttacgctcatctacaaaaatgcctctacggtatgacggttttattgtttttctgagtatctttgcggcacgaaaacatttacatatcataataatatgcaagaaaaaatcattattctcgatttcggctcacagaccacacagctcatcggccgtcgtgtccgcgaactgaatatgtattgcgagattgtgccctacaacaagtttcctcatgatgatccctcggttatcggtgtcatcctgtcaggaagccctttctctgtttacgatgaaagcgcatttaaagttgacttaagcaatattcgtggaaaatatcccattttgggtatctgctatggcgcacagtttatggcatacagtaatggcggaaaagtagaaccggccggtacacgtgaatacggacgtgcccatctctctaccttcgaacatgagaaccccttattgaaaggtatccgcgaacagtctcaggtatggatgagccacggagatactatcacagctatccccgaaaactttaaaatcatcgcttcaacagataaagtcgctatcgctgcttatcaagtaaaaggagaaaaagtatggggcgtacagttccatccggaagtattccacagtgaagacggtacccggttattgaaaaacttcgtagtagatatctgcggtggcaagcaagactggagtgcaagttcatttgttgacaccactgtggcagctctgaaagagcaagtgggtaacgaccgcgttattcttggcttaagcggaggtgtagattcatctgttgcagctgtattattgcaccgtgccattggcaagaacctgacttgtatctttgttgaccacggcttattacgcaagaatgagtttaaaaacgtaatgcacgactacgaatgtttgggattgaacgtaattggtgtagatgccagcgacaagttctttaaagacttggaaggcgtgactgaccctgaacaaaagcgtaaaattattggccgtgactttgtagaagtattcaatgccgaagcacataaaataaccgacgccaaatggttggcacaaggcactatctaccctgaccgcattgaaagtctgaacatcacgggaaagacaatcaaaagccatcacaacgtaggtggtctgcccgaagaaatgcaccttagtttatgcgaacctttacaatggctttttaaagatgaagtacgccgtgtaggtcgtgaattaggcatacccgaacatctgattacccgtcatccgttccccggtccgggtctagctgtacgtatcttaggcgatatcacccgcgaaaaggtacgcatcctgcaagatgcagacgacatctttatccaaggtttgcgcgactggatggtaaaagatgccacgggcaatgatattgctctttaccaccaagtgtggcaggcaggcgccatcctgttacctgtacaaagcgtaggagtaatgggcgatgaacgtacttacgaacgtgctgtggctctgcgtgccgtaaccagtaccgatgccatgactgccgactgggctcatcttccttacgaatttatggctaaggtttcaaatgatatcattaataaggtaaaaggcgtaaaccgcgtttgctatgatatctcatccaaaccacccgccacaattgaatgggaataacctaaatatactcactgtagggaggaaacttcctgttccttcctacagcgaatgattaaaatctctcaataaactatggcagataattatatagaaagacagttcgaacaatatcaagctaaaaaggccgcttggcaaaagcctctcaaacatacttccaagaagacaaattccaaaagagtttttataaccggaggagccaacggcattggcaaagccattgtaaaagcatttcgacagaaaaattatccggtagcattctgcgataaagatgaaacttcaggactgcaaactgccaaagaaacaggagctgcattctatcttgtagacatacagaataaagaagctctggaaaattgtatgctaaaaatcatcaaaagatggggagatatagatatcttaatcaataatgcaggagtgagtctcttttctgacctcaccgaaacaagtgtagaagactttgaccaaatcttatccatcaatctccgaccggtgtttataacctcaagacttcttgccatccaccgcaaagctcaagattctccgcaacattatggcagaatcatcaatatctgttccacgcgccatttaatgagtgaaccgggaagtgagggttatgccgcctctaaaggaggaatttattcactcacccatgcacttgccttatcgcttgccaagcaacatataactgtcaactccatctcaccgggatggatacaaacacaagaatatgaacttctccgccccgaagaccatacacagcacccttccggccgggtgggaaaaccggaagatattgcccggatgtgcctgttcctttgccaggaagaaaatgatttcatcaatggtgaaaacataacaattgatggtggaatgaccaaaaagatgatttatatagaataaatcatctctgcctttatctgcatatttccttttccatcgccattttttccggcttcagcaccttcttccctatttagtactcgaatgcttcttacttttgtctcaaacctaaaagacaaaatatgaagataaacgtacattccatgttagtatttagaatctcaaaacaacc

SEQ ID NO: 6803 - DNA, 1037 bp, Unknown
  gut microbiota DNA sequence
gtgatgcaggacggattcatattttccgataccatcgcgaacaacattgccgtaggcaccgaacagccggacatcgaacggctgaggcatgccgtgagcgtggcgaacatcagggaattcatcgactcgctcccgctgggctacaacaccagaatcggcatggaggggaacgggctcagccaggggcagaaacagaggctgctgatagcaagggccgtgtacaagaatcccgaattcctcttctttgacgaggcgaccaacgccctggatgccaacaacgagaaggagattatggaacacctgcacgagttctacaggggaaagaccgtagtggtggtggcgcaccggctcagcacggtgcgcgacgcggacaagattgtggtgctggacaaggggaaggtggccgaagagggcacgcaccgggaactgacggagaaacgtggactgtactaccggctggtgaagaaccagctggaactgggaaactaaggaaaggaggaaggcatggaagaggaacggacgcacagggagattgaactgcgcagcgaggaggtgcaggaggtgatgggcaagattccgcccgccatcctccgctatgggattgtcgtgctgctgggcattatggccgtcgtccttgcaggcagcgcctgcttcagctatcccgacacggtggagacggagttcacactcaccacgcagaacccgcccgcctacatcatggcgcagagcgcgggaaggatagaacagctatataccgccaactcccagcctgtcggaaagggcgacatgctgggagtgatagagaacgtggcacgcaccgaagacctgttcgtgctgcgggaacggatgaaggaatggaagcagggtggaagccgcaccgagcaggtgggtacgctctttttccaccggatagcggagctgggaagtgtgcaggcggcgtattcgtcctgcctgctggcctggaacaactaccttcagcacatgcaggaaagcaggacgtatgagacagaggtggccaacaccgtggcgggtctgct

SEQ ID NO: 6804 - DNA, 1143 bp, Unknown
  gut microbiota DNA sequence
cagaacatacgccgacctatacaaccgcaaaaaaaaggtaggggaatgaagatataaccgttttatcttgctggaaaacaataaaaaagtgctgttcataatgccttatgaatggcactttttatatatttgcacacaaaataaggatagagcaaataaaagtaaatacagaatcgtaaaatttgatagatatgaaaactcaaaaattagaaatactgatattatttctctgtatattcggctttataggttgtgataacaaagatgaagagggtgagaaagtgacagactacaaggaatattctttaaccattgcatcaaagaagatacccggtgtttgttggtcagacggatttaattatttgtctgatgtatatgccgtaaagaaagaaaatgcccaagaatgggagagccttggagtcattgatgaatttgagtttgagaaaggatatgaatataaggtaaaaatcagtgaaacaaattatttggattatagcatgggaaatcccgcatggacggaatatgaactacttgaaataatatctaaagataggaaagattcagaaaatttgcctttacattttatccctaaatcatactatgagaatgtacagcttcctaaatacagatatgtagtagatgcagataataatcaaaaacttattgaagaagaattgaaaaaaaaatcttttattcctttggattttcattatatgctttggcggagcgaagacaaattcctaagatgtattgcaataaaagacgataataatacattgggaccgtgtattataaaaaacgaaaacaaagccccggaagaaatgccagaatcttacaaattacttcctccagaaggaaatgtgtttggttatgggaaatggacttttttagatgaacatggaaatgaaacgaattatctttcatttgatgtgtttatgggtcgttctgctaaatcaagaaacgtagatttaacccccgatgtagcttatctttataaagacctttctgaatactacaaaaataaatatccgcaagccggagtgaaaacagttgtggtttcttatgccatttctattaaataacataaaatcttcagcgagcatcaatcatcctaattatagtcaaacagaattggtttgagag

SEQ ID NO: 6805 - DNA, 396 bp, Unknown
  gut microbiota DNA sequence
cacgccaaactcctcgactagtgagctgttacgcactctttaaatgaatggctgcttccaagccaacatcctagctgtcttagcaatctgacttcgttagttcaacttagcaattatttcgggaccttagctgatggtccggattcttctcctttaggacatggaccttagcacccatgccctcactcctgggatcgaactactgcgcattcggagtttatcaagacttgataggcggtgaagccctcgcatcttatcagtcgctctacctcacagtagtaattcccaaggctgcacctaaatgcatttcggggagtacgagctatctccaagtttgattagcctttcacccccaccctcagttcatccggaagcttttcaacgcttatcggttcg

SEQ ID NO: 6806 - DNA, 76905 bp, Unknown
  gut microbiota DNA sequence
tctccggcttgatgagaacatacatcatatagccgaacataatcaaactaactacaaataatgctgtgtacataacttgtttctcctttctttttttagatcttctcgaaccagtctatgcatttaaagaaaagccaaaagcaagctatgccgctcaaggtacaaactacaaatccgattgaaaataaatccataattccttttttttaattaatactattgttaactgtcacgttatatgccaatagtgtgccaaagaaaaaacatgtaatgtatatacttgtaaaacagaataatgcaataaatcaggaagtaaaaggagaggagtataccttttcaaaatgaaaagagatcaatatcaaaacaggaagatattgaataaaagatgaaggtgtgccaaaatgaaatgcccccgaaagttttttatctgactttcggggggcatttcattttttaataagaaagagaatttaataacgagtcactttatctgtatgtcctttcaaatattcaaagcggttgattaattttcctaataattcagggtatttctctgctaaattattttgctggctaatatcttctttcagattatacaatttatatccgtatcctaaaccgataaattcaccatcttctttactgtatggattataataaggaggaatcaatgcccaatcaccttggcggtatgcataattaaacattccttcaataaccaattctttacgcccttcttgactcttacccaaaaaagcatctaatgtattttcgctgtccaattgatcaggataagtctgccccaataatgcggcgaatgatgctaacaaatccatttgacaaataaaggcatcggaaacctgcggttttacctgagccggccaacgtagcataaacggaattcgtgttccgccatcaaacatactggttttaccaccacgtaacggacctgcaatcttgtggtcacctaccagctcttctgcttgatctttgtatccgtcatcaagtaccggaccattatcgctagtaaaaatcacgatagtattttccgttaatcccaacttatctaattctttcaaaaactcacttacacaccagtctgcttccaaaatagcatctccacgaggccccatacccgatttccctacaaaacgttcgtttggaacacgaggcacgtgtggttgatgaagtccataatataaaaagaatgatttctctttgttgatatttacaaattgcttggctttattcaagaacaattctgccatctcttcgtctttccactgagcagcttttcctcccttctgaaaaccgatgcgaggcactccatttacaatagaccctgcatgacctacactaggatgcatacgaagtagctcagggttattctttccagtgggttcaccaggaaaattcttccgataatttacataaagaggatcattaggatctagccctacgacttttccattttcaagaaaaacacagggcacgcggtcattggtagctgcttgaataaaggaataatcatatccgatttctgctgcaccgggactgacctctttattccaatctacatttccgtctcccaatccgatatgccatttaccgaccgaacctgtaacataacctgcctgcttcatcagtttaggaaaggttattttttgagtatcaataattaaggctgcatttccgggaaggattttagcatcgacattgctccaagggtatttaccggtcattaccgaataacgactgggagtagaagttgctgctgtacaaaatccttgtgtgaagcgaatgccttcattggcaatgcgatccattccgggagtttggaggcgatgagcaccataacagcttaagtcaccatatcccaaatcatcggcaactatcaaaataacattggggtgtttatccttctgttcttgttggggctgtaagtttgcagtcatcgcaaccgttggcgaaaatgcacttgccatcaggcctagagtgtaactgaataatttcatatcataatagttttaagtgtttttcattaaaggcttataccgtattcttctatcttacgataaagcgtggtcaggcctattttcaataaacgcgaggcttcagtcttatttcctttagtatattgcagaactttagtgatgtgatgtttttccatagcagccagttcaaattctgaataatttttgctaataagctcttcttgctggctgttttgtatttcaatgggaaggtcttgcaaagttaattgtttatcacaaataatcatactgcgctctatcacattacgcaactcacgaatattccctctccaatcagctgctttcaaagctgtcaagaactccggagtcattccttccacttgttttcccagtttatttgaaaaaagccggataaaagttctcgctaagatttcgatatcttctttacgttcacggagaggaggaagatgtatctgaaaaacggaaaggcgataataaaggtcttcacggaaattgccttgttctatttctttttttaaatcacgattggtggcggagataatacgaacatttactttcgtgggcttcgtgtctcctatttttatatattctcctgattcaagcacacggagtaatttagcttgcaattcaaatgccatttcacctatttcatctagaaagatagtgccattattagcaacttcaaataaacctttcttatctttcatcgctccggtaaatgaaccggctttatggccgaatatctcgctttcaagcaaatctttactaaaggcggaacaatttatcgccacaaaagcattctctttacgaaggctattacgatggatagcttgcgcgaagacttcttttcctgttccggtttctccggtaagcaatactgtgacatcagtcgctgccactttctgggctaaagcgacagtttgttgcatgcagttcgacttacctttaatggtttcaaaagaataggtatgcgcttcttccggttttgctttttctcctatattctttttagcttgctccatggcgcgactaacgacaggaataatcttattgttatcgtctcccttggtgatatagtcgaaagccccgttcttaatcgcctgcactccatcaggaatgtttccgtgagctgttaataaaatgatttccagctcgggatagagctttttcatagtaagaaccaaatcgactccgtgaccatcaggcaaaaagacatcacacaatgccacttgaggagtgtgcagtttcaattgttttaaagtcgattggcaatcagttgcttgaaagacctcatagccttctagttccatcatccgtgaaaggagttttcgtatctgcggttcgtcgtcaattatcaaaatactatccatttccattttatttgtttcacaaagatagaacaaaatagcgtctcacaaaagattattaaaaaaaatgtccgatgaacaattttatatattctttcgttaaataaaacggaagctacttctttatacctcttcacctgccctattcttattaatttaaactctatataaacaatgaataaaatagaaattaaaaacttatatcttattttcggttcggaaaaacaaaaagcccttcggatgttgaaagaaggaaaaagtaaaaatgaaatattaaaaactactgattgcaccatcgctgtaaaagacgcaaatttagatatccatgaaggcgagttctttgttataatgggattgtcgggcagtggaaaatcaacactgcttcgttgcatcaatcggttgataaagcccacgaaaggacaaatccttatcaatggcaagaatattaccacaatgtctgataaagaattgttggatatgcggcgccacgagatttctatggtgtttcaaaactttggcttgcttcctcatcgcagtgtgttgagcaacatagccttcggattggagttgcaaggtgtttccaaacaggaacgtgaaaagcaagcaatgaaaagcatggaaatcgtcggactgaaaggttaccagaatcaaatggtgggacaattgtcgggaggtatgcagcaacgggtgggactagcacgtgcattagcaaataatcctgaagtattacttatggacgaagctttttccgcactcgaccccttaatccgcgtgcagatgcaggatgaaatgctaaccatacagtctaagatgaaaaaaacgattatttttattactcacgatttgaatgaagccattaaattgggagaccgtattgctatcatgaaggatggggaaatagtgcaagtgggaacttctgaagaaatcctgactgaacctgctaatgattatgtagcacgttttgttgaaaatgtagaccgaagtaagattatcacggcaggaagcattatgataactcatccggcagtcgctcgtctgcgtaaagaaggacctgaagtcttgattcggaaaatgaaagaaagagatattaccgtacttccggtgatagatgaaaatgataaattgattggagaaatcacattggaagacactgctattctccggcataaagggataaaatccatccaaactgctgtactgagtgaagtacattccgttacagaagatactaaaatagaagacttacttccattgattaccaaaaccaattcccccatctatgtggttaatgaagaacgtgaattgaaaggattggttcctctctcatccattgtagtagagatgaccggaaaagataaaaacgaaattaacgaacttattcaaaacgcaatcgaattatgataaatatcggaaaatatatagaaatggcaatcaattggttgaccgaaaactttacacttttttttgatgcaattaatgtcgggataggcgggttcattgacggatttcaaaatgtattgatgtggattcctttttatataactattgtgctgctgactcttcttgcttggtataaatcggggaaaggagtaggggtgtttaccgtcttcgggttattacttatttggagtatgggattttggaatgaaacgatgcagacactggcattggtattgtcgtccaccattattgctctgattattgggcttcctctcggaatttggagtgccaatagtcaacgatgcgataaaattctgcatcctattctcgacttgatgcagacaatgcctgcttttgtttacctgattcccgctgtcctcttttttggattgggcactgtgcctggagcatttgcaactatcatctttgctacgcctccggtggtacgtttaactagtttgggcattaagcaagtccccaaaaacgtagtcgaggcatcccgttctttcggagcaacccccacacagctattgttcaaagtacaattgcctttagcattacccaccatcatgacaggtatcaatcaaaccatcctgatgtcactttcgatggtggtaattgcagccatgattgcggctggcggtttgggagaaatcgtattgaaaggcatcacacaaatgaaaatcggtctaggatttgaaggggggatagcagtggttattcttgccattattctagaccgcattacacaaggatttggaaaacaaaagaaaggaaaataaacatgaaaagaatcttttattttttatctttccttttgctgctcacatcgtgcagcggaaagaaggataataaaacaatcagcataggatacataaactgggatgatggcattgccctgacccatttggtggaagtgattttggaacagcagggttatcgggtgatactgaagaatgccgaccctgcacccatctatgctaccatggcccgcggaaaagtggatttgctgatggatgcgtggttgcctgccacacaagcagattatatgaaacagtatggcaagaatctggaaatccttggcgagatttatcggaatgcccgcatcggattggtagtaccggattatgtatccatgaattccattgagcaattgaatgccaaccgtgagaaatttaaaggggagattatcggcattgatgcaggggcaggtattatgcatgccaccgatttggcgatagagaagtataagctcaactataaattgttagaatcaagcggtcctgccatgactgccgtcctgaagcgtgccattgatgagcaccaatggatcgtagtgaccggatggactcctcactggatgtttacccgttttaaacttaaatttctggaagatccgaaaggtattttcggaaaggtggaaataattactgccattgcccgaaaaggctttggcaaacagcatccgtttgtggcagagttaataggtaatatacacatgaccacagatgaaatcagtagtctgttgaatgatgtctcgcaaaatgaatataatgagaaagaaggggtagaaaagtgggtaaaagaacatcaaagtttggtagattcctggataccaaattaattctttttcggagagataccagatacctttattttaaataatagcaagaatatttttttatgcaatctacattagaacgaattgtttttatctctatctttgcattattataaaatatgatatgaaacatgaatgcaactaaatcgagattgatttttcatcttatagctatcgtaactgtaattatctggggaacgacttttgtttccactaagattctcattcaaaatggcttgactccttcagagatattcttttaccgttttgttttggcttatatctgtatgtggagcatctcccgcaagaagttttttgccaatagtattaaggatgagtttttattacttttagccggactgtgtggaggaactatatattttcttactgaaaatacagcactgggtatcacacttgcttccaatgtatcattaattgtttgcacgtcacccatcctgacagctttcttatcatatctttttaaaagaaatgaatcctttacgcgacatttattttatggctcatttatggcattaataggagtaggactggtagttttcaatggtagttttattctcaagataaatccattgggagatttcctatcattaatagcagctctaatgtgggctttctactgccttattcttaaacagttagatagtcggtattctacagcatttattactcgaaaagtctttttttatggaataatgacaatattgcctgtttttttatttcgtccattgcattgggatatttccttgatgctacaacctgtcgtttggggtaatctattcttcttgggtatcattgcttccatgttttgttttatctcttggaatgcttgtgtaaaagaactgggtgcggtacaaagtactagctacatttatatcgttccactggtaacattacttacctcagccataattataaatgagaagattactgtaatagcattatccggttgtttccttatattatgtggcgtatatttggcagaaagaaaaatatcctttacatttagtacaaaatccaaagtatatgaatgaaatagataaaatgcgtaaaagtgaattggctgatatggaaaagccagaaatacaagctagttttatccatgccaaaaagttattggccaagatgagaacaatgactatttatgatgaagattttcgtcaaatattagaagaattggtgccgaatatccctattacttccatcatttgtccgcctttttattgtgaccatggcaccggtatcaaattgggagaacatgtatttgtcaattcgaattgtacttttttggatggaggatatataactatcggtgcccacacccttatcggctccaacgtacaattatatactccacaccatcctattgattatattgcaagaagagaaaccaaagaatatgcttatcctataacaatcggtgaagactgttggataggaggaggagctattatctgtccgggagtaactattggaaaccgatgcattattggagccggtagtgttgttacaaaagatatcccggatgattctattgccgtaggtaatccggctaaagttattaagaatttaaattgagattaaacagagaatggtaccataatctatgatccattctctttactttattatccgatatacacatttacacataaaaacaatcgatcgttcccaccttcggtttcaaaatcaattttatcttcacgagctaaccagccaatggcggcatttaaatctctatcagacaatccgaccgcctccttcaattcagaatagctccatcgtttattattatttagaagctgccaaacttttccggcatttaagccaattaaattcttattcattttgaactttcattaaataggttaataatagaatgcttagttatttgtcgtgaaaatagcattttatcatgtaaaaagctaaattttatatataaatttcatttaaatgacgttataatttaacattattttcttttagatttcatcatttctcatttagtagtgttattgatagagatgataagtcccttttacaaaaatcttatctgtctttattaagcaaaacagaattttatttgttattgcataaaacaaaataatcaataatgaataaaataataccagtacttgtagcggtaataatttgttttagtgtgggagtcatggcttcatatttccaggttgatgctattcaaacatggtatccattcttaaataaaccatcattaactcctcctaattttatatttcctattgtgtggagcatactttatttttgtatggggatatcgataggactaatatggaatactaaacatagaaaaaggaaaatattgagatggctttttagttttcaactattacttaattttacatggagtatttactttttctactttcaaaatccgtttctgggatttatagatatactacttcttgatatatttgtcatatattatatgatgaaaagttattcaataaagaagatgagctccttattatttattccttatatattgtggctactacttgccacatatctgaatggatatataatgctatataattgatatgtatatattataagaaaggttccgacttatcacaagccggaaccatcatcattctacatactaactaaaaaattatcttatcacttttccatcttcactgaagtatctagtagtttcttccaaactactagtcaagataatcactttatagattctgcttccatcagcaccataggataaaaatgcctgttttatcatggcaccttcacatgccaaagtatccatgatcgtttcgggaacatcattcatatagatttcaataaaatcgggagatttctttacagtttgttccttctttgcatcttttacaccttctgcgaatacaactgacgtgcctaatcctaataccactgctaataaaactaatacctttttcattatttctcgtttttaaattaatttgttgtcgatatataagcaagttgcgtgccaaagttttgaagatattaataatatattgataataaggtgtttaattatatgtatacttttgaaggaagtgtggaaaaatgattttagctctacaaaattgtagaataattccacatatcaagtgtggagtgatttcctataaaactaaaaaagtcactgatggcaacagtaaccatcagtgactcatcaaaggttgctttattaaaattgaaaaaaattctttgcgttgttatatgcaatgtcttctaccatctgattaacgcgttccatttcgcatacgggtatttcaccgttttctatatcattgcctaataagttacacaaagtgcgacggaaatattcatgacgagggtaggataggaaagaacgtgaatctgtcaacatacctacaaaacgacttaatagtcctaataatgataatgcatttatctgcttttccataccatctttctggtctaggaaccaccatcctgaaccaaactgaattttgcccggaatagttccatcttggaaattccctaccatagtagcaataacttcattagcacaaggattcaaattataaagaatagtcttagtcagttttccttccatgttcaggcgatcaagaaattttgccattgccttagccgtagtaaattcaccgatcgagtcaaaaccggtatcaggaccgaggagcttgaacatcttggtgttattgttacggatagcaccataatgaaactgctgagtccaacctttctcccaatccatttcgcccaatataactaacatggcagatttgaatttcaatatttcttcttttgtcaacacctgtccgctatatactttattaaaaatagttttaatttcagcatcggtataattttcagcatagaattcttcaatgccatggtcagataatttgcagccttgttctgcaaagaaatcatggcgtttgtgcaaggccgagaccatatcatcaaaagaagaaatagtaacaccgctcactgccgatagcttttccatatatgtgcgaaaatcactaggaacctctactgccatagttttgtcaggacgccatgtaggaagcatttttatttcgaaaccactttcacgtgttttaatatgatattccaaagagtcaacaggatcatcagttgtacaaaccgtttctacatgataacggcgcatcataccacgtgcagagtattctggttgttgcagtttctcattacattcctcataaatttcgcgggcagttttcggatttaatattttatcaataccaaaagctgtttttaattccaaatgggtccaatgatacagtggattgcgaaaagtatatggaactgtttcagcccatttctcaaatttctcccaatcagaggtctctttaccggtacaataacgttcgtccactccgttggtacgcatggcacgccacttatagtgatcacctcccagccagatttcggtcagtgacttgaactgataatcatcggctaccatttgaggaataagatgacagtgataatcaataatgggcattttagctgcatgttcgtgatataatttctgtgctgtttctgtctgaagcaaaaagttttcatccataaagtttttcataagtagtctttttaatatctatataattgttgtctattttaacatgtatccaagcgtggtatttgaaaagatatacaagaacgtttatttaaagttatcaactgttatcgaacacgaagttagaagttttatttgaaatagcaaaatgattcgtatatttcagctgatatttaaatattttaaatgattactgtttgaatagtaaataaagaaatattatcacttaatgctgttatgtagtactattaattatcataacctttacaaggtgtaaataatttctatggggaagtttggttatttaacctaatctccctatttttgcttaaatcaaatacgaaataaaatggaaaaatacgaattcagaaccaagcaacctttgtgggtatggataccgatagctttcatccttatatttgcaataatatatgtaggtatgacaaaaaagtatgaattaggaattatatggctgatttatgctatcattacattcttggccggtcattttacttacactattacgccaaactattttatatataaccccggattgggaaaaacaaggaaattcccattggctaatatcacagaaatagagagaaaaatgtcaaagaatgaagaaataagatctattatagtaagatattctgaggataaaatttatcataatttttttgagattaaaggacataatgttaatgttaaagccattttagatgctattcaggactattatcctaccgttctaattcgttaatgataattatcaaagaaaaataaagaaataccgattttgttaaactataaatactaagaaaactaatatctatgagaaagttattattttccataggaacattattatatactgttacctgcatgggaacatcgaaaaaggagttacccaatattctatttcttttagtggatgatatgcagcggacttgcattcatcacaatggttgtgaacaagtaagtacacccaacattgatcgtatttatcaaaatggtatctcatttcattctacttacaccaatggctcgttgggaggcgcgctttctatgcctagtcgtgccatgattatgaccggtagaggagtttttcagatagtaaaggacggacaagtgattcctgagcaacacgttacattacccgaactgctgcgtcaacatggatatattactttcgaaaccggaaaatggcactcggatttcgcatccttcaaccgctctttttctaacggggaaaatatattcttcggaggaatgcacacttatgaaacaaacggccatgtagagcctcgcctgaatcattatgattctagtggaaaatatcgagaaaagtttaccggagataaattttcctctgaaatgtttgctgatgcagctattgctttcctaaaaaaacagaagaacggcaaacaaccgttttttgcttacgtagcctttacttctcctcatgatcctcgattgaaacatcctgactacggtaaacattatgaagcggataccattacattgcctatcaactttctgccgcgtcatccttttgatacgggagatatgaatgtgagggatgagatattaagacctgtaccgcgtactgaagaagccataaaaaaggagatagcagattattacggtatgattagtgaagtagatactcagatcggtcgtgtattacaggcactgcaagaaagcggacaacttgacaatacgattctggtatttgcttctgacaatggtttggcggtaggtcaacacggtttgttaggcaagcagaatttatatgatcacagtgttcgtattcctttgattatttccgcacccggaatggagaaagggacgcaacgaaatgtatattgttatctatcggatgtatatcctaccctatgtgatttaataggcatccgtccgtcttcttccgtaacaggaaaatcattgctgccggtgatgaaaaaagaagaaaatacgcatcgtgaccatctctttcttgcctacaacagcattcagcgcggtcttgtgaaagacggttggaaatacatcatttataatattaagggagagaagaaagaacagcttttcaacttgaatgaagacccatgggaaatggtgaatcttgcagagatgccggcttatgctttcttgaagaatgcttataaacgattactgaaggaagaaatgaaaaagaacaatgatttctgtaatctggatgatttctattggtggggtaaaccaggaatgatttcctgggacgaatcactgaaactttatgtagaaccctaatcaggtcggatacactaatctcaactttgggaatgtgtcaaaacaaaatgacctatcccaccgtcagctgtaggggcaggggttgcccgaagacacaaaacaaactgttttcgggcgagcgaacttcgtccctacgagctaaacgacagcattatccacgttttgaccccaaactaacaatcatcactaatattatcgtttgcataatgtcttaaaatcacaataagtacatttctctacaatctccgtttgagtaaaaggtatttccgggttaaatatatcctccagcaacacttgcaaccgctctctgaattctgtttcatatatgctgaagtcttccacaggttctttgggtttacgagattctcccatttgaataaccggagagtaagtttctgtcgctgcccgatgaatataaagcaaggaaggagcgacctttaatggctgtttccgacacataatggcagcataaagaaatgtttggaacacatagttggagcgttttttagccggcgtgaagagggattccacgttgggaggagtgtccgcatcaccaccggttttatagtctacgattcgcaatgtaccgtctttgctgtccaaacggtcaataatacctccaatacgcgattttataatacctttcggagtcttaatttcgatatcctcctgcacaggctgttcggaacccacgaaagtaaagggcgtatagcgcaaatcattctccaacaattgtttcagataccttgagataacagcagaatttattaactgcacaccattatattcaggcttttcatcttgggatacattaaagaacagttctttaaaagcaacatccacatagtcttgcagttttacctcattatgaagaagtacctccaatgtctctttgtcaattacattgttatgtgctgtcaaatctttataaatattctcggctgccaaatggaaaatacttccgaatgtggcagagtctatttctgcactgacttgctcaggagctgaaagttcggctacataaatataatagaatttcagcggacaatccaaataataattaagtgccgagggagagaatttggcttttttattaatacgaatatcaaacacgttttgcatctttctcattacttccggtgttttggggatagtaatggaaaacgtactttgtggtgattgtcctgtttccaaatattgacgtataatggggtgaggccattcaatcaagaattgtaacataaagcggctccattctccacgattaagtccatcagaactggtattgtataataaagtaactttttcggcacgttgcagcagtcgatagaaataataagcataaacggctatcttgtgctcaatggtagtcatgccaaacgctttacgtaaattataaggtatgaaagaagaatctcctcctgatttgggtaactgaccttcattaaccgataacatgatcaaatggcgaaaatccaagttacgtgtttcgagtactcccattatctgcatcccaatggcaggctctccgtgaaaaggtatattggtagccgataacactttaaccaacaaacgccgtaatgtttccggccgaactgtcagttctccttcttctattaaagtacggaatctgctgactgtggtatatgccttaaaaagtgactcacgataaaggtcttcttcagtttcatttcgataaataccggctatttgctgcaatatttcagatatacggagacacaaacttaggttactgccggatggcggagtgaataatagagtaagaaattcatctctttgcaattcaccgggtaacggataaaaacgattgtgcttggtcagttctttttccaatgattcggaattggaactcaattgacgagtataaggatgtttcagcagagtgacaaccgataggtatgtataacgtccgctatgttggttatacccgtgagtatgcaactccagcaatgatgtaagaaagctatatacaggggtttgagatagagggaatcccatagtaatattcacatgctttacttcatcaggcaaggaatgaagcacaggttgaagtaatgcttcgttacaaaggacaatagcagtttccttttcttgctttgtcaagttttcacgtatccatgcaggcagataacgggcttgtgcattttcggtaggcgcggcaatataatggatttctttgggacgtgctagagtattaaataactcagcaggcaggggagaaggaaaatcacgcaaattgcggcgaataaattctccggcttcatgaggatatggttcgtcagcattcacaaaagagtgagagctcatgtaaaactcatcataatcccaataaaaaattgcttttcctgcttcttgcaactttttaaataaagtctgctctactttattcagtacattaaaacctataaatacatatctttcgtaaggcaatgcctctacatccaaatgttcaattacatgacgataaagcattccttcgtatgcaattccccgggatgaaagtacttcgtgaaattttttgtaaatattccccaaagcatcccacatggagatgaatcgctctttcagcactgtgcggtgctcaatagagaaattctgaaaaaactgttggatagcttcttcctgctcattgttgaggaaggtataatcatccatgatatttttcaggtcttgcagattagtgaacaagttatcggtgtccaccatatttttatcagcatcatcaaaatcactgataagcatctccccccaaaaatagaaatcatccaaagtttctttgctttgagtttcgtgaaggaatactttatagagttcgcataccaacttgaccggatcgcccacttcccatgtagaaaggctacggaaaagttcactaatactcacataagccggtgaccaaattggtgtgcccgactgttccgccaaatgctcattaaaaaacaaaccggcgcgtttgttaggaaataccacagcagtatgcgccaagtcaccttgagtgcgattatacaaatctgttgctacgagttttaaaaagctttccatgattattttacctccacaaattcattatcaaatacataccacaaatatccacggatattctcatatcccatgtcggacaacaagttcatataatcgcgtacctgcttattgtaatcggtgcgtttctttccaaacttaaaatccactactactactttaccgtctttcatcatcacacggtcgggacgacgcgtttgcaattctcccttctccttatatataatagcacattcattataaagctcccaattcccggaataccattctttcaccaatggatgattcagagcccattcggtcaatttcttgatttgtctctcttgctcagccgactcaattattccttcaaaacgaagtcgttcgatggcagaagggatatcatcttgcgtgcgaatcactgaaaacagattatgcaataactgcccctgacgaatatacctctctccggtttcttcttctccacggataaattcggcagaacggttagactgtttgaactcgatgttgctctccagtgattctaaatgaagaggaattttttcaggattcattagtaatttattttttataatgccatccgttctcttttcttctgataaataaagcgttcccatttcatacgcaatattatcagtatcggtattatcttctgatttttccaaatggctgctgtcatgttcatgttgtggaatacttatctgtcccatagcctgttgcaacagttccgaaacagtccctttcagtccgtctttaccccaaatgataagattcttcttggcacgggtaaacgcaacataaagcaaattcaggttgtccacccacaactgcaatcgctcattcaaatactcttccctgtagatagattgctgcatggctgtggagtaattgacaggaacgatatcgagatcgttaaacggtgccactttgggtgtacaccatatcagatgtgtcaaactgcgttccttttccatattccaatcacagaagggaagaagcactgtgtgatattctaatccctttgacttatgaatcgagataatccgaataccctctacttcgcctgaaggtattgttttctgagagagtgtctcctcccaaaaagcgataaaggcagacatctccgaagaattattttgtaaatattccacaacagcatcaaagaatgcacaaagataggcgtcttgttgtttgatgcgtgacatctcaaacagaccgaacaatttctccatcagttcatacagtggcattaatctcagtttcttctgctgttcgataaaagagaccggtaaatactcatctatatcattcagtaacagcgtgttcaaatctatgttgttcttcagtatttcattttgataagctgcggcaagttgtgcttttgcaatgcgattctcagggttggacagatagcgcaacccatccattatcatacagatggccaatgatgcattcaattgaaaagcttcatccgatactattttataaggtgtattcttatcaaaataatcggccaccaacggaatggttttattctttcgtaccaaaatggcaatatccttcaattgtatacctgccgttaccaataattgagtctcatttgccaattgctgtaaagtatcctcaacataagccatctcttctttttcggtcaggaaagttactttcacatatcctccgtccgggtctttatccttttcctggcatacatcgacatatgcttctttcaaatctttacactcttctccttgttctgacttatagatatcatttaaagtatggcaagcagcagtaaataccttattattgaattcaataatatttcctgcactccgacggttggtggtcaatgtctttacattaatgggaaatgactcaatatggtctttcagcccgttcaagattccccagtctccattacgccagcgataaatagattgcttcacatctcctacaatcaggctgttttctccttgcgaaagtccttctaacagtaataaacggaaattatcccattgcatccgggatgtatcctgaaattcatcaatcatcacgttacgaatagtggttcctatcttttcaaacacaaaagaagagtcaccgtcatgtaccagattatgaagtaatacattggtatccgaaagtaggaagcgattgttctcgtaattcaagcgacgtacctcttcatcaatatttgccaacaatcgtacattatttatatagcgtaaagaaagctggcaggagttgaccagcatgttattcttacttcggaactcttctgctgtttgcagcaaggggataagttccgcagctgccagttcggtaatggcgttacggcgaggcgagcttttggaagaccagttttcaggagaggcaagatgtttttccactgtcgcattgcggaggctgtcatccaactttcccatctgtagtttgctgaaatagctggatacccctttacttttattggccagattatctatagccagaccgttgctttccaatatcccgaaaaattggtcggcaaaacctttcatctgttccaatgcttccgtttcgatagcttgcagtgtgcggcgatagtttttgatacagtctttatcctgcaactttcggcgcagtccgtcacctttttctatatatccttcatcaaagatattccgtccgaagttcttgatttctcctgatacattccaacgtttatcgtcagcaatacgttcctcgatatagtccaatagccaataaagaacaggagactgacggttaagcctttcaatcattgagtccaccgcatcactcaatacctccatattgttcaattcaatcgtcaagttggctcctaattccagttctcgtgccaaattacgcattaccgattggaagaaagaatcgatagtttccactctaaaacgactgtaatcatgtatcatcagatgaagtgctttaccggctgccatgcgaatctgctctttgggcataccaagctcttctgttatcttctccagataagccttggaggatttatcgtttatccaaattccatacagttgactcaaaatgcgttctttcatctcggtagtagccttattcgtgaaggttactgccaagatattacgataagcccggggattcagtattaataattttatatattctactgccaaggtaaaggtttttcccgaaccggcagaagctttatagactaataattcaggggaattcttcatattgctttttttagttgctgcaaagaaaatataaagcaatgaagtatgcaatttcttctgcagtttaattccgtataaagcctccctaataatacttcttgttctaccggataaggagtttcaaacagttttatgctgatgaaacaataagagtgaaagaaaaactattcttttatatcctgatataagaatcttttaatacttttctttgctgttttttcgaactcttcgggatatagtttacaacgtgtaatttgtgagtaagcaggtagttgcttgtttaattcaatgcgattctcctccatagctctttcaatatcggcgtgtttgagtccatgggcaaaggcatcatcattatcaggatagaccaatgccactaatttatcttgttgcaaaataaccaaagattccgatacgtatggcatattgttaagctttgactctatttcctcgggataaatattttgcccggaagcggtgagcaacagattcttacaacgacctttgatataaatgtgtccttcggaatcaataattgccatatctcccgtgtgcagccaaccgtctttatcaatcacttgcccggtggcttcttcatttttataataacctaacatcacattagctccccggcaaaccaattcacccggcacttctgatgggttggaagaaagtactttagcctccatacgtgctgctaccgtaccacaagaagcttgctttaactctgtccaatgattatggcaaataataggaccgcactcagtcatgccatatgcaatggtataaggaaaattaatactacggacaaatgcttcgacttctgcattaaatggagctcctccaataattatttctataaagttccccccgaacacttccattgccttctgacgtatcagttcttttattttgtcactgataatggggacatgaagcaaaagtttgcctaatttattgtccaccttgggtaagatgtttttcttgaatattttctccacaatcaaaggtacacatgaaatgacccttgggcgaatttcggcaaaagattctgcaatgattttaggtgacggcatacgggtaagaaaccacaaatgtgcaccaacagtgaagccgtaaaggaaatcaaaaaccatgccgaatacgtgtcccaatgggagcatggacacgacactatcaccggctttgattccaatcttttctttacagtacaatacatttgaaaggatactgcgataagggagcatcactcctttggaatatccggtggtgcccgatgtataattgattattgaaagctcttcaggcgaagtctcttttcggtacgatacattctcgggacgaaaacggcatggatatttgcggccgaacatttcgttaagatgttcgcgggcataagtcaatttctccgaacgggagactaccaggccgaagtcctttaattcgatgataccttctaaatggggcattaccatttcattcaggttttcccacacttgatcgcccgcaaaaagcagccgtgcttccgaatggttgacaatattatgcacttgatcgggcttgaattcatgtaaaatgggtactaccacaccaccatacgtcataacagcaagaaaagtaacagtccaatgggcactattacgtccgcaaatggctattttatctccttgcacgatgccggcattctccagcataatgtggattttctctatctttcgggcgacatcccggtattgaagcgtagcacctttatagtcagtcagggcattcaaataccaatttgcctttatgctttgctctataagagcgataaaactctgttctaattccatgataacttttgcacaatttatggccaagtgtgcgcaaaagtagtaaaatgagcctatgagacaggaatacacaatagctttttacattaatttaacgacattcacccggttttgtccttttcttcatcctctttcagaaggagaggcttaataataagtcttttttcactaccagtgcaatgtttatttcacctttttctacataaaatcaaagacggaaggggagatggcagtattattatagcttgcatcctttgtttgcagcatgcgtccgccgggggtaaggaatagctgataaatagcatcagaattatccatatttacctgtacgacatagacagccggtcgtttggggaactcgataaaaaagacattttgtaccgtccattgtgaaaaggaactgaatgtaaacgcattataagcaccgggaggcagttggtctgcagtttgcaaatcggtattcgtcattacccattgagcattgatattcatccatacctttgtgtcgaatccattttgtataaaatcagccgtatgatagtttccctgttgcgaccattcgacatcagcagccaaaggatatatcttttttaatgccgaataaaaggcagaaggcgtagcagcaagacctgcctgtaaccacaagcaagtgataatcaggatataatattttgtttttatcataatacgatacttgtcaaatacaacaaataaaacagcagatattctttttttgtttatgggaaactaaaatataatttaattcggctctatattcattagaaattatatctttgcaccccaattttaaactatgaacaaataatggaaacatacgatatttacttcagagacgaacaagactcagccaataagggattcaacttgaaggacaaagagaaagctattcggatggcagaagatatgctggcagagaaaaaaggttatgtgaaagactttccgggaggaattatttcagttatagataaatcgacaaaagaagaggtgtggtctaagccgataccaaagaattaggaagatatattttaggcacggaatacacgaacttcataaaaagagaacccgtagcttccgtgcccggtattacttattattaatagaataattgttcaggcttgataggagtgaatttctcctgatctgccttgcggattgagatagaagcatcatcccacagtgaaggccatccaccaatgatgtgtccaaggaacactaccttcaattcgtgcagacctttagccaatgcgactgatttgtcattgcgtgagaaacgtttcacttcgccctcattgctgataagaagcttaccgtcaatccatacttcatcattgtttgtggtgaagtaataaacaccatcttcaggaatatctacatatccggtagcgatagcaccgtattgttttacgccacgcatactttcggtagattccacctggctgcgtatatcacgaagagatttcactgtcatttctttccattctgttgctttattcaattcacttgctttaaagaatgtgccgtcagccatcttcatcttcagccccggagtcgttttttcaaccactttggcaggagccaatgcctgtttttctacagtgatattacgaaccggactcatttttccggaaggaagaactgtacgaatctttagggtagtggtttctgtcactttaatcggttctgtgtattgagtagacaaaggtgtcgggtcagtaccgtccagcgtgtaaaccatcgtttcgggacgtgtagttttgaatgtcaaagaagtggaatcaacaaaagccacaaagttacaagatccgttcggttgttcaggttgcggaatatggtaattgacatcatgaccatccaaacgcacataagcattgttgatacggcgttcaaagtctttgtaatcctttttatccaacggagtccatgcaatttcagaaacagccagcatacgcggatacatacgatattccataatgtcggtattgtacatatattccgaccaatgattagcctgtacacctttaatatgtttatctttacccaaagtgaccaatgtatcgggcaccggattgtagctatacactttttccaacaaggtgtagccaccgatacttaccggttcgatctttgaatctccctggaaggtatcgagatacataccgtttccgcccggagtcataatagcatcgtgatcctgcaaagcagaagcaatacctccggcttcgccgcgccatgacattacagtagcctcaggacttaaaccaccttcaagaatctcatcccagccgataattttcttgccatgtttagcaagcattttctccatgcgctgaataacgtaactttgcaaacgttcctcggccgtgtgatttttatccgttttcaaaccttcagccttgatgcgtgcctgacaagccggacagttcttccagctgcttttaggacattcatcaccgccaatatggaaataagtgccggggaacaacggaaccatttcttcaacaacatcttccaggaatttaaacatgtcttcttttcccggacacattacaatatcttccacaccccaaataatacgtggagtggtgggctgacctttacaagaaagttcgggataggctgagatggcagccagctcatgtcccggagtttccaattctggaattaccgtaataaaacgttcggcagcataagctactatatcctttatttcctcctgtgtgtaaaaaccgccatattcagtgccctctccatcaatacgcttagagcctatttctgttaacttgggatattttttgatttcgattctccatccctggtcgtcggtaagatgccaatgaaaagtattgattttgaacaaagacaatacgtcaagttgttttttcacattttccaccggaataaagtgacggcatgggtcaagcatcataccacgataagcaaaacgtggagcatcatcgatacttacgcaaggtgcactccattcgatgtttttgaccactgaaggactctccacttcggcaggcagcaattgcaaaaaactttgcataccataaaagacaccctgtggagtcttggcctggattttgacaccttgtggagtaacatccaatcggtaaccttcctcgtttatctccatggcaggatcaatgagaagagaaattccgccatccttctctgcatcagctattgcaaaattaaatcctgtagaatttttcaatttggctgcgaagaactctgcaatagttttggcttccggtgtaggagcatagaaagaagaactggaagataataggaaacgaccttcctgttgctgcaaagaagccggcatcgggatgatgtttatcccttcgttgtaagttctttccggtgcggtttgtgtaccgcatgatgtaagtaagccgagagtagcggctacacacaccgtagtaaaaagttttttcatgtaagtgaaatgtgtttaaaggtttatcttgggcaatatgccatataacataattatcggactaagatagagcaaaattagctgattgccaaattatgtgtcggatatgtaacaaattagtagtaaataatggggatttttaataataatagttatctttgtgaggctgacttatgattaagcagctttcaggctatgagaacatttctttatttttttgagtaaaaatcgggtcacttattattcttggggggataaatatcatatcacaaacaaagggaagaataaaccgtttcctatggccggtcaaggtcttttaaacggaagattattacagtctgcggcaatggactgtacagtccactgtagcagactgtacgatccactgcaacggactatacagtccgccgccggagactgtagtaattcgacggacagacaggcataaccggaaggacgaaaacgcttggtccggctaatgaaacgacgtaggaagctcaaaaaacgcatgcaggggttgaaaaccggaggagacaacatcaggggacaggtgtttgatcgatgtgctaaatcctcaagaataatgaccggacccttatcacccacggagttttcggattgacccgatttacttcaatatcggttgctgtttcagggaatgtgacaaataaaaataggacgtagatacctacgtcctaaatgttgttttgataaaatttttaaattccctgataattctttctgctttttatataaagcaacagggaagggatattgtggagcatgcgagactcgaactcgccacctttagactgccagtctaacgctctagccagatgagctaatgccccggttttgtgttgcaaagatacacataaaattgaaattgcaaaatagaaaccttatttttcttccaattattttaatataatattatttctcctctatgaatgaacaaagaatcatccattctgtttatgaggttcatcaggtgaagcaactatcgagttgcatatctgattaatttaattttttgttcataatagatgccccggcttgcgagaagtcggggtatttttattacatttgcaaaaacgtatctgtttaatgtaaacaaataaaatgaatatgctgatatataataccacttatcaagtagcaattgatgatgcacgtaactttgtcatctggcttaatgaatgctatattcccgaagtagaaaaacaaggattgcttcaaagtccgcgccttactcacatcctcagtcataaagaagaagacagtgaatgtttttcactgcaatgggaagtagaagacagtgcagccttacatcactggcatacccggcaaggtatgaagcttaacgaagaaatgatgaaagtcttcaaagacaaagtggtaggatttcccaccttaatggaggttatcaagtgattcagccggttaaagagaaaataattctgggtattgaccccggaactaccatcatgggttacggattgctgaaaatagcaggtaccaaaccgcaagtcatcaccatgggagtgatagatttacgtaaatacgataatcattatcttaagcttcgtcgaatctttgaacgtgttatcggcattattgaagcgtatctgcccgatgaactggccattgaagctcccttttttggaaagaatgtacagtccatgctaaaattagggcgtgcgcaaggggtagcaatggctgccgcactaagccgtgatatccccatcaccgaatatgctccattaaaaataaaaatggctatcaccggcaacggacaagccagtaaagaacaggtggcggatatgctgaagcgtatgctccatattcccgataacgaaatgctaccttttatggatgctaccgatggacttgccgcagcctattgccattatttgcaagccggaagacccactcttgccaaagagtattcaggatggaaagattttatcaataaaaatcctgataaaataaggagataaacaaaaaaagtattggtaagtaacaaaatataaatttatgaatgtcaaacacgttatttgggcatcgattatgtcaaccaccatcagttgtcagtctgtaaagaaagaatatacatcttttgaagaatatcctatccccgaagggaagttagtggaaatggagtactcgccaattgaaaccaagtttacactttgggcacctacagctgaagaagtgcgtgtattgttatatgattcgggcaacgaaggttctgcttatcaaactctgtcgcttgaaatgggagaagatggtatttggaatacttctattaaagaagacttaaaaggaaagttctatacttttaatgtaaaagtaaatggtaagtggctgggagataccccgggcattatggctaaagcagtgggagtaaacggaaagcgtgctgctgtcattgacttgcgctccaccgatcctgaaggctgggcgaacgatgtacgtccgcttttaaaggactatgccgacatcatagtatatgaaatgcatcatcgcgatttttctttggattcagtttcgggaattcgtaataaaggaaaatttcttgcattaaccgaattaggaactactacttcgcagggtgaaaaaaccggcatcgaccacctgaaagaactgggtgtcacgcacgtgcatattcttccttcatacgattatgcatctgtggacgaaagtaaaccggacaaggcacaatacaattggggctatgatcctcagaactataatgtacctgacggttcttattccaccgatccttataagcccgatgtgagaatcaaggaattcaagcagatggtgcaggcccttcacaaagcaggtatccgtgtggtactcgacgtggtttataatcatacttttaacactgaggaaagcaacttcgagcgtacggtacccggctacttctatcgccaaacaaaggatggtaaaccggccaacggctccggctgcggaaacgagactgccagcgaccgtgccatgatgcgtaaatacatggtggagtctgtactctactggataaacgaatatcacattgacggcttccgatttgacctgatgggtattcacgatattgagacaatgaacgaaatccgtgctgccgtagacaagatagatccatccatctttatttatggtgaaggatgggccgccagcgctccccagcttgatcaagaagaacttgccatgaaagccaatatatacaagatgccacgtattgccgctttctccgatgaaatgcgcgacggtttgcgcggtggttgggatgatgaccggaaaggtgctttcttgattggccaaccggggcatgagatgagtataaagtttgggttggtgggagcagtcaaacatccacaagtaataaatgattcggtgaattacagcaaagaaccgtgggcattacaaccgacccaaatgataagttatgtcagctgccatgatgatatgtgtctggcagacagactaaaagctacgatgccggatgcaacggacgaagaacgtgcctctctgcacaaattggccgaaacttttgtcttcacctcacaaggtgtaccttttatttttgccggagacgaaatgatgcgagacaagaaaggaatacataattcttacaatagtcctgatagtatcaacacaattgattggaggaacaagacgatacatcatgatgtttttgattatgtgagagagctgataacattgcgaaaaaatcacccggcttttcgaatgggagatgccgataaagtacgccaatacatggaattcctgcctgtagaaggcagcaatctggtggcctttatcctgaaagataatgctaacggcgactcatggaaaaatattatcgtggcgttcaacagccgtaaagagcctgccaaattatctattccggccggtcgctatacaatcgtttgcaaagatggaaaaatcaagcagtcgggaatggggcaagtatcaggtaatgaaatcattgtaccggcacgctctgcaatgattattcatcaataaagtatattcttgattacctaagataaaatcaaaacgacaataaagatggaaaagacatggagatggtttggaaagaatgataaaattactcttcccatgttgagacaaatcggagtagaaggtattgtgactgctcttcacgaaattcccaatggtgaggtgtggcctttggaggctatcctaaaccaaaagacatatattgagacttatggtctgcgctggtcggtagtagaaagtttgccggtgagtgaagccataaaatatggcggtgccgagcgtgataacctgatagagaattacaagaaaagtcttattaatttaggcaaggcgggagtaaaaacagtctgttataacttcatgcctgttatcgactggattcgtacagatttagagcatctttgggaagatggaacatcatcactctattttgataaaatacgttttgcatatttcgactgcctgattctacaacgcgcagaagctgaaaaagactacacggtaaatgaattgaaacaaatgtacgaattagataaagtcattaccgatgctgaaaaagaagaacttgtagataccatcattattaaaacccaaggctttgtaaatggaaatatcaagaatggggacaagaaccctgttgacacattccatcatctgttggcaccctacaaaggaatagaccgtgacgccctgcgcgaaaatttacgttatttccttcaagctattatgcccgtatgtgatgaatatggcatcaatatgtgtattcatcccgacgatcctccttttcctgttcttggtttgccacgcattgtaaccagcgaagaggatattgcctggatactgcatgctgtaaacaatccgcataacgggctcactttctgtgccggttcgctcagtgcaggactgcacaacaatgtacctgctttggcgcgaatgtttgcccaccgcactcattttgtacacttgcgcagtacgaacgcttttcccaacggaaatttcattgaagcctcccatttgggaggccgtgctcatatcatcgaacttatccgtatctttgagaaagagcgtccgggcgttcccatgcgtgtagaccacgggcgtatgatgctcggtgacaccgacaagggatacaatcccggatattcgtttcacggtcgcatgatggcattggcccagatagaagggatgatggccgttgtcaatgacgaatcaaaacttgaatcctaaattgacatacatgctcactttatcggcatggtttgcgtagttgatggatgcttccagcggaccaaatatactatccaatccatagccgactccacagccgaacatagttttctctttcagtaacccactcactttatgactgctcagcgcataattgccggtcaaagtgacataatgcacacttcccattcgctgccggaactttatcgtgcctatcaataacgaattatccataagttctacattatttattcccacaaaaggcaactgctgttgcaggaagcgtgacggaacatctccacccatggcattcaatttggagtaggggatttcctttccaatgagaaagcgtccgtatacggaaggaagaatcgagaaacgattggtcagccgcattaccccttcgcaataacctttgatagcagagaaaggagcatggtcattatattgtgtaaaattatctgtatagagtgaataggaagcacgcgccgagatacctcgtgaagggaaataagccttatcaaatgtttcgtattccatttgagcaaaataactaaaaaaatgctcattgtctgtcgagtattgctgagtggtgcttccttcctgataaagaaacttatcataatcataatactcataacggagaccaataccgaaacgcacatttttataccacacatccgagaaagcaaactctgcctgatgataacggaaagtagaattgtgtgtgcggtcgccataatgataaaaattgacgtcattgtattggaacaggtaggacagcccgacacgtttcagcggagccggttcccaagcataattaattccggcagtataacgttttcctaaacgtcccgtaagtgatagcgtactgggcaatttccctttgaaattactggttacgtttattaataaactggctatttcttccgagtcgaaacgaatgccgacatttagtttgttttcatacttcttacttaacgtgtaattcaggttatagccacctcccggggcttcaggcaaattataagtcgcccccgaatagcccaaattggccgacagaatagcagtagcttcctctatccggcgaatacttatctcggaattttctttaagatcgcaacgcttcaacaaccattttttgtctttctcatcaagaccgtcaaaagtaatttctttcacatatacctttcgctcaggcgagtagggataagaaggaatcggttggggtatataagtactatccagccccaactggcttttcagagccattaatgcactatcttgtgccatggcagcttcttcgccacgcattatcagagtatcgatggcggagggagtaaaactggcggcagaataaccctctacgtttaccttaatataagtagtcgtttctttcagattcttcttatataaatcctgccccatgagattcaccaattgccctaatatggcaccggcactatttaattctccggcaggcttaagttcactttgaacatccaccccgataattaagtctgctcccatggcacgcgccacatttacaggataattatttactacaccaccgtctaccagtaccatactgtctagcctgaccggagtaaagactccggggatggccatgctggcacgcatagcagtggccaatacaccttcatgaaaattaacctcattgccatttactatattctcggaaacacaggcaaaaggaataggcaacttattaaaattgatggagtcgtgataaccgatagtaagctcactgaacaagttggcaagattttgccctcttatcagtccaccgaaaacttcggcttttacccctttaccgaaaggaatagaaaacacatacttttgtgaggcatcgcgttcagatagattttgttcacttctcggtatcttgtcgctcaaaaggaaagtccagtcctgacggcgtaccatgctgtcaagttgctcgggagaataaccgatagagtaaagaccaccgatgatagatcccatgctggtacctaccacatagtcaataggaataccggctttttctataactttcagaacaccgatgtgcgccatgcctttagcgccaccgccacttagcaccacacccactttcttacggtgggcaggccgaggctgtgccttaagaagagcaggtataaaaagtagacaaactgccattgttgtcaatgaagaacggctgaatcgtttcatgtttatttttctgtatttaaaaatcttttatataaaaaacaaaaactgtgcaaagatggtttaatctttcggggaatgcaagtctaattgttatagttattggtcgatttccttttttccttcaatttttcaatcctcctaaatcgaaccgataaattaaacgagccaaacaaatgctacatgaagattgcgtttttgcactttaagagagctgaatgaaatcactttcttaaaaaaacaggctataaaactttctatctaactaattttcttgtaaatttgcaacttaatttttgggagactatgtctttgcccgatttacaatttagagaatacaagaaaaacgatatgattatgagtaagaaatttgctgaacactcgcaactcaacctatcacaggtcaataaagatgtgctgaaaaagtgggatgaaaacgatgttttcgccaagagtatgacagaacgtgaaggatgtccttcttttgtcttttatgaaggacctccctcagccaacggtatgccgggtattcaccacgtaatggcacgtactataaaagatactttctgccgctacaaaaccatgaaaggttttcttgtcaaacgtaaagccggatgggatactcacggactaccggtagaactgggcgtggaaaaagcactcggaattaccaaggaggatatcggaaaaacgatttctgtggccgaatataacgcagcctgtcgtaaggatgtgatgaaatttacaaaagaatggacagaccttactcataaaatgggttattgggtagatttggataatccatacatcacttatgacaaccgctatattgaaactttatggtggctcttaaagcaactatatagcaagaatttactgtataaaggatataccattcagccttattctccggcagccggaacaggactgagctctcacgaattaaatcagcctggatgttaccgggatgtaaaagatactactgtagtggggcaattcaagatgaagaacccgaaacccgaaatgacggagtggggtactccttacttcttggcatggactactacaccatggactttaccctcaaacaccgctttgtgcgtcggtcccaaaatcgattatgtagctgtacaaacatataatggctacacaggtgagaaaatgacagtagtgctggctaaaccattgctttatgctcattttaaccaaaaagcagaaggactgcctttagaagactacaaaccgggagacaagctgattcctttcaaggtggtaggtgaatacaaaggtacggatttggtaggtatggaatatgaacagcttattccatgggtgaaaccggtaaacgtagacgaaaacggtaattgggaagaagctgccaatcaagcattccgtgttatccttggtgactatgtgactacggaagacggtacaggtatcgtacataccgctccaacattcggtgcagacgatgcttttgtggcacgtgcagcaggcataccttcattgtttatgattaacaaaaaaggtgaacctcgtccgatggtagacttgacaggtaaattcttcctgctggatgaactagatgaaaagttcgtaaaagaatgtgtggatgtagaacaatatcaagaatatcaggggcgctgggtgaaaaatgcatacgaccctcaatttactgtaaatggtaaatacgatgagaaaactgctgcctctgccgagacactggatatttacatctgtatgaaaatgaaggcttccaacaaagcattcaagatagaaaagcaggtacacaattatccacattgctggcgcacagacaaaccggtcctttattatccgctggatagctggttcatccgttctactgctgccaaggaacgtatgatagaactcaataagaccattaactggaaaccggaatctaccggaaccggacgtttcggcaaatggctggaaaacctgaacgactggaatttaagccgttcgcgctattggggtactccgcttcctatttggcgtagcgaagaaggtgaggaattatgtatcggttcggtagaggaactctataacgaaatagaaaaatccatcgctgccggtttcatgactgctaatccttataaagaaaaaggatttattccgggtgaatataccgaagacaattatgataaaatagatcttcaccgtccttacgtagatgatattatcctcgtttctgaaagcggaaaaccgatgaaacgtgaagcggatttgattgacgtatggtttgattcaggcgccatgccatacgcacagttgcattatccgtttgagaataaagatattgtagataatcgttcttattatccggctgacttcattgcagaaggggtagaccaaactcgtggctggttctttacattgcatgctatcgcaactatggtattcgatagtgtagcctataaaaatgttatctctaacggactggtgcttgacaagaatggaaataaaatgtccaagcgcctgggtaatgctgttgatccgtttggtgccatcgaacaatatggttctgaccctttgcgttggtatatgattactaattcttctccgtgggataacttgaaatttgataccgacggtgtaatggaagtaacccgcaagtttttcggaacattgcacaacacatataaattctttgctccatacgctaaccttgacggatttacctatcaggaagccgatgttcctatgagcaaacgtccggaaattgaccgttggattctttcggaactaaactcattgataaagaatgtggatatgtgctatgctgactatgaaccgactaaagccggacgattaatcaatgatttcgtaaatgataatctgtccaactggtatgtacgtctatgcagaaaacgtttttggggtacaggctatacagaggataagctggcggcatatcaaacattatatgtatgtctggaaactgtagctaaactaatggcaccgattgctcctttctatgcagacaaattgtatatggacttgattgcaacaaccggacgcgaccatgtagcttctgtccaccttgcagatttcccggtttgcgatgagactgttattgacaaagaattggaaacccgcatggagttagcacagaaagtatcttctatggggttggcgctgcgcaagaaaataaatattatcgttaaacaaccgttacagaagttgatgattccggtggatgcactgatgaaagaacgtttagagtctgtaaaatcattgataatgaacgaagtgaatgttaaagaaatagacttcgtggaaggtacatccaatttgcttgtgaagaaagtgaagtgtaacttcaagattctaggtaagaaattcggttcattgatgaaacaggtggccgctgctgtaactgccatgaatcaggaacaaatcagcgttcttgaaaacgaagggaaaattgttctcgacctaaatggtactccggctgaaatagaaacgtctgaagtggaaattttcagtgaagatatccccggatgggtagttgccaatgaaggcgtattgacagtagctttggatactgtcgtaaccgaagaactgcgccgtgaaggtattgctcgtgaacttgtgagtaagattcagaatattcgcaagggcagtggctttgaaataactgataaaataaaggtatctttatctaaaaatgagcaaaccgatagcgcagtaaaagaatataatacttatatttgtaaccaagttcttgccaactcccttaatttggtagacgaagtgaaggatggcatagaattaagtttcgatgatttctcgctttatgtgagtgtcgtaaaggaataacattaaccttttaaaactaaataatatggctgaaaaaacaagatactctgatgcagaactcgaagagttccgtgccattatcatggaaaaactggaattggccgagcgtgattacgaacgcttgaaaagtagtatcatgaataaggatggtaatgatacggacgatacttcccctacttacaaagtattggaagaaggtgccaatacgctgtccaaagaagaaacgacaagattagctgcacgtcagttgaaattcattcagggactgcaagctgctttaatccgtattgaaaacaaaacatacggtatttgtcgtgaaacaggtaaactgattccaaaagaaagacttcgcgctgttcctcatgccactttgagtatcgaggctaaaaacgaaggaaagaaatagcatttttatagttgacaggaaagcaggtcaaagaggctgctacctgtcgactattaattatcacctattataatgaataaattactcacgaaagggcaactttctgttctgattgtttttggagtattaattattgaccagataataaagatattggtaaagactaatatgttctggcatgaaagtatccgcattacagattggttttatatctattttacagaaaataacggcatggctttcggcatggaattgtttggaaagctatttcttacaacattccgcatcgttgctgtgggactgataatttggtatctggctaaaatcattaaagaaaattataagacaggctatattgtctgcctttcattaatattggccggcgccgtaggaaatatcattgatagtgtattttatggcgtaatcttcaatgaaagcacttatagccaaatagcacattttgttcctgtaggcgaaggctattctgaatggtttcatggtaaagtagtggatatgttttattttccaatcattgaaaccaactggccggaatggataccgggaataggtggagaacattttatcttcttcagtccgatatttaattttgctgacgctgctatcagttgtggtatcattgcattgttgttattttatggaaaatatctgaacacaggtattcacccggaagaaaaagctcagaaaaaagatgcacaataagaagattcgttggacgttgttgctcagtgcggctttgctggcaggatgcggaaaacaaataccaaaagatgtcatccacccggataagatggaggacatcttgtatgactatcatttgactacggctatgtccggcaatatctcttatgatgagaactacaaaaaagaagctcttcgcaattacgtatatagaaaacatcacgtaaccaaagcagagtttgattcatctatggtgtggtatactcgtcatacagaaaaccttgccaaaatttataccaatttaggaaaacgtttccgtgaggaaaagaaggatgtgaaacgcttgctggcaatgcgcgaaaacaaaccctcaatgtcacaacctggagatacagtagatgtgtggtataataaaacactatattggctgacggatgcaccactatccaacaagattacttttgaaattcccactgactccaacttcaaagcaaaggatgctttcttgtggtcggcaaattacatattcctctcaaacctgcaacaacaggtgacgatgggattcaatattctgtttgataatgattcagtgtcgggtaaagtagccgaagtaacagcttcaggcatacaatcattatatatcaagccggattctgcttataaaatcaagagcatcaatggttttatctatcttacgggggactctgtcaaagctccgggtatcatagtggataaaatttcattgattcgttaccatgaactagcagataccatatctattgtcgcaaaagatagtgtacccgaaaaatcaatgtctgtcatagataaagatacagattcattaaaaatggattcagtccagatgaaagaagctgttacccccgtacgcttgaatccacgcgatatgaaagaaaaggagggtattcgcccacaacgtactcgcctgcaaaagaaatgagacgatttgcctgtcaacgtttatatctttctcccgacacatacttcatccgttatgtggtagaattgggaaacaacggaaagatacagagctattaccctttggaagaagaaatatatgctactcaatggatagggggagtgattgtgctttctgcgagaagaaaactcgaaccgattatgccggaaaagaatttcaaaaccttccttgctcaagctacccggacaaataccaaaattcaggaatgctatgcatggcatattgccaattttgatattgtccgagaagaatttgtccctcaaagccatattatccgactttagcgcaatcttcttctgaactcggcacaaaccacagctgtggcaatagctacattcaaagactccgaagtctctctttcctgtggataattaggaatatacaatcgcctattaataagtgcttccacctctctacttattccatttccttcatttcccattacaatcaatccgttagcagaaagagtctcagaatagattacatttccatccaggaatgttccataaaccggaatccctttgagtgaagaaattaatttcggtaaatcacaataatgcactttcactcgtgctattgcccccatggtagcctgcacagttttaggattaaagacatccaccgttccggtagagcaaaaaatatcctctataccgaaccaatcggctaagcggataatagttcctaaattgcccggatcttgtatattgtccaaagccaggcataaagattttgaaataactttgctgtccggctcataaacaggttgttcaaatatagccaatacctcttgcggtgtcttttgcaaactgacccgtgaaagctcttcctgcccaacctctatcacctcgtcggcatgacaaccaggatgagaagagaaccattcagccgtccccgtcaacaaccgacaaggaaaatgccccatcaaatcatttaccaatttatgtccttcagcaacaaatactttttcttccttacgattcttctttaactctaacgaacgaatatatttaattttattcttacttagcatgattatttccattaaataacaaatattagaggcaaagctaagaagatattttcaattaatatctatctttgcgagtaaatttgcgaaggttacggatttgtatgaagaaaagcgcacacccatatatatacacactcattttagcactatgcacttcgtgttcggtcaataaatttatccctgaaaatcaatatttattggatgaagtaaaaattgtatcagacacaaaggaggtaaaaccatcgctttttaactcttacctccgtcaaaatcctaatgccaaatggtttaacatggttaaaatccccatgtatatttatggtgcatcaggtacggactctaccaaacgtgtaaatcgcttcttcagaaaaattggggatgccccggtcatttacaatgcagatgttgccatgaaatctaaggaggagatagaaaaagccgtacgtaacatggggtatattggagctaaagtgactattcataccgaagcaaagaagaataagttaaaactgttctaccatatagaagctggacgtccctatatgatacgtcatatagcttacaatattgatgatttaaatattagcgattgtcttcaacaggattctgcccaaagtatgcttttccccggtatgccgtttgatgtaaatgtacttgacgctgagagacaacgaatcaccagattgctccagaacaaagggtactataaattcaataaggattttctggtatatcaagcagataccacccgcaatacttatttggtagacctcactttgaaattacttccttatcaacgtaaaaaggaagatccaccacaaaaacacagacaatatttagtgaatagtgtcaactttatagctgatagcgaaatgacccccatccgtaaaggttcatttaccggtttcgattcattgagctataaaggatacaacatgtactataaggataaaatgtttttgcgcccgaaactgttagtggatttcaaccgtattcgtcccggagagttttatagtgaacgtgatgtgcagaatacttatagtgcattgggacgtctgcgcatgctgaaatattccaatattcgttttaaggaagtaaatgtaagcgacagtaccaaattggatgcatatatagtgatgtcaaaaggacaaaataaatcagtttcttttgagatagaaggtacaaactctgcgggagatttgggtgcggctgcttccatttctttccagcatagaaacgtgttcaaagggtcggaaacgtttactatgaaagtacgcggtgcttatgaggcaatcaccggattgggacaagattatgtcaatgacaactatacggaatatggtgtggaaagcagtcttaacttccctgaatttatgtttccctttctttcttcggactttaaaaggaaaattaaagctacctctgaagtgggactgaaatttacatcacaggtacgtcctgaattttctcgtatgcttgcatcagcgtcctggagttatcgatggagtgatagaaaacatatacagcaccgccttgatctggcggatattaattatgtatatatgccaagcaaatcgcccgattttcaagagtatttagataaaatgacggctaacaactcattgttacgtgccagttatgaaaatgtactgatagtgcgtatgggatacaacttcacatataacagtgccggtaataccatgatgcgcacaccgacaaagagttcgtattccttgcgtgtaaacgtggaggaagccggtaatctaatgtatgccgcatccaaactggcacactctactccgaaaggggacaagggatttgtattggctaatattccgtttgcacaatatataaaaggagattttgactttgccaagaatttcatgattgacccacgcaactctttcgtttttcatataggagtaggagtggcttatccttatgggaactcacgggcacttccttttgaaaagcgttatttctccggcggtgccaacagtgtgcgcggctggtcggtacgttcactgggccccggaggatataaaggtagttcagacgggcagatggactttatcaaacagtcgggggacatcaagttagacttaaatgtggagtatcgtacccatctgttttggaagttaaacggagcggctttcatagatgccggtaatatttggacaatacgctcagactcagagcaggaagatggtgtgttcaaattcaacaaattctacaaacagattgctgtagcatatggtttgggcatccgctttgatttagactatctcattttacgttttgatggtggaatgaaagctatcaacccgatggaaacgggtaaaggacgttacccgataacgcgacctcgattcagccgagattttgctttccattttgcagtaggttatccgttttaattagattataattttatagcttatgaaaaaaatagagaaaaaggtatatacagtagaggaagtggatgagttgaaaaaatggtttgataatcaaacacttccacagtccatgcaaataaattcatccgcttattcacctgatttaaaagatacagtggcgatgctgtttgaacaagcatatatctgctgtaacaacccgaagatgcaaggatgccttttattattagaaaatattaagaaaaatttagaggagaaaaagggaatcgagtaagcaaaacattcttcatatttgtttaatacattaatagtatttaatgcagacagtatgaaaaagaatttattattgtatggcgtctttttgggtgccctttcattatctttctgttcaggcaatgccaaaaacaaagaaatgactgacaatggcatgagtatggaaagtgcaaacgaagtaataaggtattgtgatacctcgctgaaagtactgaaagatttaattaatggagattcaataaaagccatattgggttatatagataagacagagggtacagatatgctccctattgttccacaaccggctttatatgaaggatagagcctatctgaaagataattatacaatagccaataaaataagaaaagaggaactcctgttaagtatagccctatccgaatacaaacaagtgatatttgatattctaaccccgacagtagaaagtgccaaaaccgttttaccttccgttcaaaaggataaaaaataagagataattcaaaatccgataggcttattttgaaaaaggtgggatatgtttccacctttttatgtatatttgcgactcttttgacgcagcaattgcgacaatactataactagaaaacgaaacacaatgaaaattaaatttataagtctggctagtggcagtagtggcaactgctatttcattggaacagacgcatatggcatattagtggatgccggtattggaatccgtactattaaaaaacatttaaaagacttgggtattggacttgataggattcgagctgttcttattacccatgatcatgccgatcacattaaagcggtagggcatttgggagagaaattcggtattcctatttattccactcccgaaatccatataggcatcaacaaaagttattgtgtgacagaaaaactttcgacctccgtccgctatttaagtaaaggaacacaaattcagattgaagatttcagaataacagcttttgaagttccccatgatggaacagataatgtgggttattgtatagaagtagatggcaaaactttttcttttttaacagacttgggacatattacatctacagcagctgaatatatctgcaaagccaattatttaatattggaggctaactatgacgaagaaatgttgaaaatgggatcatatcctcaatatcttaaggaacgtattgccgggtctaatggtcatatgagtaatcgtgaaacagcagagtttttggctgagaatatcaatgaaggattaaaatatatttggctttgccatctgagtaaagataataatcatccggaactcgcttataaaacagtagaacttctgttaagaagcaaaggggtgcttgtgggtaaagatgtacaactcattgctttaaagcgaagtacaccttccatgctctatgagttcgaataaatttcgatgaaaaagtgaaaaaaatggtgcaaaatatttggtagtttaagataaaacgcctacctttgcaaccgcaaatcagaaatgaacgcactcttagctcagttggtagagcaactgactcttaatcagtgggtccagggttcgaatccctgagggtgtacaataaaaaaatgatttgcaaatgcactcttagctcagttggtagagcaactgactcttaatcagtgggtccagggttcgaatccctgagggtgtacgaatcagaaaagtaaattgaagaaaagctctgaaaatcaatgatttttggagctttttcttttatggattcctacaaaatatagaaggttcggtttgaaaacttgggctcagcggatatcgtaattggaaacaacatgaagatagacaggtttaccacgcagaggaaactcctgaattactttttcatctataaaaccactggaaatgacagtaccgttcttgtaatcaaaacgttccatataattcttctcatcaagccaaacttcgatttttgaagaatcgtcatgccaaccggatatgtcgaaatattccattaaaacttcagagaagattatccgaagtaacttatgcagactacgattgggattcattggattggtttgtttaatttaaatgcaaaaataatgttgtttggataatctacacggatcacccacaggattttcggattaatccctaatcagggagctgtccgaaaattccgttcttcctttcattagctgctgaaacatcatgttggtggggattccgataatgaatggacatcccgtgttgtcttttcagcctcctttcatctgtaagactttttttgatagcgcaaatgctgaaggctgatttggagaaacttggcaaatgccgctgaaacgaggatgaggggatgttctgtcattcttaaccgattgattatctggacgctttaattaaaatgtaaggatgaacgggaacaaagatggtcggaaaagaagggatgaccggcttagtgaggggatgattctatctacccctacatgaaaaagataccgagcttttttaaaaaggtgctgaagttttatataaacacaacgaccttttttaaaaacatcaaggtctttttgcagcactcagcgtgagctgtatattttaaaatgtgtacgtaggcacgcattggtcaatacatacggtggcataagcccacacgtatatacgcatcgggctacacgtacgtatgcatgagcctatacgtatatatgtcattgtgtcaggctccgtcatattctgagccgggattggattagtttgtcttccctcttgacaaaggcttttttatgttgtatatttgtagttcgtcaaatctaaaaaaagtgctcatgaatgtattcgccactctcaaaatagtcttcttcggaagcaaattcctgtccggccctgttccctccgacggaacgccacgccgtgacctcgtatccgccctcaacggactgatgccgctttgtcggaccatgcccggtgtacatctggctgtagatatccgcgaaggccgggtggctctggtgctggactggactccgcgcaccgacggaaatgcgctggcggacagttaccactacatcgtttccgatgaagatggagtgaaagaagtgagcaagtcacaggttcttcttgctgaaaacggcgagggaaatttgttggaaagcagagacggtttttccggatgtctggctgccttaacggaagaaacagaggaggagtctgtacaattggaaagtgttcgggaggttatgaatcccatacactcgaaagacattaaaaaggaagcccaaccgatatctttggaaaactcccgaaaggaagtcggactgaaatcctcgaaagatactgaaaaggaagccgcgccaatatctccggaagaaactgttgggaaggcgaaatcacgttccttgatgcaggaagtgaccacttttctcacctcccgctaccgcttccgattcaacgtgctgactgaggagaccgaggtggcgggagtggaaaacggcatttccgatgaccacttgcgctacgccaaggtggacgaacgctggatgaactcgctcagtctggaggccatcgaagcgggcatagactgctgggacagagacatccaacgctttgtgcgctcgcgccgcatcagcgaataccatccctttaccgcctactttgagcggcttcccgaatgggacggcactgaccgggtgtcggcactcgcccgcagggtgtccgatgatccggtatgggtaaacggtttccaccgctggatgctgggactctccgcccaatggatgcagttccggccggataccaaccgcgccaacagcgtggcgcccctactggtgagcagtcgtcagggactggggaaaagtacgttctgccgcctgctgatacccgatgcgctgaaagcctactatacagagagttacgacctcggctccccggcatccgccgaagccaggttagccgcctacggcctgatcaacctggatgaattcgacaagttgggtgtatccaaaatgccccttctaaagaacttgatgcaggcttccgcactgaatatccgcaaggcctacaaacgcagtgcttcgacacttccccgtatcgcctcgttcatcggcaccagcaaccgggaagatttgttggtggaccgtaccggttcgcgccgtttcctctgtgtcagtctggagcacgccatagactgcaccacctccgtagagcatgagcaactgtacgcccaactcaaggcggagcttctgtccggcgaacgaagctggtttaacaaggaagaggaacaaaccatacagcgtcataacgccctgttctacaagcatgtacccgaagaggaggtgttccgcctctgcttccgctttgccacggaagaggaccatccgcaggaggtgctgaccctttccgccacccagttgttcgagcggatgaagtccgcccatccctcggccatgaggggtatgacggcatacagcctgagccgcattctaccccagttgggcgagcgggtgcataccgccaagggaaatgtgtatcgggtggtggaatgctaggcatacgcctttcttcttattcagatggccccatttccacatatcttttcaaagcgaattaaacttttatctcatagactgttatataataaacaaataaatattatctttgtcagtcaataacaagcgtttaccagattataaacaaaataaatgaaaaggaataaaataaactggagagttcctaaaggaatggaaatcacagatttagatagaaaggttctttattatcaggatagaggacatttggttcccacaagagaactgatcaaaacgcctgagcaaatagaaggcatacgccgaagcggaatcattaataccggagttctagatttagtagaaaaagaaattcatgccggtatgagcactctcgaaattgataagttggtgtatgattacaccatatcgcacggtggtattcccgctacattaggttatgaaggttttcccaaaagctgttgtacctctattaatgaagtggtatgtcatggcattcctaatgaatttgatattttggaagaaggggatattataaatgtggactgcaccactattttggatggttattatgccgatgcctcacgtatgtttattattggaaagactactcctaaaaaagaaaaattagtgcaagtggccagagagtgcttggaaatcggcatggaagcagccaaaccttttggatttataggcgatataggtcatgcgatagagaaacatgccaaaaaaaatggcttttctgttgtgcgtgacctctgcggacatggtgtaggagtggaatttcacgaagagcctgacgtagagcactttggaaaaaaggggacaggcatgttattagtaccgggcatggtctttactatcgaacctatgattaatgccgggacttgggaagtatttatagatgaagaagatggatggacagtagttacggaagacgaacttccttctgcacaatgggaacatacatttcttatgacggaaaacggacttgaaatccttacacattaatatatatataataaggtatagattatggatacaattatattaggtatagaatcttcttgcgacgacacttctgctgctgtaatcagaaatggcgtcttgttgtcgaatgtagtgtccagccaagctgttcatgaagcatatggaggtgtcgtgccggaattggcatcaagagcacatcagcaaaatattgtacctgtagtacatgaagccttgaaaagggcaggagttactaaagaagaattgagtgcagtagcttttacgcgcgggcctggattaatgggatctttattggtaggtgtctcttttgccaaagggtttgctcgctctttaaatattcccatgattgacgttaatcatctgcaagctcatgtgttagctcatttcattaaagaaacagaagaagatacaaatcaacctaagtttccatttttatgtcttctggtatcgggtggcaattcacaaattattttggtaaaagcttataatgacatggaagttttgggtcaaaccattgacgatgctgccggagaagccattgacaaatgttctaaggtaatgggattaggctatcccggggggcccatcattgataaactggcccgccaaggaaatccgaaggcatttacattcagtaagcctcatattcctgattacaattacagtttcagtggactgaagacctcttttctctactctttacgtgactggctgaaagaagatcctaactttattgagcatcataaaaatgatttggctgcttcactggaagcaactattgtagatattctgatggataaactgaggaaagtagccaaagcgctcaagataaacgaaatagctgtagccggaggagtatcagccaacaacggtttgcgcaattcattccatgaacatgccgccaaatatggatggaacatatatattccgaaattcagttacacaaccgacaatgcagcaatgattgccattaccggttattataagtatttggacaaagatttttgcaccattgacaaacccgcatattcacgggtaacaatttagtatttattttaaaagaaatcgaaatgtcagtagaaggtaaatttttaagcaaagagatcagcgagttgttttggaaagagaacctgacacttgctaccgccgagagctgcacggcaggaaatgtggcagccgcaattacagccgtagccggaacatcacacttcttcaaaggtggaattattgcctattccaacgaagtaaaagagaatttattaggtgtgagccatgaaacattggagacttacggagcagtaagcgaagaaaccgttatcgaaatggtaaaaggcgcgatgaaatcgatgaattccgactgcgcaattgccacttcaggtattgccggcccaacaggaggcactcccgacaagccggttggcaccatttggattgctgccggatgtaaagacaaagtgattacacttaaaatagaaggagacgaaggaagaaataaaaatatagccaatgctactcaaaatgcactgcgattacttcgaaatttgttccaaaacgaagaaaatgagcaataaaagcagaattatttgctaaaatccttgttttatacaaataaaagtgcttattttgcactccgtttgaaataagtattgaaaaaaactataaaaataagatagcaatgtcgaagatttgtcaaattaccggaaagaaagccatgattggcaacaatgtttcacactctaagagaagaaccaaaagaacttttgatgtgaacttgtttactaagaaattctactatgtagaacaagattgctggattagcctgaatatttgtgctaacggcttacgtgtgattaataaaaaaggcctggatgcggcgctgaatgaagcggtaaccaaaggctattgtgattggaaaagcatcaaaattattggttaattaaaaaggagagatagactatggcaaagaaggctaaaggtaatagagtacaggtaatccttgaatgcacagaaatgaaggatagtggtatgccgggaacttctcgttacattacaacaaagaatagaaaaaataccactgaaagattggaacttaagaagtacaatcctattttgaaaagagtaacagtacacaaagaaattaaataattataacccatggcaaagaaaacagtcgcaacccttcagacaggtaaagaaggacgttcttacactaaggttatcaagatggtaaaatctccgaaaaccggagcatacatcttcgatgaacaaatggtacctaacgaaaaagttcaagactttttcaaaaaataattcagtcatcccgactggcaaaaagttcctttcacacaacatgaaaggaactttttttatgcataaacgttatcattatcatacattataaccaatcattctgacacttttttttgtccgtgtaagagattagttatatctttgtagcataaacagataaatcaaactccaatatgggattttttaattttttctcgaaagaaaagaaggaaactttagacaaaggattgtccaaaaccaaagaaagtgtatttagtaagatagcccgcgccgtggccggtaaatcaaaagtagacgatgaagtattggataatctggaagaagtactcattacttccgatgtaggtgtggaaactactctgaatatcatcaagcgtatagaagacagagtggcaaaggataaatatgtcaatacgcaagaattgaacaacatccttcgtgaagaaatcgcagccctgttgactgaaaataacacagttgattcagaagaatttacggttccggcaggtaaaaaaccttatgtcataatggtagtaggtgtaaatggagtcggtaaaacgactactattggaaaattagcctaccaatttaagaaagcaaataaatctgtttatcttggagctgctgatacattccgcgctgctgccgtagagcagttagatatttggggtacacgtgttggagtgcccgtcatcaaacagaaaatggggtcagaccctgcttctgtcgcttttgatacactgagttcggctgttgccaataatgcagatgttgtcatcattgatactgccggtcgtctacataataaagttaatttaatgaatgagttaactaaaatcaagaatgtaatgaaaaaggtgattcctgatgctccccatgaggtattgctggtattggatggttctacaggacaaaatgcttttgaacaagccaaacagtttacccttgcaaccgaagttacctctatggctatcactaaacttgacggaacggcaaaaggtggcgtagtcatcggcatttcagatcaatttaagattcctgtaaaatacatcggattgggagagggtatcgaagatatgcaagtattccgcaaaaaagaatttgtagactcactatttggagagacagaaaaataaatgaaacgtaatacaatagatattatcaccctagggtgttccaaaaatctggtagactcagaaaaactgatgcgtcagctggaagcaaacggttacaaagtgactcatgacgccgaaaatcctcaaggagaaattgcagttatcaatacgtgcggtttcatcggagatgccaaagaagaatccatcaatatgatattggaattctgccaggctaaagaggaaaagaggttgaaaaaactatatgtaatgggatgtctatctgaaagatatttgaaagagctggcattggaaattcctcaagtagacaagttttatggtaagttcaattggaatgagctactggctgacttaggcaaagcctataaatcggagtttgccattgagcgcacgttgaccactccgcatcattatgcttatttgaagatatcggaaggttgtgataggaaatgttcttattgcgctattcccattattacaggtcgacatatctcacgcccaatggaagaaatcatcgatgaagtaaaattacttgtttctgaaggcgtgaaggaatttcagattatagcacaagaattaacctattatggtgtagatttatataaaagtcaaaaactacctgaactcatcgaaagaatagctaacgttccgggtgtggaatggattcgtttacactatgcttatccggcacactttcccgaagagctgtttaaggtgatgcgtgaacatgataatgtttgcaaatacatggacattgctctgcagcacattagcgataatatgttaagcaaaatgcgccgtcatgtaacaaaagcagaaacatacgatttaatcgagaaattccgtaaagaagtgccgggtatccacttacgtaccacattaatggtagggcatccgggagaaagtgaggaagactttgaagaattgaaggaattcgtcagaaaagtacgattcgaccgtatgggagcttttgcatattcagaagaagaaggcacatacgctgctcaagaatatgtggattctattccccataaggtgaagcaacaacggttggacgagttaatggctattcaacaagaaattgccggcgaactgagtgctgcaaaaataggaaaagagtttaaggtaatcattgaccgccgggaaggagagtattacgtaggtcgcacccagtttgattctcctgaagtagatcctgaagttttaattaaaatggatggaaaacatttgaatacaggcgaattctataacgtccgaataacagacgctgatgattttgacctatatggtagtattttataagtaatttcttccaaaaatttggaaaatgtttgtttttttgctaatatagcagcaaatttaataagctaaagccttgaataataaagaatttatatccgaactttcgcgtagatttgtatataccaacaaagatacaactcaattggtatcctcagtgataagcatcatgacccaacagttgcaagacggaaatacagttgcaattcagggatttggtactttcgaggtaagaaagaagttagaacgcatttctattaatcctgctacgcaacaacgtatgttgatacctcctaaattggtattgacatataaaccgagtgcgatattaaaagaaaagtttaaataaatacccccttaagacatacaattgacatactatgagtgacaaaataaccatacaagatattatcgaacttttggcagagaaacatggcatgaacaaaaaagatgccgaagcctttgttaaaggaatttttgaccttatcgaagaagcattggcttctgaaaagtatgtaaaagtcaaggggttaggaacttttaaactaacagaagtagaaagtcgtgaaagcgttaatgtaaatacaggagagcgctttcaaatacagggacataataaaatatcgtttactcccgatactaccatgaaggatttgattaataaaccgttcgcacatttcgaaacggttatcctgaatgagaatacccaattagaagatacgaaaatagaaatggagggagaagacgataaagaagaaaatacggaagaaatcatctcctccacacctgaaatcctaaaagaagacgacaccaatactatcaccagcacacccacttatgaagctgacattaaaccgataaccaatatttccgacccccaaaaaataatagcggctgatgaaataattgaaacggtggaagagcaacaatcgataaaagaagaccacttgacagaaaaggcttcgaaagtagcagaagatacttcggaggaaagacctgctaccattgcagaagctgcaataaaagcagtacgagaagaaaaaactatttcagaaacaatcgaaggtcgtacttctaaatcacagtcgatgacagcttctgaaagtccattggcagttcccgaaggactgttgcaaaaggaacagaaaaaaaatctatggggaatcattattgcaattattcttgttctttgcattgccggtggtatttattggttcatgcaatcatcgtcgagtaagcaaccgataagacaatctattccagccgcaacttccactgtgaaagaaatgccaaacgattctgttactctacagcaacaggataccgtttcgggaagtaatttgcagacaagagagccaattcaatcacaaccggcggaaactcctttgcaaaagcaaccgacaaaaccgaaaagcccctccgtacagtcagctgccaatcaagagatagccaaagtaacattggccgataccgtggaatatgatattgtaggcactaaggtcaactatactcttcaagaaggagaaagtctcataaaattagcattgaaattttatggaacaaagaaattgtggccatatattgtaaggcataacaaaaacgtaatcaaagatgctgacagagttcccattggaacaacattgcgtatcccggaactagctccgaagaagcaataaaccaccgctaattttcattttaaaattctttagcccaatatcctttaaaagtagagatacgcttcacttttttaataaaaaatagttgcctcagttaattaattaccgtaattttggctgcattaattgaacaaggccgtcacaaggccgttatactgattaaaaaagaaataactaaataacaaaattatggctgaagcaattgatattcgtgcactaaacgaacaaattgaaagacaaagtgcgtttgtaaccaatttgatgaccggtatggatcaggtcatcgtaggtcaaaaacatttggtagaatctttacttatcggtttgttgtccgatggtcacattctgttagagggtgttccgggattggcaaaaacattagcaatcaagactcttgcatcattgatagatgccaagtacagccgaatccagtttactccggacttacttccagccgacgttatcggtaccatgatttatagtcagaaagatgagaaattcatcgctaagaaaggaccgattttcgccaatttcgtattggccgatgaaatcaaccgtgctccggccaaggtacagagtgctttgctggaagccatgcaggaacgtcaggtcacactgagcaaagaaacatttctgttgcccgaaccatttttagtaatggctacccaaaatccgattgagcaagaaggtacttatccattgcccgaagcgcaagtagaccgttttatgctgaaagtcattatcgactatccaaaattggaagaagaaaagaaaattatccgtcaaaacatcagcggtgaaaagattgaagttcgtcctattttgaagtcggaagatattatggaagcccgcaaagtcgttcggaaagtatacttggacgaaaagattgagcaatacattgccgatatcgtattcgcaacccgctatcctgaaaaatatgatttgaaggaactgaaagacatgattggtttcggtggttcaccacgtgcttccatcaacttggctttggctgcacgcagctatgcattcatcaagcgccgtggttacgtgattcccgaagatgtgcgtgccgttgcgcatgatgtactccgccaccgcattggtctgacttatgaggcggaagccagcaacatgacttctgacgaaattatcagtaagattctgaacaaggtagaagtgccttaagcaacacctctgcccgaatttttctgtcgggaaaacgaaatgtggatgaagttcaatcacgtcttatggtacttccgtacgggctatatggcgtaatctatctgtatagtgcagccgttaaccgtccccatccaccaatggcgagagtctttatacgctcccgctgatgcataagtagtataaatttagtacgaaacagtatggaaacaagtgatttattaaaacgggttcgccaaattgaaatcaagacacgcggcctttcaaacaacatctttgccgggcagtatcattcagccttcaaaggcaaaggaatgtcgttttcggaagtacgtgagtatcaatatggtgacgatgtacgagatatagactggaacgtaaccgcacgttacaacaaaccctttgtaaaggtgtttgaagaagaacgcgaactgacggttatgcttttgattgatgtctcaaacagcttggatttcggtacggtgaaacagatgaagaaggatatggtgaccgagattgcctccacacttgcattctccgccattcaaaacaacgataaaatcggtgtcattttcttttcggaccggattgaaaaattcattccgcccaaaaaaggacgtaaacatatcttgtatattatccgcgaactgcttgacttcaagcccgaaagtaagcgtacagacattcaaatggcagtggaatatctcaccaacgtgataaaaaagcgttgcaccgcctttatgctgagcgactttatcgatgaaaaagatttccgcaatgcattgaccattgccaaccgcaagcatgacattgttgccattcaggtgtacgaccgccgtatcactgatctccccaatgtggggctgatgaaggtgcgcgatgccgaaactggtcacgaacagtggattgacacctcatcacgcgccttacgacgcgcgcacaacgaatggtggctgcaacgtcagggcatgctgaacgaaacctttacgaaaagtaatgtagactctgtgtctatccgcaccgatcaggattatgtaaaagcgttgcttaacttatttgctaaacgaaactaatgaacatgaagataatacatactagcaaaaagttcttgaaaatattggcttgtgctacgatactgctgacagcacatcaggcaaaagcgcaacaggttacagtggatgcaagcatcgactccctgcaacttcttatcggcgagcaggccaaaataaagttggaagtcagtatggatgccaatcaaaaattgacactcccaactttgcgcgatactatcgtaaggggagtggagattcttgatatcgccaagcctgacacccaaatgctaaacgatggacggcggatgctcatcaaacaagagtatacgattacttctttcgattcagcactttattatcttccacctctcgaaatattggttaacaatcaggcttaccgttcaaaggcattggcattgaaggtttattccatcccggtggatacgcttcatccggaacaattcttcggaccgaaaacagtacgcgaagttcctattacctgggaagatgtctctgctatcgtatggctcacgctactgatgttggcattggcaggattgagttattatttatatataagatataaagataacaagcctattatcaagaagattaaggtggaaccgaaattaccgccccaccaacaagccttgcaggaaatagagcgcatcaagggtgacaaaacgttgcgcaacaccgacccgaaggagtattataccgaactgaccgatgtacttcgcaattatatggcagaacgtttcggatttaatgcaatggagatgacttcttctgaaattattgataagttacaggatatcagcgacaaagaatctattaaagatttgatgtttctgttccaaactgccgatcttgtgaaatttgccaaacattcaccgctgatgaatgagaacgatatgaacttggtcaatgcagtagaatttattaataacaccaaggtggaagcggatccgaatgccaagcctgaacctacggaaatcaccgtagaagaaaagcgttcaaagcaaggaaggattattttgttgggtagcataggagtgattgtcattgctatcgcagtgattctctaccaagtgcttcgcggcatatacaatctttggttttaactcataaatactagaaacaatgatttttgcaaatattgaatatctatttctgctggtattgctcataccttatataatatggtatgtgatgaggaggcaaaagactgagcccacacttcaggtctctaccacccgcatgtatatgaaggtatcccgaagctggaaaatctacctgctgcatgccccgtttgtgctccgaacggtggccatcgtcatggtaattctcattttggcgcgtccgcagaccaccgacaactggcagaataccgaaatagaaggtatcgacatcatgctggcggtagacgtttccaccagtatgctggccgaagatttgaaacctaatcgattggaggctgccaagcaagtggcatctgagttcatcaacggtcggccgaacgacaatatcggtctgaccatctttgccggtgaaagtttcacccaatgtccgttgacagtagaccatggtgtgttactgaatctttttaatggcattaagggtgacattgcccaacgtggactgatagaagatggtaccgccatcggcatgggtatcgctaatgcggtaacccgactgaaagacagtaaggcaaagtctaaagtgattattctgctgacagacggtagcaacaatcgtggagatatttccccaatgaccgctgctgaaattgccaagaaatttggtatcagagtttacactatcggagtgggtactaacggaacagctccttatccggtgcaaacatacgcaggaacacaatatataaatactcctgtggaaattgacgagaaaactttgactgaaattgccggagcaacaaatggaaactatttccgcgctaccagcaattctaaattaaaggaagtttatcaggaaattgacaaactggaaaaaacgaagttgaatgtaaaagagttcagcaaacgagaagaagaataccaaatatttgcctggattgctttcttctgtatcctgcttgaaattttattacgcaactcagtgttaaagaaaataccttaaaaacaagaagttatgtttcgatttgcagacccgaactttttatatttactcatcatattgccctttgtagtagcgctgtacttatattctaattaccgccgccgacaaaacattcgcaagtatggtgatccgacattactcaaacatttaatgccgactatttccaaatatcgccccgacattaaattctggctgatttttgctgcactcgcattagtaatcctaatgttagcacgcccacaatttggttccaaaatggaaacggtaaaacgcagtggggtagaagcagtcattgcattggatatttccaactcaatgttagcagaagacgtgactcccagtcgtttggacaaagcaaaaaagcttatttccagattagtagatacgttcaacaatgataaagtaggtttaatcgtatttgccggagatgcattcacacaattacctatcacaagcgactacgtatctgccaaaatgttcttggagactatcaatccttcgctgataactacacagggtacagatattggagcagctattcgtttggctatgaaaagcttcactccacaggaaggtgtaggacgtgctatcatagtcattaccgatggtgaaaaccacgaaggcggtgctgtagaagctgcaaaggaagcagccgaaaaaggtatgcaagtatttgtattaggtatcggctcgcctgacggttccccgattccttcggaaagaggcagtaacgattatcgccgtgataaagatggaaacgtcattgtaactcgtttgaacgaacaaatgtgtcaggaaatagccaaagccggcaatggaatgtacatccgtgtggataattccaactcagcagagaagatactgaacaacgagatagccaaactgtcgaaagctgatgtggagagtcaggtttataccgaatttgatgaacaattccaagcattggcatggttgatactcatcctgctgattgtagaaatgcttattttggaacgaaagaatccgcttttcaaaaatgtgagactatttaaataaatgcttatgttacagaaaacctatatcaccctgttattcttgcttgtagcaggagggagtgcctttgcccaaaagtcggatagagattatctgcgtagcggaaacaagttatataacgacagcttgtttgtcaaagcagaggtggattatcgcaaagcactggaagtgaacccgaagtcgacagatgctatgttcaacctgggcaattcgcttctgatgcagcaaaaagcaaaagaagcaatggaacaatttgaatcggcttcaaaggtagaaaaagaaaaagataaactagcccagatttatcacaatatgggtgttatccttcaggcttctaaacaatatccacaatgcatcgaggcttacaaggagtctttacgcaataacccgaaagacaacgaaacacgttacaatcttgctttagcacagaaattgctgaaagaccaacaacaaaaccaacaaaatcaaaatcagaataaagaccaaaaacaggatcagaaagacgaacagaaagagcaaaacaaagatcagaaaaatcaagataagaaagatcaacaacagaatcaaaatcagcaacagcagcagaataaggatgaaatgtccaaagaaaatgctcagcaattgttgaatgcggtgatgcaagatgaaaagaatgtgcaggataaagtgaaaaaacaaatgcaaattcgaggaaagaaattggataaagactggtaattgtttaattttgacgactaaaataactaaatagaaaaatgaggaaagtaattctcttattcatattaataactacggtgctgagagcatgggcggacgggactccaacgctgacagctgtagcgcctgatgtggtagtaagcggtgatcaattccgattgacttatacggtaaacacacagaaggtgagagacttccgggtcccaagtataaaagggtttgaagtgttgatgggtccaacagcttctcgacaaagcagtacacaaatcattaatggtaatgtaacttcaaccagctcagttacttatacctatatattgatggccgataaagaaggaacctataccattccggcagcaacaatcgttgccgatggacattccctctcttccaatacggtgactatcaaagtacttccacctgatcaagcaaatggagttggaggaaatcaggctggtaatccatcttcttcccgaagccaagctgcaagtagcaagataaccaataaagacttattcattactgcttcagccagtaaaactaccgtctacgaacaagaggctattctgctgacttacaaggtttacacattggtagatttgaggggactccgtggaagtatgcccgacttgaaaggtttccatacgcaagaagtagagcttccgggtaaaaaggtcttcactttagaacactataacggaagaaactataatactactgtgtggagccaatatattttgtttccacagcaatcaggtaaattagaaattccctccattacatttgagggtacagtcgcacagcgagtagcttcggatgatccattcgatgccttcttcaatggtggaagtaactatatagagataaacaaaaacatcgtaactcccaaattggttatcaatgtaaaagacttgccaaccggaaagccagccaatttttcaggtggagtaggtgagttcacaatcagctcttccatcaatacacaagaactgaaaacaaacgatgccgttaccatcaagttgattatttcaggtgtaggaaatctgaagttgattaacacacccgaagtcgattttccaaaagatttcgaggtttatgatccgaagattgataataagttcaatttgacccgtgagggattatccggtaataaagtaattgaatatctggcgattcccagacatgccggaaacttcacaattcctcctgtagagttttcttactttgatctgaagtcacaaacgtacaaaacactgaaaacagagccttatacgctgaaagtagaaaaaggagaaggaaatgctgatcaagtaatcgccgatttcacaaataaagaagatctgaaagtactaggcaaggatgtgcgttacattaaaatgggagaaagtaaactagctaagaaaggtgatttcttttttggttctgttgcttactatctatggtatattattccattagctctcttcattacatttgttatcatttatcgcaaaaaagcaatggaaaatgctaatgttgccaaagtacgtaccaaaaaagcaaacaaagtggctaccaaacgaatgaagaatgcaggcaaattgttagcagaaaacaagaaagaagcattttatgatgaagttctgaaagcgctttggggctacatcagtgataaactgaatattccggtttctaaactgtcaaaagataatatcgaggaagacttagccaaatatggagtttctcccgaatgtatcaaagaatttatcgaaacactaaatgaatgtgaatttgctcgttatgcaccgggtgaccaaagcgaggcaatggataaggtatattcttctgccatagaggtcatcagcaagatggaaaatagtataaaacactaactaataggagatataacaatgagaaaaacatatttcattttgatacttttgatgggtttcctcagtttgagtgctcagacagacagtacccaagttacagtttctacccatgttacaaaagcagaagccgatagtgcctatatcaataatgattttaccaatgctgcagagttatatgaaagtattttaaagaataaaggagaatcggcagatatctattataatttgggaaacagttactataaaatgaataatatagcaaaagctgtgctcaattatgaaagagctttattgctgaatccaggtaataatgatattcgtttcaacctagaattggcacgtagtaaaactgtcgataaggtaactttgcctagtgaaatgttttttattacatggattcaatcacttattaattcaatgagtgaaaaaggatgggctcaaacaggtattgttacctttattttgactatttttatgttagccttatttatttttggcaagcgggtagtatggaaaaaaataggtttcatttctgccatatgtttttttgcaatctgtatattctctaacatttttgcttctaaacaaaaggcagaactgttaaaccgagacagtgccattatcatagctcccagtgttacggtcaaaagtactcccaatcaaagtggaacagaccttttcattcttcacgaaggaagaaaagtcatgattaaagacaacacaatgaaagagtggaaagagatcagattggaagatggcaacgtgggatgggtaccaactaatgtaatagaaataatctaaaaaacaatggatatacaacagtatatagcactcgacaaggaacttttattgaacctgaatggaagcaattctcttttttgggacggcttcatgtgggtagcaacaagtacgtatatatggattcccactgctattatactgttgtatatcattattaaaaataataagatacaagaaactttactgactattgcaatgattgcccttgtcattactttagcagatcaaattgcttcaggtgtttgtaaaccctattttcatcgttttcgccccacgcaagacccagatatcatgtatatagtagacatagtaaatggatataggggaggtcgattcggttttatttcaagccatgctgccaatactttcgcacttactgtatttctttcgctgttattcaaaaacaaatcactcactttcatgctcattttttgggctaccctcaactcatattcacgcatatatttaggtgtgcactatcccggggatattctattcggtacactggctgggtgtttaataggatatctgatgtatttgttatatagctttattcacaaacgcatcttccatcaacctcgttgtatttccaataaatatacagctagtggttatttgataaacgatattaatctactatttacagtcctattattgacgtattttatgattattcttctcgggtttattacagctcatacattaaacttatagggaaatagcatttcatttcttcactttaaaaaaagaaggaaatactttgttttatattattttttgcttaagtttatagcgtgaattaaatatcacttgtataactaaaatttaagacactatgaacagaacgataacattcaacgagctgcgtaaaatcaaagattcattacccagtggaagtatgcatagaatagctgatgaacttaatatgagtgtagaaactgtgcgtaatttttttggaggtcataatttcaaaacaggaaaaagtgttggtatccacttggaaccaggtccggatggtggtttagtaatgctggatgatacaacagttttagataaagcaatagatattttaagggaagtagaaaaggaggaaatgcaagaagcataaaatagaaatcccagttgaatggcaacattcaattgggattttttgttttaaagatgtatatatagaaaactctaaaaaggaactgttatggaagataaattagtaactctagcgattctcacttatgctaaggctcagattcttaagaatgtacttgaagcagagggtatcgaagcatatattcacaacgtaaacttaattcagcctgtcatatcttccggtgtgagagtaagaattaaggaaagtgatttacctcatgctctacaaatcatagaaagttctacatggttagccgaagatatagtaaaagaacaagaagagagtaataaagagagaaataagcaaaagaaagtacttattcctgtcgatttctcagattactcattaaaagcctgtcaatttggtttctcatttgctaaatctataaatgcagaagttattttgctacatgcttatttcagtcctatctatgttcccacaatcccttatggaacagaaaatttcaactttcaaatagaaagagaagactctataaagagtatgatagaaacagttcataaagagctgaataagttgtcagatacgattaaaaagaaagtggaaaacggcgagtttcccaatataaaatatacatgtattttgcgtgatggcattcctgaagaagaaatattacgttatgccaaagagtataaaccacagattatcattatgggtacacggggtagaagtcaaaaagatatcgacctaataggaagtgtaacagcagaagttattgaaagaagcaaaacttttgtatacgcaataccagaacatactccactaaagactttcaatgatatcaaaaaggtagcgtttgtgaccaactttgatcaaagagatttaatcgcttttgacacattaataactgccttcaaatctttctattttgctatttcatttatccacttaagcacagaaaatgatgcctggaacgaaattaaacttgcaggaatcaaagattattttcaaaaacaatacccacaattggaattagattacaatgtgattaaagaagataatatattgaataatctagataaatatgtaaaagaagaaaatatagatgttatttgtatcacaaactacaaaagaaatatctttgctcgattattcaacccaagtattgcccgaaaaatgatattccatgctaatacgcctatattagtaattaaataggattgaccaaaatatattttcttaggatgggtcttaagtattaaattagtccatcccaggaaaatattcattgaaaaaggagtaaatggatagagcttcttaataattaaacataatcaagattataatatgattataattgggatattcagagcccgcctgccttcctcttcgtagacttaaaaggtggaaattgagttcggccttgctgggcatagcacataatcttacaaatccaaatgacttcaatctgaaatgaaacaacagaggccatctcaagttcattttgagacagcctcttgtttttattatgaaaaagaattagagccctaattctttttctaaagaatcatattctgctctgttcaatttccaatagatattcagtaaataatttccccataatgtattattgtccggtttcaattctttagccttttcgtaaaaaggtttagccttctcatacaaagctttaatctggttttcattttcattatacttaggattatcaatagctaattctgaattctcttctaccacaatctgtgctgggaagaaatagcaatcaccaatcttggcgtaagcttcagctactaaatcaccaccattagcgataattttattaaaagtagcaatagcatcatcatattgtttcttttcgaattgcaaaatacctttcacatataagaaatatggagtttcattagtagcaagcagcttattgatttgagctaaaccctcatcaaccatacctttttggatataataatccatgatattaccaacaaaatactcctgctgagggaatttttctgttccttctttaattacttccagccattttattgaatcgccagtttctttatcaccataagcctcagccaaacacatcaaagctctatagccttcgctcttatcttctttacctatcgtaccatatttgataactgcatctttatcttttagcatattagcagccaaagtagcataacaagcatataaagcattcagtgtatctgccttaagagattcatcatcagcaaatataggttcgtttacaacatctacaaatagaccaaaatatttcaaggcatcagcgtaatcgcctttattataagcatctccaccaccattaattaaattcaaacgtaatgttttaagagcattagcattcttctttctatatttaggctttttcatctcaccacttttgactttagcctgctccatctcatcacatttcaaataatactcatacatttttgccaaactgttataaagtctagttgtatcagcttgaccacctggcaaataaagtttcatgttttcgtcatcatacatagctttctgaaagtcacctgctaatttccaagtttctggatcatttgcagtctcgggattggtcaaagccggttcaataacttttgcagcttcttcaggtttactttttaaagatttagcttctttaacagcactaacctgtgcagatgcaaaacatgcacccaataataaagccactgtaaataatacttttttcataattttgtggatttaataatacaatcttttatgttctcttttattcttcgctattctcttcggcaaaggattcaccttgaatatctcctccattaattggagcttcggtatctaatagattttcatcctcgttggccatttcttcttccgattctgatgttactttacatacagagccgatttgatcgttacgcttttcaagatttatcaaacgaactccctgagtagcacgtcccataatgcgtacatcagctaccttcaaacgaattgtgatacccgatttattgataatcatcaaatcattttcatccgtaaccgactttatagcaaccaatttacctgtcttatcagtaatattcaatgtcttgacacctttaccaccacgattggtcttacgatagtcttctatatccgaacgcttaccgtaaccttgttccgacacaaccataatagattctgtttcaggatcttttatgcatatcattccgattacttcatcgcttccatcttcgtctaaagtcataccgcgaactccggttgcggtacgtcccattacgcgaaccgcactttcgtggaaacgaatggcacgaccattacggttagcaatgataatctcattattaccatttgtcatgcgtacttcaataactttatcatcttcacgaatagtaatcgcattcacaccattttgtcgaggacgtgaatattgttcaagcaatgttttcttaattacaccattctttgtacaaaacaagacatagtggctattaataaattcggtatcatttaaactcttcacacgaagatatgccgttactacatcatctgaatcaatattcaacaagttctggatagcacgtcctttagcattctttgttccttccggtatttcatacactttcagccaatagcatttacctttttgagtaaagaacatcatcgtattatgcatcgtagccgggtaaatatgctctacaaagtcttcatcacgtgtttcacttcccttagaacctactcctcctctattttgagcacggaattcagataacggtgtacgcttgatgtatcccatatgtgaaatagtaataaccatttggtcatctgcgtaaaaatcttccggattgaactcttctgaagaataaacgatttccgaacgacgcacatcaccatatttagcttttacttcgagtaattcatctttgattacttttttacaaagttcatcattagaaagaatttcttcatagtaagcgatctgtttcataacttcttcatattctgcatgaagttggtcttgcatcagaccggtaagttggcgcaagcgcatctcaacaatagcacgtgactgaatttcacttaagctaaaacgttccatcaaattagctattgcatcatttggagttttggcagcacgaataatacgaatcacctcatcaatattgtccgatgcaataataagaccttccaaaatatgagcacgttcttgggctttgcgtaaatcatattgagtacgtctaatcacaacgtcatgacgatgctccacaaaatatttaatcaaatcttttagattgagcatttggggacgtccatgcaccaatgcgatgttgttcacgccaaaagaagtctgcagagctgtcatcttaaatagcttattaagcacgacactggcattagcatcacgcttaacatcaataacaatacgcataccttcacggtcagactcatcatttacatatgagataccatcaattttcttttcattgaccaatgaagcgatattttcaatcagctcttttttatttacgttataaggaatctcatttacgataatcttatcatgcgaagtatgtgtttctatttcagcctttgcacgcatcactactcgtccgcgacctgtttcataagcatcacgcacaccacttatgccatatatataaccccctgtaggaaaatccggggcctttacatattgcattaatccctcaatatcaatatcattattatcaatataggcgatacaagcatctatcacttccgaaagattatgagtcggcatattagttgccatacctaccgcaataccagacgctccgtttaccaataaattcgggattcgagtcggcataacagtaggctcttgcaatgtatcatcaaagttattttgaaaatcaacagtttctttatacaagtcctgcatcatttcctcacctacttttttcaatcttgcttcagtataacgcatagcagctgcactatcaccgtccactgaaccaaagttaccctgaccatcaaccaacggatatctcattgcccaatcttgagccattctaacgagagcgccatatacagatgaatcaccgtgagggtgatactttcctaaaacttcacctactattcttgctgatttcttataagctttatccgaggtgttccccagttccatcattccgtaaagtatacgtctgtgaacgggtttcaaaccatctcgtacatcagggagggcgcgtgccacgattaccgacatagaataatcaatgtacgacgacttcatttcctcttcgatgttaatctttataattctgtcttgttcttgcatttaaaacaaatattaattatacatttcagggtctatcaaaaaccacgctaaggtacggcttttatacgacatacgaaaacaaacccgaaaaaaagttgagccaaatgacatattttgccatgtacttacatgtctttagacaaaaaatagcataatacataatattcctcttttcgaagagcataaaatataatgtggcacacattttgcaggtataatattaaataaaaagaaaaataacggtacgcatcatttttatgcgtatctttgcatttaaagaataaacactatactttttaaggaggataataattttatgaataatcaatttacacaaagagtgtccgacatcattacttatagcaaagaagaggcaaatagactccgaaacagctatatcggtcccgaacacttgctgttgggactgatacgtgaaggtgaaggaaaggctatcgagattctactaaacttaaatattaatttacaagatataaaataccaattagagaatatcctgaaaagagattcagaaagcgatgccatttacgatgctaatatcaactttaacgaatctgcatccaaagtattaaagctttgtattttggaagcaaaattacttaagaattcactcgctgattcagaacatattctattggcaatcatgaaagttaagaataactctgctttccatttactagaaagcagcaatgtgacatatgataaaataatcgaacaacttactcttcagccagatattcacgcagggcttgggttcagcgaagatgaagatgaagaagaggatgaaatccaaaatcagccttcgacaggaaatagccaatctggagctacccaacagacacgctctacccaaaagaaacctactaatgatacacctgtactcgataatttcggtacagatatgacacgtgccgccgaagaaggtaaattagaccctgtagtggggcgaattaaggaaattgagcgattagctcagattctaagccgccgcaaaaaaaacaatcctatcctcattggtgagccaggtgtaggtaaatctgctattgtagagggacttgcacttcgaattgtagagaaaaaagtttcacgcatcttgtttgacaaacgtgtgattgcacttgatatgacggctgttgtagcaggtacaaaatatcgaggacaatttgaagaacgtattcgttctatcttgaatgaattaaagaaaaatcccaatattattcttttcattgatgaaatacataccatcgtcggtgcaggttctgctgcaggttctatggatgccgccaacatgttaaagccggcattagctagaggtgaaattcaatgcattggtgctaccacactagacgaatatcgtcagaatattgaaaaagatggagctttggagcgccgtttccaaaaagtcatagtagagcctactacacccgaagaaacaatccaaattctgcaaaacatcaaagaaaaatatgaggatcaccataatgtaaactataccgatgccgcattggaagcttgtgtaaaactgacagaacgctatataaccgatcgaaatttcccggataaagctattgatgctttagatgaagcaggctcgcgcgtacacctcataaatataagcgcccctaaggaaatcgaagagcaggaaaagttgatagatgaaatgaaatcccttaaaaatgaggctgtcaaactgcagaacttcgagcttgccgccagctaccgcgacaaagaaaaagaatatgcagcacaattggatatactgaaagaaaaatgggaaaaggccttaaaagagaatcgcgaaactgtggacgaagagcagattgctgacgtagtttctatgatttcgggaattcccgtacaaaaaatggcacagactgaaggcgtgaagttattaagcatgaaagatgaactactaactaaagtagtaggtcaggataaagcgattaatacattagtaaaagctatccagcgcagtcgcgtagggttaaaagaccccaataagcctattggtacatttatgtttttaggacctacaggagtcggtaaaactcatttagccaaagaattgtcaaaactgatgtttggctccactgatgcactgattcgcattgatatgagtgaatatatggagaagtttacagtttcacggctcgtaggagcacctccgggatacgtaggctatgaagaaggaggtcaactaactgaaaaagtaagacgcaaaccctattctatcgttttattggatgagatagaaaaggcccaccccgatgtattcaatattttgttgcaagtaatggacgaaggccgactgactgacagttatggcagaaccgtagacttcaagaatacggtagttatcatgacctctaatataggaacccgccaactaaaagaattcggcaaaggaataggcttcactacacaggcacgtgaggatgataaagaatacgctaaaggagtcattacaaaggctttaaacaaagcctttgcccctgaattcattaaccgcctagacgaaattattaatttcgaccaattggatatggaagcattggtgaagattatcgacattgagcttaaaggacttcaccagcggattgaaaacattggctataagatgattatagatgacgaagcaaagcgatttgtcgcatcaaaaggttatgatatacaattcggtgcacgtccgttgaaacgtgctattcaaaactatttggaagacggattgtcagaaataattcttggtgcagaattacagcccggagatactattaaagtgtcatacaataaagaagaagatgccatcagtatgactgtagaaaagtaaaggactaaaagttatccaaaaataaccgccaaaatgtcagatacctgtgtatctggcattttttttgcaccaaagcttacaattacaaataacaataacttaaaacattaataatatgcaaaaaggaaacattggggtaactaccgagaatattttccccatcattaaaaagttcttatatagtgaccatgaaatatttcttcgtgaattggtatctaatgcagtagatgctacccaaaagctcaagactcttgcctccaaaggggagtttaaaggagaaatgggcgacctcactgtcaaagtaagtttaaatgcagatactatcactatctccgatcgtggtatcggattaactgctgaagaaatagaaaagtatattaatcaaattgctttttctggcgccaatgattttcttgaaaaatacaaagatgacgccaatgccattatcggtcacttcggactaggtttctactccgcatttatggtggcaaaaaaagtggaaatcatcaccaagtcttatcgcgaagatgctcaagccgtgaaatggacttgcgatggaagccctgagtttacgatagaagacgtggaaaaagcagaccgtggttcagacattatcttatacatagacgatgattgcaaagaattcttagaagaagcacgtatatctgctttacttactaaatattgccgtttcctccccattcctgtagcttttggaaaaaagaaagaatggaaagacggtaaacaagtagagacaaacgaagataatattattaatgaaacttatcctctttggactcgtaaaccggtggagctgaaagacgaggactataaaaaattctatcaggaactctacccgatggcagacgagcctttgttctggattcatttgaatgtagactacccgttcaatttaacaggtattctttactttccaaaaatcaagagcaatattgaattgcaacgtaacaaaattcagttatattgcaaccaagtatatgtaacagattcagtagaaggcattgtgcctgactttctaactcttttacacggtgtaattgattcaccggacatcccgttaaacgtatcacgttcttatctgcaaagcgactcgaatgtaaagaagatttctacctatatttcaaagaaagtttcagatcgtttacaagccatcttcaaaaataaccgtaaagaatttgaagaaaaatgggatgacttgaagattttcaccaattatggcatgttgactcaagaagatttctatgaaaaagccaataaatttgctttattgaaagatacagacggaaaatattatacttatgaagaatatcagagtttaatcaaagataaccaaacagataaagatggaaatctgatttacctgtattccaacaacatggacgaacaatacagttacattgacgctgccaaaaacagaggatacaatatattactgatggatggtcaactggatgtagccatgataagcatgctcgaacaaaaatttgaaaagagtcgcttcactcgtgtggatagtgatgtcattgatcgtttgattgccaaagaggagcataaagaagctaacttggaatccaatcaacgcgagattctttcttccgtcttccgcagtcagttgcctcagataaagaaagtggaattcaatgtcgaaacacaagcgttaggagaaaacggtgcaccgataatgattacacaaagcgaatatatgcggcgtatgaaagaaatggctaatattcaggccggtatgagtttttatggagaaatgccaaatatgtataaccttgttttgaatgccgatcacaaactcgtcaaacaagtattgacagatgccgacaactcgtgcaaagcagcacttgaacctatcgaaagcgaaatggcaaatttaaacaaccgacgtaaggaactccaaaaggctcaagaaggcaaaaaaacagaagacatcccgcaagcagagaaagatgaattaaatgatatcgaaaagaaaatatcggatgaaaccaccaagaaacaggctgtcttaggtgaatacgccaatggaaataagataatccaccaattaatcgatcttgcattattacaaaacaatatgttaaaaggagaagctttaaccaactttgtaaaacgaagcatcgaattaatctgattttatgagcttttctcataactaaagagagggtatcaacagcaaaactacacaattgcttttgataccctttctcttttttatttccaaaacgaatatatataaagatttatttctatatttgggaaaatatagaaaatccatgaaacaacgcatatatatactcctactcctaatattaatccctttgcaaatggaagcacaaaaagtaggacttgtattgagtggtggcggcgctaaaggactgactcacattggtattatccgtgcactggaagaaaatgaaatccccatagattatattaccggtacttctatgggtgccattgtcggctcactttacgctatggggtattctcctgatgaaatggaacaactactcaaatcagatgactttaaacgctggtattcgggagatgttgaagaaaaatatatctactatttcaagaaaaatccgccgactccggagtttatcaacattcgtatttcattaaaggactcccttaaaagtgtaaagccccattttctgcccaacagtattgtagatcccatccaaatgaatatcgtatttctgcaactttttgcccaatccaccgcggcatgcaaagaaaactttgatagtttgtttattcctttccgctgcattgcatccgacgtttacaataaacgcgccatgatattgaaagatggtgatttaggagatgctgtccgtgcttccatgagctttccggccatgttcaaaccgattgaaatagattcaatccttgcttatgatggaggaatatacaataatttcccggtaaatgtgatgaaagacgatttccatcctgatattattataggaagtaccgtttctaccaaccctggaaaacccaaagaaggagacatcatgggacaattggaaaatatgatcatgcaaaagacggattatacgctacccgattctttaggaattctattaacattcaaatacgacaatgtcaacctgatggatttcaaccgtttcgacgaactacatgatatcggttataaacgcacattggaaatgatggactctataaaaagccgaatccatcgaagagtgaatcctgcccaaatagaagcccggcgcttggcatataaaagtaatttacccgaacttcgattcaaaaaagtcaatatcacaggcgctaatgaacggcagaaacaatatatccgcaaagaattccacgaaaataattacgagacatttacaatagaagatgtaaaacaaggatattttcgcttgttatcagataatataatctctgaaattattccccacgctgtttataataaggaggacggaacttacgatttgaacttacaagtcaagatggaagccaatctctctgcccgagttggtggaaatgtctcttccagtggagccaaccaagtttattttggtgcatcttaccaaaacctaaactattactctaaagaatttacattcgacggacaacttggcagaatttataataacctccaactggcagcacgcatcgatttcccaacccgaatacctacttcataccgtttcatggcctccatctccacctttgactattataaagaagaaaagttattctccaacaacgacaatccggcttttaataaaaagaaagaggaattcgtgaaaataaaagcagcacttcccttcctcagccgaaaaaaagccgaatttgggataggaatcgcacgcattcaagatcgctatttccaaaccaatatcattgatttcagtcaggcaaagcatgatcgtagcacttacgacatccttggaggctccatagtcttggaaggaagcaccttgaacgcacgacaatttgccactcagggaagcagagaaaaaatggcagcacaaatattcacaggcagggaaaagtttaaagctggcaatccgcaagctcctgtagaaaaccaatataaaaagatacaatcatggttgcaggtatcttatgaaaatgaaacatatcacaaaataagccctaagtttacactaggagcttatttggaagcctattactcttcacgaaatttttcaaataattataccgcaactttaatggaagcgggcgaatttgcccccaccgcccatagcaaagtgacctacaatgaggcattccgcgccaatcaatataccggaatcggggctattcctatctatcaattaggaaattctatccagctacgaggagaattctatggtttcattcccatctttcctattaaaaaagatgaatacggaaaagcatattatggtaaagccttcacaaaattcgaatatctaggagaaatctctcttgtattccaattatctttcggttctatcagtgcatacgtaaatcattatagctcaccgaataacgactggaatgtaggactcacactaggttggcagctatttaactcccgtttcatcgaataattttttgaaaaaagaattgctaaaacacttgcagattcaaaaaaagtccgtatctttgcacccgttaaaacgaaagaacaatggccgcgtagctcaactgaatagagtagctgactacggatcagccggttacaggtttgaatcctgtcgcggtcacaaaaa

SEQ ID NO: 6807 - DNA, 7123 bp, Unknown
  gut microbiota DNA sequence
aatggccgcgtagctcaactgaatagagtagctgactacggatcagccggttacaggtttgaatcctgtcgcggtcacaaaaagaaggtatgtcgtactacacgatgaaccttcttttttttattcattcctataaaaatctgccgagcatattggggctctgtttgaaaacttggctcagtttgaaaacttgggggaattagttaaaaacactatctttgtggcatgaaacagaaacttcaaaaatatcttgatgactgtattaaattgcggatacccccattcttcgagattgttttaagctccctacgccgtttcgttagtcggaccaagcgttttcgtcctttagattatgcctgcctgtccgtcgaattactacagtctccggcagcggactgtatgattcgttgcagtggaccgtacagtctgctacagtggactgtacggtccattgccgcagactgtaataatcttccgtttaaaaagccttggccgaccccggggaacggcttattcttccctttgtttgtgatatgatatttaaatccccaagaataataagtgacccatttgcaagtcatcaccacataaaatttccctctttggaccttaattcatcacaggcaagaccaaagagggaaattattatgtgtaaatctataagattttcaacgttcaatttctatatagacagtatctatcgtgcttttctttatcagcatttgattttcaattcatccaatatagcacgcatcttctcaaaagtagtgattcgagtaggaaccaaaggcagacgaagcttattctcaatcaaccccataacattcagcatagctttcactccggcaggattgccatccacaaacagcaagctgaacaattctgtaaatttatgatggatagtcaatgcatttgcaaaatctccctgaagagccaatcgtgtcatacgactaaattcacgcggaaaagcattgccgattacagaaataactcctactgctcctaatgtaatcaaaggaaaagttattccgtcatcacccgaaatcacatcaaaattagccggcttgttcttgatgatgtcatccatttgagtaatatttccagaagcctccttaatagcaatgatattattaaaatcgcgtgccaaacgtaaagttgtttcggccgtcatatttacaccggtacgtccgggaacattataaagcactaccggaaggtcggtagcttcagcaatcgccttatagtgctgatagataccttcctgagagggtttattataatatggtacagctacaagaacagcgtctacaccggtgaaatcatcatttttcagcgattcgacaacagtgcgggtgcagttgctactgattcccaataaaatgggaattcgtccgttcactctttctaccaccaaatgttttatcttatccttttcttctttagtcaaagtcggggtttcggcggtagttcccaacacacacaaaaagtctgttccgttctgtagctggtaatctaccaaacggagtaacgcttcataatcaacgctatcatcttctttgaaaggagtaatcagtgccactcccattccttttaatcttgtttgtatcataaataaataataaactcttattcaatagctcacaaaagtacgaatattttcttttttagcgataaaaatcatataatttttaaattatacatactaaaaagtcacttaatcatctctagaaactcttcttcgctcaccatggcaatacctaacttctgcgctttttccaatttactgggacccatgttatctccggctaaaataaaactggttttcgaggaaatgcttcctacgttctttccaccatgtttttcgatgaatgctttatattcgtcacgcgaatgataggtaaataccccgctgataacaatcgattttcccgccaacttctcagtacggtcagcagtatcttgttcatcagcctccattgtcaccccggcaactcgaagacgctcaacgatatcccgatttttggcatctgcaaagtacaaaataatactttgagctatcttttcaccgatttcatcgacatggatcaaatcatcgaggccggcatgtattaaagcatcgatagatttaaacgctttgaccaaagtttttgctgtggtttcacccacaaaacggatgcccagcgcaaaaagaactctttcaaacggcacattctttgattgctcgatacctgagataatattctcggccgacttttctcccatgcgttccaaattaataatatcagatgctttcagtttgtacaaatcagctatatcgtgaataagtccttcttgataaaactggtctacggtctcagggccgagaccttcgatattcatcgcccggcgactgataaaatgttctatttttccttttatctggggaggacaggccgtgtcattggtacaataataagctgcttcacctttataacgtaccaatttgcttccacactcagggcagtcagtaatgaatctcactttatcgccaatcattatacgggcatctttgtctacaccaacaatcttcggaataatttcaccgcctttctctacatataccatatcgccaatgtgaagatcgagtccttcaataatatctgcattatggagagaggcgcgttttaccactgttcccgccagttgcacagggtcaagattggcaaccggagtaacggctcccgtacgccctacttgataagtcactttgttcaagcgggtacatgcccgttctgcctgaaacttataggcaatagcccaacggggagacttggctgtataaccaagattacgctgttgacgcagagaattgactttcagtacaataccatccgtagcaaccggaagatttttacgctcggtatcccaatatctgataaactcaaatacctcttccaatgttttacacttgcgtgtaacatcagatatcttaaagccccatttttctacttctttcaaattttcgtaatggccgtcataaggcaagttttcacctaataaataatataggtaagcatccaacttgcgagaagccacgatagcagagttctgcagtttcagcgttcccgaagcagcattgcgcggattggcaaaaagaggttcctcgcgagcttcgcgctcacgattcagttcttcaaacacttcccaaggcatcagaatttctccacgaatttcaaattcggacggataaccttcaccatgcaaaacaagcggaatactacggatggttttcacattatccgtcacatcgtctccttgcacaccgtcaccgcgagtaacggcacgactcaatttcccattctcataagtaagggaaatggaagttccgtcatatttcatctcacagcaaatttcaaactcttcattcaaagatttcttcacacggtcataaaaatccgaaacttccgattccgaataagtattggcaagcgaaagcataggatatttgtgtaccacttgagtaaagttcttattaatatcactccccacacgcatggtaggcgaattttcatcccgatgttcgggatgctttgcttctaagtcttgcagctcacgcatcagaaagtcaaattcctgatcgctgatttcgggagcattcagcacataataattatagttatggcgatgaagttcctcgcgcaattgatctattctttctatttcagtcatactataaaagatagtttcctgcaaaaatagctattttttgaatgaaaaacaccgttaggcagagaggattttagtacttttgcaaaaaatatatagaaaatgagaatagatatcataactgtattgcccgagatgctggaaggtttcttcaactgctccattatgagccgggcacaaaagaaaggaatcgcagaaattcatatacataatttgcgtgattatgctttcgaccgttatcgcaaagtagacgattatccctttggaggatttgccggtatggtgatgaaaattgagccgatagaccgatgtatttctgccctgaaagcagagcgtgaatacgatgaagtaatttttacaagtcccgatggagaacaattcaatcaaccaatggcaaactctctctcgcttgccaaaaacttaatcattctatgtgggcattttaagggaatagactaccgaatccgtgaacatttcattacgaaagaaattagcattggtgactatgttttgacaggaggtgaacttgcagcggctgttattgccgatgcggtagttcgtattatccccggagtaatttctgatgagcaatctgctttgtctgattctttccaagataatttattagctgctcctgtctatacacgcccggccgagtacaatggatgggctgttcctgatatactcttatcggggcacgaggcaaaaataaaagaatgggaacttcagcagtctttagagcgaactcaacgtttaagaccggatttgctaaaataaaaaataaatataaaaagtaaggaggtgcagacggtatccattaccctctgcacctccttgcttttaggaacacacctacttaaagttctacttcagctcttcaagttcatcaaagtatagatgtagtcttcccacccgcaataaagctttttctgcatattctaaaccttcatttttataaaaacgaaccatttcatcgggaaaaaacatttaaagttatcatttgatacccttgcataaagttgcaggtgcaacttatttagaagccaaagttcatcgggcaacaagaacaaaaagccccgcaaggataaagagtaatacctcaaaacatccttgcggggtcaacttatacaaaggtaaaactattacacttctaatgcacctatgatatcttttacagatgtatacccatgacgctctaaatagtcattaataccttctgatactttgacagtaacagcagggtctataaagtttgccgtaccaatctgtatggcggtagcacctgcaagcataaactctaccgcatctttccaatccatgatgccacctaatcctatgacaggaatatttaccgctttagctacttgccaaaccatacgcagagcaatcggttttactgccgcgccactcatgccgcccgtaatggtcgaaagaacaggacgacgtttctctgcgtcgattgccatacccaacaatgtatttatcaaagagacactatcggcacccgatgcttcggcagcccgtgcaatctcagtgatatctgtcacgttaggtgataactttacaatcaacgtttttttatacacctcacgaacagctttcaccacctccgaacagcctttggcagaaacaccgaaagccatacctccctgctttacattaggacaggaaatgttcaattcgatggccggaatcttatcaagctcattgataatttctgctgtcttggcatagtcttctacagccgaacctgagacgtttacaatcatattggtattgatatcctttatctgtggatatatgtgctccacaaagtaatttacgcccttattttgtaatcctacagcattgagcattcccatgggggtttctgccatacgcggataaggatttccttcacgatggtgaagagtagtaccctttacaatgataccgccaatcttttctaaatctacaaagtcctcaaactcttttccgtagccaaatgtacctgatgccgtcataacaggattggacatcatcaaactgccaatatttacgcttaaatctgccataatagtttctttatattaaatacaggaccatctttacaaacacacaggtgaccttcgtccgtgttttccacacaacataaacatgcacccacgccacacgccatcatgttctccaatgacacctcgcattcgataccattggctttggcatatttggcaactgataccatcataggcttcggaccacaagtatatatcatgttaaagctattgttgttcaacagactatgtccggtcacataaccttgttcacccatactgccgtcttcagtggtggtataaacctcacccagcttctcaaattcttttaattgcaacagatccttagaggaacgtgcacccaacagaaaggttggcttacagccggcctttgcaagttctacccctaacataagcataggagcagtacctacaccaccacccactagcaaaggcttgaatgccgtaacatccttgggtatagtaaatccgttgcctaaaggcattactacattaacgatgtcaccctgctttacagttgccaatttacgtgtaccgtcaccaaccaactgtaccaggaaccatacttcgtttgttttcttatccacatagttaatggaaatcggacggcgcagaaaagtagtattagagccgtcaatccgtatctcagcaaactgacccggcaacatttcgggtaacgggttagcctgagtcattttaatcagaacataattggcatgcaatttaatgttctgtgtaaccacaaggtctaaaatatattttttcatgaaataaaattgggtaaattcgtttttcaatgcaaagatacacgaatttacccaattagttatctgtgggagggcattttagtaaaatgcaagctatttttccgggcgaaaggtttcataagtaccattatcgaagaaaattcttatttcagtgatttttctggcaggtttttctatgtacttaatctcctcacgcacaatctctttagggggaatagtagaggctttaacctcaatttccttgcgatattctggcacattcgtcccattggacgcaaataatgaattctcgtcaaacaatggtccgggaaaactaccattattatccgagtccacatcggtctccatttctccttcaccatagagaagccaatccaaactaatgtaatcacaagccttgtgtattttcatgactacctccaggctcggattattcctaccactcaggatatgagagagagaagaaggcgaaattcctatcttatctgcaaattgcgcagcagtcataccttctttttggacgatttgagctattctttccttcatttacaaaagtaataagtcagattatatagatacaaaagtaattcttataat

SEQ ID NO: 6808 - DNA, 59875 bp, Unknown
  gut microbiota DNA sequence
gtcctaaaatagcgataatcttaactttaattatataggtgtaaaacactcattatacggacattataaattagatatacacacaatatacaaatgaaaatatcgaaaagagcaacctttttacattttctttattaactgctttatgaacaggtaataatttattggttttcagtaaaatatcagctaacatataagcttaaataaatatacatacacatttataaccttgcgctttacaagagaacatatctctatttacaactataaaatatcagtttgtaaatatggtaatctacaaagttatctatatctactgctgtttacaatcatatatttactgttggaaatataaaaattcgccaatcatgaattttacctcctgaagaagagaggcacacctcttcatctgattccgcaagccctcgtaccaacagacattttacctacacatatatgcgcatagggttacacgtgcatatgcataatatgtatattgatcaggttctgtaatatctgtatcaggatttaattagtttgtctccctctcttgacaaactctttttatgtgatataatttgcaactcgccaaacttaaaaatagagaaatactttcattttcacgaacaagcacccgcttctcagcaaatacacgattctcaagaagcaaaattccatataactacctaattataaataagataaacttaattttcagtatcaacaaaaagaacaatctagaaatttgtaagagaagatacctatcaggacaaccccaacaagcacaaagaagaaacaagataataaatatgtaaaataatatcaatatgcgacaaaggcagttagcaagaaaagaaatactataaagaagtcccgatgctctcccatcacaaagaacatcgggacttcttttcttccaccgacaactctacctaatgaagaattttataaacaagttcccggagtaactccccatctcccaaagaagaatttcccacccctttcgacttggcatcgcagtaacgaatttcaccaattatctgcatcacctttactccgctatatttcctcatagcagccagatagtccttagattgccaaggagatttcagtcccaactgagcagcaataccttgttccgacttctcgggagcataatatgccagcattaaattagagaagaaattaaataacacagacaatgtcatctgcagaggattagtcttaggattctcctcaaaatattttattatctgatttgccttaaatacatcctttataatcagagcatttctaagctcatagttattataatccttgcttatgcctatattctgctctatttgctccggtgtgattcgtttttgccctttaggaagagtaataataagtttttccaattctcctgccattctactcaaatccgtaccgacaaactcagccatcatttcggatgctttcggctcaatctcgatagatttacgctttaaataagaagtgataaagccagccaattgagtatcctttatcttctttgattcaaaaagcacacccactttctctatctcagctgccaatttttttcttctgtccagaacaccatgcttatgacacagcaccaaaatggtagattccaaaggcttctgcaaataataagacagctcatctatatttttgacaccttgtgcttcctttactatgacaacctgatatttagacatcataggataacgcttggcggcattgataatggtagctatgtccgtatcagcaccatatagaatcgtttggttaaattccttttcattttcatttaacactgtttgggcaatatactcagagattctgtctatataataagactcttctcccataagataatacaccggcttataaatacgatttttcaagtcacgggctatttcttcgtaagtggtttcttttgccataataagtaaaattaccagtcaaatttcaagtgtttaaccgtcttcttttcatcaatgatcatacgcatggaagcaataccaatctctacatgctccttcacaaactgttgcgttacaatgttgtcgctcttgtcggttttcaccccttccggaatcatcggttgatctgatactaaaagtaatgcgccggtaggaatatgattataaaagccggtagtaaacaaagtagccgtctccatatccacacacatggcacgagtcttaagaagatactttttaaactcttcatcatgctcccaaatgcgacgattagtagtatatacagtccccgtccaatagtcacgagcatggtcgcgaatagcagacgaaacagcacgttgcaacataaatgccggcaatgcaggaacttcaggcggataatagtcattagaagttccttctccacggatggcagctattggcagaatcagatctcccaacttattttttttatctatccctccacactttccaagaaaaaggcatgctttaggctgaattgcccctagcaaatccatgataatagccgcattggggctacccattccaaaattaatgatagtcatcccctccgcactggcagatatcatattggcatcacgccccaacaccggaacaccgaatttctcggcaaacaactccacatatttattgaaattggtcagaagtatatactctccgaaatcttccaggcttctttttgtgtagcgaggaagccagtttgctacaatttcctcttttgttttcataatcttttgtatttttgtaccggttataccgaattatacttattgcaaatttactaaatgttatcattaaacttaccatcctacgaagctaaaatagtacagcgcaacggaaaaaatgttattttcgatacgctccgaaaaagatatgtcgcccttaccccggaagaatgggtaagacaacattttgttcattttctgacggattataaaggttatcctaaaggacttcttgccaatgagatacaattaaacttgaacggaacaaagaagcgttgcgacactgtcctttacgataagaatttgagtgcaaagttgatagtggagtacaaagccccccatgtagaaataacacaagcggtattcgaccagataacacgctataacatggtattgaaagtgaaatatctcattgtgagtaacggtctgagtcactattgctgccaaatcgactataacacgcaaagttacgtcttcttgcccgaaattccatcttactcccaactgtagccgggggaagatcgatatataaaatacggattgcataaaacattaccgccacatcagtgacagtaagttctatgcaatccgttcgatataaataataaataacttatttcttgacagactctaaatgctgttccgatactacaccagccaattcagggtcaatcatgatacgaccgcaatattcgcaaacgataattttcttacgcatgcgaatatccaattgcttctgaggcggaatcttgttaaaacaaccgccacatgcatcgcgttgtacataaacaatacccaaaccattacgagagttcttacggatacgtttaaacgcctgcaataaacgaggttctatagtagtttccaacactttagccttttcacgaagcttttcttcctcctgttttgtttcagaaacaatttcttccagttcagcctttttcgcatccaagtctttctttctttcttccaaagcttcattgctttgtgcgatttcctcattcttggccttttcggtagctgtatattctttaatacgcttttcgcagagttcaatttccaatgactggaattcaatttcttttgtcagcacatcatattcacgattattgcgtacattgtcttgctgagatttatatttctctacagaattcttagccgcttcaatctcaatcttctttgtggcaatatttgatctcagctcttctatttcagctttaatcttttcgatacgggtactcaaacctgctacttcatcttcaaggtcttgtacttcaagaggaagttcacctctcagcgtcttaatcttatcgatttcggacaccatggtctgtaactggtataaagctttcaatttctcttctaccgtcaattcactcgggtctttctttgcttctctagccatagtttttcttacaaatatttaatgggattagtgtttacccgcgtcatctggacttccagtgccggaaacatttcccgtatgattgaataaaatatttcttttgtatattgttcactctcataatgtcctatttcagctatcaaaatatcattctcataattaaaatagtcatgatacttcacttcaccggtaataaaaacatctgctttaccaaccgcacgaggcaacaaaaacgcacctgcaccaccacacaaagccacagtctgaatcaaacgtcctgataaacgggtatgcttcacacaccccacttcaaaagttttcttgatgtttttcagaaactccaactctgtttcaggcttcttcaactctcctataactccggctcctacctgagcccaatcgttttttaacggatagaaatcaaacgcaggttcctcataaggatgagcacccagcaaagcttttacaacagtcgcctttttgaaatcaggcagaattgtttcgatgcgtatttcggactctttatgcaattcgcctacctctccacaaaatggacttgcccccttcaaagcacggaacatcccctcaccttccacattataactgcatgaatcataattacctatgcatccacatcctgcctccgccaatgcatttcttacctcatcagcttgtgcgcgaggaacaaaagtaaccaatttcagcagacattcctgtttcggctcaagtatacgaatattctccaaaccgattttctccgcaattttgaagttcaccccacccggcgcattatccaaattggtatgagccgaataaatagcaatatcgttcctgatagctttcaggatacaacgttccacataatctcgccccgtaatagatttatatcctttgaaaataagcggatgatgtgacacaataagattgtatcctaaggtgaccgcttcatctacaacggcttcagtaacgtctaaacacaacaaagcccctgttgcttccgcttctgtcagtccgatttgcagtccggcattatcaaaaccgtcttgcaaaggcagaggcgcgaacctttcaagggcacctattacttctttaattttcatttcttcgagaaaatttgaatgcaaagatacattttttcttgatgaaacgaaaataatcagaaagattttctacttttatatcttgtagactactatgaaggttatttcctacataaagtaactccaccaaaaaggcaacagtaataatagaaatcttcaaaacaagtttaataggacaataaaaccaataaggtgtacaagattattttctttgtttgataaacttattctttagagcataacgttcatctacaacgcaattggtaggaaaaaaggtgagatgaagacgccactccccttcctgaaaagtaaatttccgccctgtaatcccttgctgtatttgtgttatcttccctttgataaacacttccagtccatccagttccgaacttccttcacacatgatatctgcggtaataaaaaaaccgggagtctccatttcagctattctacgccatatttgttctttgtctgtcattaagatgatatttgtcaaatactctatttacgttttccctctttatgcacttgcaacaggcgaccataagaatcaaaagattttcgggaagccaacataatggtaatcatcaatgagagcatggaagaagcaacagttatcactactatcattatctgatatttaattgctacatgaggcgaactgccacctaatatctgtccaatcatagtcccgggaagtgccactaaccccgttacagccatgttagctataccgggactgaaggcttttattaaagcctgacgaataaaaggagcagtggcctcgctacgagtggcaccgttacccaacaagtaataataaagttgttgctcacgcttcaaaccggcatagtaagtattgagaccaatcacattcactcccaacatattacccatgataataccaaatatcgggatgaaatattgagcactgaaaatgttatctagtctaagcacgaagcctaggaaataaagtcctaccaacaccactgtcaccagaaaacccacggaaacgggaatcattaaaatatgacgcttcaaacgagtacgggtaacagctgtttcagctgcaacgcccaccataataattacccataagaaattaataaaaggattattccactcaaacagaaagcggagatagacaccgataaaaaacaactgaatgatcattcgtacggcaccaattagaataggtttcagtaatcccgttttgaaacgccacaagaagtaaacaggtatcagtaaaagcagtaatcctactcccaaactggtgtaatctatatctatcgttcccatccgtacacgttttataaattaaatatatggttgcaaccggcagcaaactgcttgtcgtgagaaactgccagaacagtcatacccttaccgcacagacttctaaaaaaatctatcacgcggtcgcaagagctgggatcaagcgccgaagtaggttcatccactatcaatatcgatttattgagtacctcggtaaccgccagcataatccgttgtctctgtccacccgacacctcgtgcacacgcttgtgataaagctcttcttccaaacccaacaaggcaaaattatccaacaagcgttccatgctaaagcctgtttcccgattggctttcaactcaaaaggcatacgcaccatatcacttacccattcagacggcaaggcaagctcttgtggaatccatgctattttccgacggacaaaatcggcatttcgaggggtcatctctaccccatctactttgataactccttcacttataggcacaaatcctaagacagccttcaataacgaagtctttccactacccgagtcaccgcaaacacaaacactctcaccccgatttacatgcaagttgagatgcctgaaaagtaacaagtcaccaaagttgatagatatattttttatttcaatcatttctcaaagaataaaggtcgggagcattcactgctgccgaccttccttattttaagactaaaaaatcaataagctctagcaaagagtacacggcgagcagatggtttaccggttaccatacatttgcccggagtaaggctttcttcgtctgcatcaaaaggcagacaacggatagttgcctttgtctcttcttttatgcggtcttccgtctcaggagttccatcccaatgagccaaaataaacccgcctttttctatttgttctttaaactcatcgtatgagtctacctttacgatatggctgttacgatagttcaatgctttctgataaatattgttctgaatttcttccaacagattctgtacgtattcttcaataccatcgcatgaacgggtttctttttccaaagtatcgcgacgcattacttccatcgtattgttttcgaggtcgcgtccccccattaccaaacgaacgggtacacctttaagttcgtaatcggcaaatttaaagcccggacgcttattgtcggcattgtcatacttcacagagatgcccatggctttcagtttcttcacgataccttctaccttggcatcaatcttcttcagcatttcatcattcttataaatcggaacgataactacctgaatcggagccaaatgcggtggtaataccaaaccattatcatctgagtgagtcataatcaacgcacccatcaaacgggtagataccccccatgaagtagcccaaacataatccagtttattgttcttatcaacaaactgaacattaaatgcttttgcaaagttctgtcccaagaagtgggatgtaccgcattgcaatgcttttccatcctgcatcaaaccttcaatggtataagtatcaagtgcaccggcaaaacgttcgttagccgatttcacacccttgacaaccggaactgccatatatttttctgcaaaatcaccataaacatgcagcatcttttgtgcttccgcttctgcttcttcacgagttgcatgagccgtatgaccttcctgccacaaaaattctgccgtgcggaggaacaaacgggtacgcatttcccagcgcattacatttgcccattgattacatagaatgggaaggtcacggtatgaattaatccagttcttatatgtactccaaataatagtttccgaagtaggacggataatcaattcttcttccaacttagcagccgggtcaacaataactcctgaaccgtcttctgcattcttcagacgatagtgagtcactactgcacattctttggcaaagccttctacgtgttcggcttcacggctaaggtaggatttaggaatcagcaacgggaaataggcgttaacgtgacctgtttctttaaacatatcgtccaactgacgctgcatcttttcccaaatggcgtatccgtaaggcttaataaccatacatccgcgcacaggtgattgttcggctagatccgcctttaccaccaaatcattataccactgagaataattctcgcttcttttggtaagttcttttaattctactgccattgctatattgttatttttacaatcctttttagagtctgcaaaagtagtaaaaaagcatgggaaagtaccaatgatttcccaaaaatattattgataacggtaataccaccaataggtatcgccaaattcgcgtcgcatacggttcttctgctctaccggtgaagtatattccttttgaagtttatcaaactcttgcaggcgttgtatcatcagcgtatcatttagaacacgcggataagcggggtgtgattgcttgtaaagcataatcgcctcgcggtaataacggggtaatgtatcttgctcaaaaaagctgtcttccacgacagaagcaaatttatcaagcttcttatcaagtagcagagcactcagatagtagtccaaagcggtatgtttccctacttcatcccgacaaatacgggcaaggaaatcggtcgtactttctgccgtataaggtttagctcccagataattgtacaaactgtctgcatccaatcgcaaggtgccctgcgaagacgaagaaaacagcaaaccatccgaaccgtagtattgaggatactcaaacaagtgctcgcccatcgttccctcacgcgacaaggcatatgcccgaagcacggtaagcgtacggcttgggtccaaagattcgtatcccactttgcgtgcagctttataatctttctctcggatggcattctctatagccaactcatgatgaaagttaatatccgaattgccgatacacgccgtcatcagacacagtatcagcaaaatagctaaattagagttgatcagcccaattacagaactttcatgatccagccaatgacgaaatattcgccgaagcacaaacacaactccgacatacataataagtaaaagaggtaacagccataaccatttatccgcaaagtttccaccatgataaagagaacggttcacatccgtcagcactcccaacaatagacaggaagggaaatatgaaagtgaccttaccgaacctttcaaccccaacaagccatttatcccccatctgaatattaataagacaagtgtaatgataatggctcccgccaaaggcgaataatgagtctttccctgagacagcgaatagtgtaatgcccccaatacatcaccctgaaacaggtaaagatagatgaaactgaaagcagagaaaagaagaccgcacgcacccgtgaggatgcgaacggctcttttataggacaaattggtattgctactcatataaaattattctttcacttttttcaaaaccactgctgaacgagccggaatatacagtttcaaccattcttttccttctcttttataaagaggatcaaagttggtcagatgtcgtatgctatcgtctgccaagccaaaacctccaaattcttttgcatcggtattgagaacaacctcgtatgctccgtaaggaaccaaaaaaccatagtctgtaaacgaccgagtcggattgaaattgaaaacgaagatattattcttacgacggtatgccaatacctggtcactgtcattatgccatacttcaatcaccggagtatcctgtatattcttcatctctctgagggtatgtatcatagccgaatcaaaatcacccaaataatggtaacacaggtttttattgtctaccaagttccattggcgacgtgcatatttatgcgaccatccattaccttcgcgcggaaaatcaatccattcaggatgaccgaactcattacccataaagttcagataaccgccgttaatggtagatgctgttaataaacggatcatcttatgcagagcaataccgcgatgtacgttataattctcgtctcctttctggaaatgccaatacatatcagcatctatcaggcgaaatataattgtcttgtctcctactaaagcctgatcatgactttcggcatacgaaatggttttctcgtccttgcgacggttggtcacttcccaaaacatactgctcggtttccaatcttcgtctattttttctttgattgtcttaatccaataatcaggaatattcatagccatacggtagtcgaaaccatatcctccgtcttggtaaggtgcagccagccccggcatgcccgatacttcttctgcaatagtgatagctttagaattcacctgatgaatcagcttattggccaatgtaaggtaacaaattgcattatcgtcctgattgccattaaaataatcaccataattacagaatgcttcacctaaaccgtggctataatacagcatggaagtcacaccatcaaaacggaaaccatcgaaatgaaactcttccaaccaatatttacagttggacaataagaagtgtatcacttcattcttaccataatcaaagcacaatgaatcccatgccggatgctcacgacgcacaccgggataaaagtattgattcggatctccggcaaagttgcccaatccttctacttcattcttaactgcatgagaatgaactatatccataataacggctatacccattctgtgagcagtatcaatcagttctttcaattcctcgggagtaccaaaacgagaagacggagcaaagaaactggatacatgatagccgaaacttccatagtaaggatgttcctgaatggccataatctgaatacaattataaccgtcggctgccactcttggtaatatcttctcacggaactcattataagtacctactttctcttcattttgagccataccaatgtgacattcataaatcatcaatggatctattttggcacggaatactttttttctgaatttataaggtttttccggtgcccaaacctgagcactgaatatctttgtctgttcgtcctgaacaacacgagttgcccatgcaggaatccgctcaccttcaccaccgttccaacggactttcaatttatacaaatcaccatgctttacagcattaggattgagttccacttcccacactccgggagaattcttcacgcgatacatccgataatcgccattctctttccaaccattgaaatctccaataatatagatttctttcgcattcggtgcccattcacggaacacccatcctcttttagtacggtgcagaccaaaataaagataaccggttgcaaagtcagaaagtgttgatttgccgtttgtcagttcaagttctttgtcgattgcatgctgatgacgtccttcaatggcagccgaataaggctccagccatggatcactttcaataattcctaatttgggagttgtattttccataatatgataattaatactgttagtcatttcctttattttacaccaatacttttacgattacttttttcacgccatccggtgtgacccccggagcatgcgcgtcttgaggaaagaagattacaaacattcccggctttacaggaatgtagctttcagccagcccatggtaaaaagaaatatctttatcagcattatattcagcctcaggcagatcctcacgaggagtatatcccatcacttctactcctgacaaaggtatctgtatatcaataaaacgattatgcgtttctaatttagcttcttctttagtcttggggttggtctgcgaaaagttaaccaccaggtcatcaccctgcagttttatttttcccaattcctgagcattcagatcggttgtcttcaaaaacttgattgcctctgcaaacaatggatttaatgaagcatacttttccagattttcaaatttatctactaccataattttatatttaaatggttaatgttactttctattattcaaagtcatcaatagtgaagtttgtgaaatcagcaaaacgcttcaattgcttgaagacgtcctccaccttatccatcaaatcaggtgtcatgaagaagtcatcaggtaccatgtaagtgcaagtaaactccttacattttaaataatctatatattcaaaatctttaggaaatccttttggagctgttttcaaatgtgtttcgccaataatggggaaataacgcttaaatgcaggatcttctacaatagctctatactcctctatattgtcatataccgcctgtctgacggctttcagtactttagaatcaagacaaaggcttcctcccgcaagcatgctgtttccattttccaaatgaagataatagccacaatggtccgacttcttgccatgggcattgatatagccaccgaaatgtattttataaggagtcttatctgccgaaaaacgagtatctcgataaatacgataagtacagtccttggcttctataccacggacactatcatcaaataaagagattcgtgcaataacagctgtcaataattgttcaaattcagcctgtgctctcaaatactcttctttatgcgcctgaaaccactcacggttgttgtttgcagccagttcctttaaaaattgaaagataatagatatatccatgttctatttgtcacacgtttacttgacaaatatacaatatatatttgtaacgaactagaaaaaaacgaagtatttatctttttcctactatcttcaagaactcattatgcaactttccattggttgcaagtacctcatgaccattatagaaattctctccgccactgtaatcagtcactttaccgcctgcattcatcaaaattattgagccggcagcaatatcccatggaccaaggaacccttctatacgggcttcaaagcgcccggctgccacatagcacaattcagcagccgcagctccctgtagacgaagaccgcctacattgccataaagtttatgcactatatgctcggcaagtggcttataggattgaaaattgtaaggaaatcctaacgcaacgaaagcctcatccatgtccgctacatccgacacatgaatttccctaccgttcagataagacggcgaacctttgtatgtccaataaagttcattacgacacacttcatataccactcccaccagcaattcttcgcggtttctcaaagcaatgctgatacagtagggtgcattattatggataaagttggtggttccgtccaacggatctaccaaccagcaatactcttcgtcagtcagactgcctgaaccttcttcggcaatgaagcctgcttcaggcaccagttcgcgcaattgcgctacaattctgtgttccgattccttgtccacataagacacataatcatgagcatttttcttttccactctgccacggtcgaaactactacgctcattacgaagaaaagcacccccttggagtgctatttcacgtacttttttggtaatttgttctaagtctaacatatccttatttttgagaggcatccaatgtaccaaatttatatacgcctttacggataatctttccgtctttatccgtttcgacaaaagcaccatgcttctttccctgtttgaagaatccgtcaaaacgtacaccgtttttatccaccagcacacctttgccatcttctttccctttagagaaatgacccttatagcaacttccgtctttcatttgaaggactccttcaccgtcggccatattgttcttccagtcaccttcatactcatcaccgttggcccaaacataatgacctttgccattacgctggttattaacccattggccatcatacactgctccgtttgcccaagtaaatgtacctgttccgtgttgctccccatctttaaatgtgccgacatacttatcaccgtttttatgataataaataccctcgcctgtacgctcaccatctacataatcaccttcataacgatctccgctatggaaataataaatgcctttgccatcctgcacatctgctttccaatcgcctacgtatttatcgccatttacatatacaaaggtaccttttccgtcacgcatatcatccttccattgcccttcgtattttgatttgtcgggccataccatcgtaccttcaccatttttcttatcattcttccactcacccacgtattgcgcaccggctttccacgtataggaacctttaccgctgcgctggtcttgaaaccaattgcctacatagatgtcgccattataataatacatagtaccctcaccttgctggtaatcggtgtaccacataccttcataacgattgttgttcataaaatagaaagtaccgttgccatgctgctggtcctgataccactgccccacatatttctctccgtcgtgaaacgtataggttccgtcaccttcgcgttttccttttacatactgaccttcataaatgtctccattcttgaagactgtctttccttttccgttaggtttgcggcccttcagttctcctgtatactcgcttccatccttaaaagaatagttgcctatctttatttgagcggtagccattgtgctgaccgaagccaaaatcaataatatatatgcgtatttcttcattggttcgtttctaaataatagataagatagtcaaagatactactttctgctttcagcgttgcaagttattacacttttttacccgcaacgacctctattaagttttctttgcagaaataagtctgtgccaatctctgtatttcctctctcgtgattccacggatagcatccaacgaacggataaaaaacttatcgtccaatcctgccgtttcaatataaatccatgcatccgacagggagaatggaccttcatatgaacggcataaatcgcccaacatatagttcttcaccatttctagttcctcttgcggcaccggcacattgcaaagtttatccatttcgcgataaacttcggtgataatgggattaatgtattcattcgccgcttcagtactgataattaaaattcccgaatcaggataagatacaatccccgctccaataccgtaagtatatcctttttcttcacggatattggacatcagccgactaccgaagtaacctccaaacaaagtcaccatcactctcgccttcaaaaaatcgggatgatgacgttccatcacaaaacttcccattttgagggagctttgcagagcatcttcacgttcgacaaagaggtgtttctcagaagtagttcggggtacaactgcctgcatcacaggtttatctttcacctctccccatgcctcattacccaaattctcttcaacgctccgaatgatatcgggagtgacttttcccgatatataaactgagcaattacccgaatggtagtacttccggtaaaaatcgtgcaatacttcaggggtgatacgatcgtaatcttcagccaccgcataacgtccgaaaggatgttcggcaccgaacaaggcacgattcaattgtttacgtgcaatcatttccacacgcgtactattgactaaaaactgctgtttattggtatccgcaaccaccgaaagctcctttataggaaaaagtggcgttttcaccatttcagcaatgacagacaaagtgcgggagaaatacttatttaatgagtaaagtgtaataaaaccataattcaccgatgaagaaagttccaaccaagccccataataatccagtttctcggcaatctgcgccgaagtcatgcttcctgccccttcacgtagcatacgattggtgaacatcgcttgtaaaggctgttcctgatgccattgtccaccaccgatcaataggtcaaaacggacaacatcttctgttccggcattaataatattcagcggcataccattcttcatcactctccgttcaggaagtgagatactgaattcacttagctggcggatagccggtggggttgttctgtctaaagtcatgcgttctttgcctcctgctgatttaagaattcttctgcacgtgccaaatcctgaggagtatcgatacctattgtttccacttcactgataccgaccttaattgtataaccattctccaaccaacggagctgttccaacgattcggccaattccagtgaagattgtggaagagcagtaatttccttcagcgcatcagcacgataagcgtagagaccgatatgcttgtaataagtatgtcctgccagccaatcctgctttccggcattacgctgataagggataatagagcgactgaaatacaatgcgttcatattcttgttaactaccaccttgggagaatttacattctccaacgctgcaaagccatcttcgggagtgaaaggtttcactaaagtagcaatttgcgtggaggcatcatcaaaacaagacttgacagcctccagttgcgaatgccggataaaaggttcgtccccctgaatattgacaatgacatcataaccctgtcccaccttggtaaaagcctcataacaacggtcggtgccactcttatggtcgatggaagtcatcacaaccttacctccgaacgcctttacaacagcttctatacgttcatcatctgtagccacataagcctcatccaaaacaccggccacttgttcataaactctttgaatcacaggtttgcctcccaaaagggctaaaggtttagccgggaaacgcgtggaggcgtatcttgcaggaataattccgataaatttcatggttctatttcttttatataatcacgcaaaagtacaaaaacatttcttacttttgcagcataaatgcaataaatgttatgaacgaacaccactgtttgctttgtatgggctctaacacaaaccgtttcacacagctttcggatgcacgaaaagttctgagtgaagccttccccgacattcatttcggcgaacttatggaaacacaagctatcggaagcggattccattctcctttcagcaatcagttggcaagattcaccaccactctgtcatccgagtccgtccacaacctgttcaaggaactggaacgacacagcggacgccttcccggagataaggcacaaggaatagtaaaactggatattgacctgctgacctttgacaacaaggtactgaagccggaagatatgaagagagaatacattcgccgcggaatatctctcctctgatttcacctttcctaccattggcaactcttcttcactcttgctataacatatctaaggttattcaaatttaggcacgttttaaattcataatgaattaatcggaacatttgcttgtttattatcattaatatcagtagcttagcactccattgctaacctgattttaattatctaaaaagaaaagttatgaaattctttattgacacagccaatttggagcaaatccgcgaggcaaacgcattgggcgtattggatggcgtgaccacaaatccatctttaatggctaaagaaggcattaaaggagttgaaaaccaacataagcattacatcgagatatgtaatatcgtggacggggatgtcagtgccgaagtgattgccaccgactatgaagaaatgattcgtgagggcgaagaacttgccgccctcaacccacacatcgtagtaaaggtgccttgtattgaaaacggtatcaaggccatcaagtatttcagcaacaaaggcatccgcaccaactgcacgctggtgttctccgcagggcaggcactgctggctgcaaaggcgggagcgacctatgtgtctccgtttgtgggcagactggatgacatttgtagcgacggtgtggggctggttgcccagattgtcgatttatatcagacgtatgattacacaacacaggtcctggccgcttccatccgcaacactttgcatatattgcaatgtgctgaagtgggcgcagatgtagtaacttgtcctctgtctgctatcaaaggattactgacccatccactgacagatatcggactggaaaagtttcttgccgactatcgaaaagtgaacggatgattttttgattatttcatccatttgtatattcgggcgaccaaacgtcgcccctacaaaatattcctatttgaacttaagataaccgatgcgggtacatttaactcctttgctttcataatgtgacagcactttggccgacttaatatataatgtatccctttgattaatcttcttggtataacaattcaatgtatccggtgtcagactaggtgctgctgcttttataacaaaggaaaaacgattgccgtccgcatctgccgccaacacactttgatccacataatagtcatgagtcttgtagctatccaactgcaatcttacccccagtacctccaagtgcaaatcgaccagcttctctccttttccgcctatgaaacggcttccgccggacaaatgatgttttctaatcacagtatcataatgcaccaccgcaaagtctttggcaatcacagccagcttcttatcgcgaggatttcgggcttcaaatttatgagccagccataacacataattagggtcgacataatacacctcggccaaccgtttgcctctgtatttaccgaaagccacaatatcttcggaagagccgtaataaggctcaaagaaactgttatcttttaccttcagcatgatattacaattctgcaaatacaaaaatgcacgttcggcagcatcatcgaaagtgacagccagagtgcgtacaaacaaaggagaatggctattatcaggaaagatgcgccacaaagcataataagaacggtagggagtagaaacgctaatcgcataatatcctgtgtcttccctgcgtcccttattaaaatggtctattttctgaaagactttctcagccattacattggttatctgatacagagttatatttttatccatcacctcctcctttcatattcaactaaagttttccttttcgtaaatataggaatttatggggactttccaaaaaaaactcgttttttctctttaaaaccaatctttagctatgcgttgcaaagaagaaaataataaaaacacccacatcacctgcagacacaataaaagcccgcagaattatcacatccacacgggctttactttataatttccaaagtcttaaaggcaaaggaagaagttttgtcacttattcaaaaatagcatccaagccggtattgtcttcgctgctcgaagagttatccatcagcgtatccttacaaggatcaaagtcttcgggtatattgaaacgttcttcctgtgaatatcccaaacttttatccttatatactttctgcatatagagtccccataccggcagcgccatggcagccccctgaccgttgaccatcgtgtcaaaatgaatgtcgcggtcttcaccgcccacccatacaccggaaaccagtgaaggcgtaaagcccataaaccaaccgtcggagttattgttggtagtacccgtcttacctcccatatcagcagtaatgccgtacaaacggcgaacgcgtccacccgtaccttcattgataaccgcacgcagcattaccaacatcttatatgcactcgattcactgataacttcatccatctgaggagtaaagttggcaagtacatttccctcgttatcctctatccgagtgacaaacaacggtgcagtgcggattcctctgttggcaaacgcagtgtaggcactgaccatctcgcctaccgatatttcgcaaggaccgagactcaatgacaccaccggatctatttgcttattcaatacaccaaacgaatgaatcaaacgaaccaactgataaggattcaacttactcatcagatatgccgttacccaattatcggaattggccaacccccatttgattgtcaccatttcaccataacgtttcttgttggcattgcgcggagtccagggacgtccgttttcatctattaacgtttgttccacatggcgcacctcgtcacaaggagaaaaaccattttccatcgccagcgtatatagataaggtttgatggtagaccccacctggcggcgtcctgtcatagccatatcatactgaaaataattataattaggtcctcccacgtatgcttttacatatccggttgtgggatccatcgacatgaatccggcacgcagaaaatgcttgtaatacctgatagagtccatcggtgtcataatagtatctttctctccctcgtatgagaatacagacatctcatacttcgtatcaaacgccttacggatttcagcttccgaatatccggcttctttcataatacgataacggtcggtttgcttcatggctctggtcatgatagtatttacctcttcctgagtcagattcctagtgaacggagctgttttcttcttcgacttttctttgaagaaacgcggttgcagatatttagctacgtgctcactcacagcttcttcggcatagcgctgcatacgtgagtcgagtgtggtgtaaatcttcagtccgtctgtatatatattatagttcgtaccatctttcttcttattcttggcacaccaaccaaacagcggattatttttccacgccaaagaatcttcataatatttctgcatctgccagccgcgatattcactcttcttcggctccttggctgtcattacgccacgcagatattcacggaagtaagttgccaaaccttccttgtggtccacacgacgatacttcaacaccaacggtaacttcttcagcgaatccgcctcagcatcacttagataaccggtttttcgcatctgatcaagcaccacattacgacgcccacgggaacgctcgttaaaacgtttcgggttatatagcgaaggattcttgcacatacccaccagcgttgccgcctcttccgttttcaggtctttcggttccttagagaaataagtgtttgctgccgtcttgattcccacagcattattaaggaaatcaaacttattgagatacatggtcaggatttcttccttggtgtaataacgctccagttgcacagcaattacccactcgataggtttctgcaacagacgttccatcacattgtctgctgtaggagaatagaactgcttggccagctgctgcgtgatggtactaccacctcccgcatttttctgcatcaaaataccgcgtttcaccaatgcgcggataaacgcacgtgcatcaattcctgagtgttctgaaaaacgttcatcctcggtagcaatcaaggcatgaatcaagttaggtgacaactggtcgtatcccacaaaaacacggttttccttactgattgaccaagtgcccagcattttgccatcatcggatataatctcggttgcaaacttcaagttcggattctccaactcctcgataggaggaacataaccaatccaccccttggctatcgcggtaaaaatgaaggctatagctaatattacacaggctaccaacgcccaaagtacataaataaacttcttcctcatgtctgtttctagtaattatcactgcaaaagtaaggaaaaactttgagatagaaggcgtttctaacaaagttcaactaaatatctttagaagcttcgtcattttatttttttttcatacctttacgctccgtataattgtaattataaatacaaataggtatggaaaatagaagtttagtcactattgccgaacactccaaagagaaaattctctatttgttggaaatggcaaaagagtttgagaagaaacctaaccgtaaattattggacaacaaggtggtagccactctttttttcgagccatccacccgaacgcgactcagttttgaaacagcagccaaccgcttgggagcacgggttatcggattcaccgaccccaaagttaccagttcttcaaaaggcgaaacattaaaagacacaattatgatggtgagcaactatgccgacattatcgtaatgagacattatctggaaggagctgcgcgctatgccagcgaagttgccccggtgcctattgtaaatgcaggagacggagccaaccagcatccttcacaaaccatgctagacctctattccatatacaaaacacaaggcactctcgaaaatctgaatatctatttggtaggcgacctgaaatacggacgaaccgttcactccctgttgatggccatgcgccatttcaacccgacttttcactttatcgctcccgaagagctgaaaatgcccgaggagtataagctatattgccgcgaacacggtattaaatataaggaatatacagacttcaacgaagatactattgccgaagccgacattctgtatatgacacgtgtgcaacgcgaacgcttcaccgatttgatggagtatgaacgcgtgaaagacgtatatatattaaggaatgaaatgttgagacacacccgccccaacctgcgcattcttcacccgctgccccgcgtaaacgaaatcgcatacgatgtggacgaaaatccaaaagcatactatttccagcaggcacaaaacggactgtatgcacgccaggccatcctttgcgatgtattgggcattacactggatgatgtaattgaagatggtaataagtaaaaacgaaaagactatgagcgaaaagaacaaacaagaattacaagtcgccgctttaaagaacggaactgttatagaccatataccttccgacaaactgtttactgtagttgcattgctcggattacagaattctgactcaaacattactatcggaaacaacttcgagagcaagaaattgggtaagaaaggtatcatcaaggtagccgaccgtttctttacggatgaagagatcagccgcctgtcggtagttgcccccaacgtgaaactaaatattatccgtgactatgaagtagtggaaaagaaacaggtactgatgcccgaagagttacgcggcatcgtgaaatgcgccaaccccaaatgtatcaccaataatgaaccgatggcaaccctgtttcacgtcatcgacaaggaacacggtattttgaaatgccactattgcgaaaaagaacaaagcaaagaagcaattaagttattatgaaacaagactggaaaccgggaaccatgatttatccgctgccggctgttctggtgagttgcggaagtacggaagaagaatataatatcatcacagtggcgtgggcaggtacaatatgtaccaacccacccatgtgttatatatccgtacgccccgaacgtcactcttatcccattctgaaacgcaatatggagtttgtcatcaacctcactaccagggatatggcttttgctaccgattggtgcggtgtgcgctccggaagagattataataagtttcaagaaatgaaactaacccccggaaaggcaaaaatggtaagtgcacccatcattgaagaatctccactatgtatcgagtgccgtgtgaaggaaatcatttcactgggttcacacgatatgttcattgccgatgtagtgaacgtaaaagcggatgacaaatatctgaataaagaaacaggaaagttcgaactggccgggagcaacccattggtatatgtacacggcggatattttgatttgggtaccaagatcggtaaatttggctggtcagtagaaaaaaagaaaaaagaatagatgaagaaaaatttcctgctcatatcggcattgtttctttccacgtctgtcctgaaagcagaagaacagaagcagagctcccaaacagagcctaaagtcaacataggcctgaaagcaggatttaactcctccatgtatttcaccagccgcctgcaactggacgggcaacgttttgaagacatacaaaacaactacaaggtaggctattttgccgccttgtttttccgtttcaacatgaaacgccatttcatccaacccgagtttacttataacgtaaacaaaggagatatcactttcgacaaaaatcaaaacaacgaaactctcccacccgattttgccactatccgttccaccatccattcattggaaatccccctgctgtatggatacagcttcgtcaaaagtcatccatacggcatggcattcttcatcggtcccaaactggaatatatctggaagagaaagacgaaagaagaattctccaactttgggcatgacaatattcaagaagagttacaccccatcaatgtgagcagtgtcatcggtttaggcgtaaatatctcgaatattttttttgatttccgctacgaaatagggctgaccaacatatcaaaagaaatcatttacgaaaagaacatcaacggagaaatatcccacgaaaaaggcattgttatcaaccgtcataaaaacgtactcagcttctcattgggagttattttttaaattatcacagtagcgaaagattttcccgaatttatttccttctaacctaaaatttcttaactttgtgaactctaaatcgaatatcgtacataaacttattataaaaagaaatgaaaagagacgatttgattttcgatatcatcgaaaaagagcatcaacgccagctcaaaggtatcgagctgattgcatccgaaaactttgtcagtgaccaagtaatgcaagccatggggtcttgccttaccaacaagtatgccgaaggttatccgggcaaacgctattatggtggttgcgaagtggtagaccaaagcgaacaaatcgcaatcgacagactaaaacaaatctttggtgcggaatgggccaatgttcagcctcactctggtgcacaagccaatgccgctgttttcttggcggtcttgaatccgggcgataaattcatgggattgaatctggctcacggtggtcatctgtcacatggttctttggtaaatacatcggggatcatctacactccgtgcgaatacaatctgaacaaagaaacaggacgtgtagactacgatcagatggaagaagtggcattacgtgaaaagccgaaaatgattatcggcggcggctctgcatactctcgcgaatgggactacaaacgtatgcgtgaaatagccgataaagtgggtgccatcttgatgattgatatggctcatccggccggactcattgccgcaggtctgctagacaatcctgtaaaatatgctcacatcgttacctccaccactcataaaacacttcgcgggcctcgtggcggtgtcatcatgatgggcaaagacttccctaacccatggggtaagaaaactccgaaaggtgaaatcaagatgatgtcgcaactattggactctgccgtattcccgggcatccagggcggaccgttggaacacgttatcgctgccaaagctgttgccttcggtgaatgtttacaacctgaatataaagaatatcaaaaacaagtacagaagaatgccaaagtattggcacaggctttgatagatcgtggctttaccattgtatccggtggcaccgacaatcactccatgctggtagatttacgcactaaatatcctgatttgacaggtaaagtggctgaaaaagcattggtttctgccgatatcacagtaaacaaaaatatggtgccgttcgacagccgttcagcattccagacttcgggtatccgcctgggtactcctgccattacaactcgcggtgcaaaagaagatttgatgattgaaattgccgaaatgattgaaaccgttctttctaatgtggataatgaggaagtaattgcacagattcgcgcccgcgtgaatgaaacaatgaagaaatatcctatttttgcttattaaaaacagaaaacacttacatttaccatcaaagaaatggggattgtgtctaaacattgagatagaccggttagttttgacgcaccccatttcttgaactataaaagaaaaacaaaagcacgtttcacacgtatcaagggattaagacactgtttcacaatcaattgcagtgaaacatagaataatgtattaaactgatgatacttcatacaacaacctcccccccaaaaaagaccaaggtcttttttcaaaactctttcggctttcaagaaaacaccaaggtcttttaaaaaaacatcaaggcctttatgcaaaacacttccggcttttttgaaaaagcctaaatgttttccatctctactggaaatcctcctttatttttatacctttgcacacattttacattaacgactgatgaaaggaacaaagaatctaactcaaggtcccattctacgccagctttttactttagcaatgcccattatggctacttcttttatccaaatggcatatagcctgacagatatggcatgggtaggaagattgggaagtgaagccattgccgctgtgggttccgtagggattctcacatggatgtccaccgccattgccttgctcaataaagtaggtgccgaagtaaatgtggggcaagcaatcggtgctcaagacgaacaagccgcacgtaattttgcttccaataatattactttagcactgttgatttccgtactttggggtgccatactatttatctttgcacgccctatcatcagcatctacgaattgcaaccacacatcgaagacatggcagtggaatatctgcgcatcatatctacagcattgccgttcgtattcctgtccactgcttttaccggaacattcaatgcagcaggaaggagtaagattcctttctcaatcaacggtattggtctgataactaacatcatactagaccctctcctcatctttggtttaggatggggaactaccggtgccgctatcgccacctggctggcagaagccatcgtatgctttctttttgtctatcaattaaagaagaaaaagattctgtgggacaactttattttctttacacaccttaaaaaacaatacgccgtacgcattatcaagataggactccctgtagcaacattcaacaccctatttgcattcgtcaatatgtttctcggacgaaccgcctccgaacagggtgggcatctagggctgatggctctcaccacaggcggacagattgaagccataacctggaatacctcacaaggttttgccactgcactcagcgcttttgtagctcaaaactacgcagcacgccaagtagcccgtgtactgaaggcctaccacaccaccttgtggatgacttttatcttcggcaccttctgtaccttcatttttatatgctatggtaatgaaatattttctatctttgtacctgagaaagcagcttacgaaaccggcggtgtatttttacgcattgacggatactcccaaatatttatgatgcttgaaatcaccatccaaggagtattctacggaatcggacgtacaatgccgcctgctgtgataagtgtcagctgcaattatctgcgcatcccgatggcactcctgtttgtctcatggggatggggattgccgggcatttggtggagcgtaaccattaccagcacaatgaaagggattatctgcctgatatggtttatggctatcaagaaaaaggcattaagttatcaggctgattgatgaacaatttttgcattaagtcattatataattaaaaacaaatgagattatgaaaaagactaaatttattgcttttttgctgagtgcgacattagtattcagtggatgtggtaacatgaataatacaactaaaggcggactaatcggcggcggtggcggtgctgccttgggtgctattatcggaggtattgccggacacggcaaaggtgctgctatcggtgctgccgttggtgctgccgttggtacgggtgccggtgttttgattggcaagaaaatggataaggcagctgccgaagctgctcagattcaaggtgctcaggtagagcaagtaactgataacaacggacttcaggctgtaaaagttactttcgactcgggcattctcttcaacaccggaaatgcttccctaagtcctcaagccaaatcagcattgagcaaattcgccaacaatgtattgaatcagaacagaggcatggacgtatccatatatggttacaccgacaatcaaggttggagaaacagcactgccgaacaaagcatccaaaagaacctcaacttgtctcaagaacgtgcacaaagcgtagcaagttatctgttgagttgcggtgccagcacttctcaaatcaaatcagttgaaggtttgggccaagccgaccctatagcaaacaatgatactgccgaaggacgtcaacagaatcgtcgcgtggaagtatatatgtatgccagccaacaaatgattcagcaggctgaagccggtacattaaaataaattatgtgataaaatcacgctttcaactacctctgtgagtagattgaaagcgtgattttacttttttcgctacgcaaacatgaagaaaaaaaagattcttaagtttatccgcaatctattgattatattctttggctcatctattctgtcagtcatagctttgcgttttatccccgtttattttactcccctgatgttcatcagaaccgcacaacagataattcatggcgaagacatcaaatggaaacacacctgggtgtcgaaagagaagatttcccgccatctgcccatggctgtcatagcttcggaagacaaccggtttgccgaacataatggattcgactttaaagaaatagaaaaagccatggaggaaaacaagaccagaaaacgtcctcgcggcgcaagcactatcagccaacaaactgccaagaacgtgtttttatggccggcctcctcttggctgagaaaagggctggaagtgtatttcacgactctcatagaattatgttggagtaaagaaaggattatggaagtttatctcaattccatcgaaatgggaaagggaatctatggagcagaagccgttgccaaggagcattttcataaaaaggcaggtcaattgactccgggtgaatgtgccctgatagcagccagcctgcccaatccccgcaagtttaattcgggcaagccaagcaactatatgtttaaaagacaaaagaaaattctttatctaatgaaatgtgttcccgctttccccccaaaagaaaagaagaaggcggaaaacacttagccctgccttacaatacggatatgattcgaaccccggtatgagtccttttattctttgaatagtcatacattggctgagggtccagaattaccttctttgccacagaggaagcatgcagcaaatgaagggtatctcccacccaacagacaaaaccgacgtgtaccacatcaagtccggtaatattcgttgtgattgccaatatatcaccatccttaatattcaacttataaggaggatagctcagttggtctttcggaaagtaagtaaccacactcccattcaacgcctgttcctgccgcactatttcagctactaaagagggattatctttcagctgcctataactgtcgggatgggtagacatgaagttgagatgcaactcctgttgcagggtgctgaattcgtctgtccgctcctttacgatacccttccgctcattatcctttatccactcgctgaaataatgcagacgtgatggatagccattcaatactccgcccctataacgaatatgttgcaacgcttttttaaaactgccaaagttcctttccttgtccttatctgctaaagccaaagctaaaaccgtctcaacaaaagtcgtacaatccaccttgtccaaatgaactacaaggttttcctctttgccttcatccaaggttcccgccacgtaaggcacgcccagcatctgtcgggcaaaaaacattgttctgctgctatcgccgggcaatgccgacgctttctgcaataaagcctccacttttatactgtctttctcttgagctgccgcaggaagcatcagcattcctgtcaaaaagaataataaagccgttcgtttcatcctgttggttttctgaaggagtaaagatagtaattaaataaatgataataaaaaaacaggcgcctgttttttagaaaaacaaacgcccgtcccttgttgctatattataaatcaagcgaaaaactccgttcgttccaagtaagcaatgacatcacctttgttgacaaccgcaccctgtgcagcacatacttccactactcttccggtgaaattggccattatcttttcgtattctccccatggagtggaaatataacagaacacttcgtcatgctggtatttacgaccgataaaaggagctgtcgacggaccttccaccgatacttcccacaatacctgtcctttttcgggcgcaataatcgggtcggccttggcgcgcttatactttttgatttcttcttcattaaaaccactctttgccattgccgcatctttggcacgctgcaggtcatccaagaaacgcttcttggcaactcctgatttataatcacgatattggcggtcgtgcatggccaattcaaagagctcttcatcatcttctccatagtcccaaccattttcatccatttctttgcgatagttgtccaactcatcgggatagttcttctgtgggtcttcatccgtaaattccaaccctttgctctttgccaactctataatttcgggagctaactcaccgggcagcttaccactctttcctaatatcatatcccaagtatgattgtctatcatggtccagcgtccctcaccctttatcaactgcattacgttcatcagcgccacattctttacatattggctaaatggagttaccaacggaggatagcctaatttcggccatacatattccacttcctcaaacagcatcaccaccaagtcatccagactcatcggctccttgccctgtcctttcaatatcaagttgatgcccgaatgaacacccttcaagtcagccatcatggaccccatcattccgcccggcagtccgcaaccgagcaacaacgaagacatgtgtttgttggtagggtcgataaaataacccaagaaatcatctataaactcttgcgtcatgctgcgcgctttcatataagccttcatattgatttcgggcacccggaaaccggcattcttcagcatggcctgaacggagatgacatcgggatgcacctttccccatgacaagggttccattgcaacatcaataatatcggcaccgttttcacaaacctccaaaatagacgccatcgataagcccggccccgtatgtccatgatattggacaatcacttcgggatgtttttccttgatatttttcaccagttgccccaacatttcgggacgtccaatacctgccatatctttcaggcagatttcgggagcccctgcctctatcaattgatctgctatgcgggaatagtactctacggtgtgaaccggagaataagtaatacacaaggtagcctgcggaatcattccggcttccttggcatattttatagaaggaataatattgcgcacttcattcagaccgcaaaaaatacgagtgatatcaactccctgtgcatgtttcaccttatacatcaaccgtcgcacatcagcgggaacgggatacattctcaatgcattcaaaccacgatcgagcatatgagtctgaatacctgcttcatgcaatggtttggtaaacgtacggactgctttattcgggttctccccataaagtaagttcacttgttcaaaagcacctccattggtctccacgcgggcaaaacagcccatctcaatgataagaggagctatccgtgccaactgatctgctctgggttgatactttcctgatgactgccacatatcgcggtagaccaaactgaatttgatttcttttttcataattatatttcgatttaaaggtgtttcgtccttctgcaaatataacaaatgaataaaaagaaagttaatattcaagtagattttttatcctctaaaaacatgtttaatatcatattgccagctatataaaacagaataggccgaacttatccgacctattctttctttttgttattttcagacgctaattacacaaaatcacgtagctgtccctgcaagcgttgacgagtaaaaaagatacgactttttactgttccaagcggcaaagataatttttcggctatctcacgatatttaaagcctgacacatgcatggcaaagggaatacggtattcattcggcaagagatttactacccggtgtatttccttaatgtcataagcaccttctgtactgtcaaaaccggaatcctgtggcaagttcaagtggtataagttatcggtgtggtcgacaaatgtttggtcacgtacaatttttctgtaattattaataaagatgttacgcatgattgtgtacatccatcccttaaagtttgtatcgggaatatacttatcctcattgtctaaggctttcagcgacgtctcctgcaataggtcgttagcttcctcacggtcggctgtcagtttataggcaaatcgaagtaattcttcttgcacactaagcaggtttttcttaaaactaatactattcataagtttttaagtttaggtttataactctttgttcatgctctcgtgctgcaaggataaggcttttttaaggggcggacaaggaaaaactatcaaaatagggggtaaaaaccgccaattatcagtttctaccccctatcttgtcgattaacaggtggttttcggagctattctccttttaaagttggtaaacaaatactatatttaacagccaaaatacgagtgaaaaacaccgttactcctcctactacctggcatccgtaagcctccattccggcaaagtcgcatatccagtaagccagtccgcccacgacacacgccattgcataaatttccttacgaaagattaacggaatctcattaataaacacatcgcggattacacctccggcagcacccgtaatactacccatgataatggctacccaataaggataccccaatgcaatgctcttgcccacacctacaacggtaaacaaagccagaccgatgctgtcaaacaagaagaatgtattgtgcatgtgaatcagatactttccaaaagcaatcacccagaacaatgcaagccccgtacatatcaaataaatggggtcggtcatccatcccggcgtcacatccaacaatacatcgcgaattgtacctccgccgatagccgttgccattcctactacataagccccgaaccagtcaaattgtttagccgaagcaagccggatgccactaatggcaaaggcaaacgttcctataaaatccaaaacttgtacaaatgttatcataaataaacttatttggctgcaaagtaacgaataatttcgataagaaaacgtatttttgtcttttgaaaatagctaaaatgaaatgaaaataacaattatcgcaggcgcacgccccaatttcatgaaaattgctcccttaatgcgtgctattaacgctgccaaagcagcaggtaagaacatcagtgcccgtctggtatatacaggttcggacgaagacaagagcctggagccctctttgttcaccgacctcgacatgccccgtcccgatgcatatttaagagtggatgatactgatttcttccaacgaatggcaggcattgtcgttgcctttgcccgtgagctggagaagcatcctgcacaaattgtcattgtggtagacgacctcactcccactatggcctgttctatcgtagctaaaaagaaagggctgaaagttgctcatttggtagccggaacacgctctttcgacatggatatgccgaaagaagtcaaccgtatgattaccgacggactttcggatatcctatttactgccggaatggtggcaaaccgaaacttaaaccatacgggaacagaacaggctcatgttcattttgttggaaatatcttaatcgacactttgcgatacaaccgcacaagactacaacgccctgtggctttctctattatgggagtgaaggaaaaagaatacgtactgcttactttaaaccgacatacattaattaataacgatgctgttctgaaaacccttttccatacaatattggaaaagacagataaaccgattgtcgctcctttacataattatgtaaaaaacaagctgagtgccctgggcattcattccgagcgactgcatattcttcctccccaaccctatctggctttcggatatatggtaaatcaggcgcagaccattatcacagactcgggcaatgtggctgaagaagctaccttcctcggtattccctgcatcacactgaacacttatgccgagcatcctgaaaccgtaagtatcggtacgaattgtttggtgggcgaagatgccggagctttgtctgcggcacttgacaggctgaataaaggcgaatggcagaaaggacatctgccggaacgctgggacggtcgtgctgccgaaagaattgtgcaaaccttgctcgaagagaaattataaagagaaaaggaataaccatcacttttaatcggcccggcgcagtgctattggtcattccgaaacaaaaaagaagaatctgctgacacaaagtaatgtgcgcagattcttcacaatatccaaaatgacaaaagatacaataccgtatttaccaagtatagttcaaaccgaaactcagcaattcctgcaactggaaatagctcttattatcctccgtcaacttcacgccatcatcatagcgggcatgaacgaataatttcgtcgacaaataacggttcaacacgaagttgaatgtgttttcccaactggcaattactttatcataagtagtaaagtattccaatttagactcccatacgatactcgggataattgtccaagtgaggtttcccgtaaatttagaaccgataaggttggcagtgctgtgccccggctccacattaaaagcagcaggatcggtaattttatcattactgatatacataaaggtatatgccagcggagatgtcagcaaagacaaagtataattcttcttgttttgcttaaagtccataccgagggttatatcaagctgtgccggagacatgaaattagaaatcatgtcgttcgtattggttttgtagttagcaaagaactgggtcttgaactcggcagccaatgtataataccaattcttgaatgctttcacaccgagcttactgttcaaacggaacaaatcggcgtttgtcttatatttatgaaccgtatcagaaggggcagtgacgaatcccaacttcatctccagcttattttcaaattccagccgctgacggtcatcaaaattagcttcaagcactaagcccgaaagcaaagagttagtactttcaccacctttataccaattgtccgaaatataatgctgtgtaaactgagcatatccgtttcctttatatttccagaagttgggacgaacaatcaccaaatcactttccgtatccacactctccaccggattttccggttgtaagaagctcttaatatgctctttacgtggattcattacaatctggctgtcttccaaaggcttcaagtctgccagataaagctcattacccaacactctctcaggatactgcatataataattaagaagaattttattcacccaacggtctaccttggccgaccgttccaaatcaggcacagtaaacaaccgaatagaatcctgtttggcacgataaaccgaatctgccgccgtgtgtttagtattatattcttcgggcgaccacttcaattcgaaagcctgctctaccggtgcggtataataagtaggcggaacaaacaatttataataagccgggtcacggcggacacgcggagccggagcatccaagtcatcccacattctaaaataagcataataagctgctctcaaattagccaaagaatcggcaaatgccgctaccgcaggacttgccttcgcttttgttatcttctgcgccggtgctacagagcaaaacaaagccaaaatcaagggtaaagccagttttcttttcatattctttatcgtttttgcgtaaaaaggcacttaaatggtgcaaaagtacacttaattttccttatatcaaaagacaaaagtacttttaaaaaccatatcaatgactttttaaaaccggatgaagtttttaaaaagcgctgccggttactttttaaacgttctattacgtttttttgttgtgcaaccgggaaattcagaaaaagattttgtaattttgcaacttcgataattcaagagaataacatttaaaaatattaagtagtgggagaaactaagtatatcttcgtaactggtggtgttgcctcttcattgggcaaaggtattatttcatcatcaataggtaaattgctgcaagcaagaggctacaatgttaccattcaaaagtttgatccgtatatcaacatcgacccgggaactctgaatccatacgagcacggtgaatgttatgtaaccgtagacggccacgaagccgatcttgacctgggacactatgaacgcttcttgggaatccagacaaccaaagccaacaacattacaaccggtcgcatctacaagagcgttatcgacaaggaacgccgtggcgactatctgggaaagaccattcaggttattccccatatcactgacgaaattaagcgcaacgtaaaattattaggcactaaaaataaatttgacttcgtaatcaccgaaatcggaggtacggtaggtgatatcgaatccttgccttacctggaaagtatccgtcagttaaaatgggaaatgggacgtaacgctttatgcgtacacctcacatacgtaccttatctagctgctgccggtgagctgaaaacaaaaccgacacagcactctgtaaaagaattgcaatccgtaggtatccaaccggatattttggtacttcgcacagaacacgaattgagcactaacctgaaaaagaaagtcgctctattctgcaatgtagacgagaatgcagtggtgcaatccatggatatgcctactatttatgaggttccggtgcgcatgcaggaacaaggactggacgttaccatcctacagaaaatgggcttacccgtaggcgagactcctaccctcggcccgtggagggatttcctcgaccgtcgtcacaaagctactgaaaaagttaaaataggcttagtgggaaaatatgatttgcaggatgcttataaatccatccttgaagcattgtcacaggcagcaacatacaacgaccgcaaggccgacatccacttcatcaacagtgagaagctgacaaatgaaaatgtggaagagcaaatcaaagacatggacggtatcattatctgcccgggcttcggacagcgtggtatcgaaggtaagtttatagctatcaaatacgctcgtacacacaatgttcctacattcggtatctgcctgggtatgcagtgcattgccatcgaatttgcccgcaatgtactgggatatgccgatgccaacagccgcgagatggatgaaaagactccgcacaacgttatcgatatcatggaagagcagaaggctatcaccaacatgggaggtacgatgcgtctgggagcttacgaatgtgtgctcgaccagaattccaaaactttcgaagcctataagagcgaacacattcaggagcgtcaccgccatcgctatgaattcaacaatgactacaagcaggaatttgagaaagcgggcatgaagtgtgtcggtatcaatcccgaatcagacttggtggaaatcgttgagattcctaccctgaaatggtttatcggagtgcagttccaccccgaatacagcagtactgtactgaaaccgcatcctttgttcctgtcatttatcaaggcagccattaataaaggataaaacgagaattataatataaataaggtaaacaagaaaaaatggacaaaaacactttagtgggattcgccctgattggtgcagttgtgataggcttcagcatctacaaccgtcccagccaggaagaaatggcacgtgcaaaacactaccaggattccattcaggctatcgcccaaaaagaagctgccatgcaagaacaggcagcacagcagagtgcggcctatacaatacaggcagactctacctcactgttctatggcgcgagccagggaacggagcagttgacaacactggaaaacgatttggtgaaaatcacatttaccaataaaggcggacgcgtatgcgccgccacgctaaaaaattataacggtcaggacggtaagcctttggagctgtttgacgaaaaagactcgggcatgaacttcgctttcgaaggaaagaacgaaaacattttgaccgaagacctttacttccgaccaaccaatgtgaccgacagtacagtgacgatgcggctggccaccaacggtgcaggctatatcgatttcgactacaagctgctacccaatacctatgtggtgaacttctccatccgcgccaacggaatgcagaatttcttcccagcagcagccaacactgtcaacatcaactggcatcagcgtgcacgccaattagaaaaagggttcagctttgagcaacgttatacttcgctcacctacaagccggtggacaaaggctcggactacctgaacgaaatgaaagatgccaaagaagaagtgaccgaccgcttagactggattgctttcaaaaaccagttcttctcaagcgtactgattgccgatcaggacttcgacaaggcttcactagtctctactcccctaaaagagggaagcggatatatgaagaactataccgcagacatgaccacattctttgaccccacgggaaaacaggctaccaatatgcagttctatttcggtcccaaccatttcaagacactgctggcaagcaatgacttgagcctttcgcaaaaagacctggaactggaagatctggtatatttgggctggccgattatccgatggattaaccgctggtttaccatccccttgttcgactggctgtccggttggggactgagcatgggtatagtgctactgttaatgaccattatcgtaaaagcattggtgtatccggctacccataagtcatatatgtcatctgccaagatgcgcgtattaaagccatatatcaatgaaatcaatgccaaatatcccaaaaaggaagatgcgctgaagaaacaacaggaaaccatggcactttacagcaagtatggtgtcagtccgatgggtggctgtctgccgatgctgattcagatgccggtattcatggcgttgttcttcttcgtgccaaacgccattgaactgcgccagcagagtttcttatgggctcccgacatgtctacctacgatgacatcattcattggagcaccactattcctttgctgggcaatcacttgagtctgttctgtttgctgttcagcattactaacatcctgaacacaatgtacaccatgaagcaacaagacaccggccagcagcaaatgccgggtatgaaactgatgatgtatatcatgcctgtgatgtttatctttattttcaacggctactcttccggtctgaactattattacttcatctccggtttgataggtatcctgactatggtcttcctgcgcaagacaactgatgagaagaaacttcttgcacaattggaagccaacaaggaaaagaagaaacagaaaaacggcggtaaagccggcggtggtctgatggccaagctcgaagcattgcagaaagagcaagaacgcctgcaacaggaaagaatgaacaaaggaaaaaaataagactccgcaatattctatttttttaaataaataattatcaagggggacgaccatttctcaaagagatttggccgtccccctttttctttttgatacaccaacccgataaggtgcctatgcactagttgaaatcccccaccacaccgtctcatactcttttacctccccttgcaaagcctccctcatgccatcacaaaccgcgaagcttactgatagacaaccggattatcgccactaatctataaatcacaagcactaatccacaaatcaacggcatcaacctgtaaatcaatgataaaaattaggatatacatcaggcatatagtaactttgtatatagtatccaaagacattggatactattaatatcaactttatacagacaattatggctgaatacatcaaacaggaaatgagtgacctggacggctcaggcgaacagcgggtattttatcgcatgaaaacctatcacaacatcaatgcccgggaatttgtcagcaagttggcacgtccggggtcaggactgagcgaaggaaatgtactgcatgtacttaccactcttgccgatgaactggcttactatatggcacagggatacagcgtgagcatagacggtgtgggaacattcaaacccactttgggaatagccgaaggcaaagaaacagacacattggacggtgacgaacaaaaacgaaacgcgcgaagcattatggtgaatggagtaaacttccgcgccagcaaagatttgataaaggaaaccgcccggcattgtgaattgaagcgtgccggggtaagccgcatccaccattcgccctactcgccggaagagcgtatcacactcgccttgaaatatctggacgaaaatcacttcatgcgcgtggcggactatatgaagctgaccggactgcgcaagacaagcgccactctcgagctgaaacgattgagagaagaccccgccaacggcatcacaacggaaggaaaaagaaacggaatgatttatgtgaagcgaaataataaatagccatacaaacgcacaaaatacaccaacagcctgctctaaagcaaacaaagaaaacaacaaatatgcaagaacatttcacttcaccggcttttatgtgtatttttgcaatcatttaatcatcaaaaaacagcttttaagtatgaataaatcaagcgcaaccatcatggcagcggcacttatgctggcttcttcctgcaccgatataaaacaggaaggacagggctacgagcccattatcggcaaacaagaaattaccatcaaagacggtcgcctcactcccgaagcactatgggcaatgggacgtataggtagcctgagtgtatcacccgacggcaagaagatagcctatactgtagcatattacagtgttcctgaaaacaaaagccaccgtgtgatttatgtaatggatgccgatggacaaaacaacaccctgcttacccgaacatcttggaacgaaggagagccccaatggataaaagggggaaccaagattgcatttctgtgcaatgaaagtggcggcagccaaatttgggaaatgaatcctgacggctcggaacgccgcatcatctccgactttaaaggagacatagaaggattctctttctcaccggatggcaaaaaaattcttttcatctcgcaagtgaaatatggtcagcgcaccgcagacctctatcctgacctgcccaaagccagcggtatcattgttaacgacctgatgtacaagcattgggatgaatgggtggaaacgattccgcatccctttgtagccgactttgacggcaacatgatgggaacggccaccgacattatggaaggcgagccgtttgaggctccgatgaaaccattcggcggcatcgagcaactggcatggagcagcgactctaaacaaatagcctataccagccgtaagaaacaaggactggcttatgccgtctctaccgattcggatatctacctttatgatttggaaagcaaaaaaaccgagaatttatgcaaggactatactgaaagcagcatacctgctaccatgaccaatgcaatggacggtgctaccccacaagcagtccaactgactgtaaaggacgagaacaaaggttatgacatcaatcccaaattctcacccgacggcaagtacatcgcatggcaaagcatggagcgcgacggatatgaaagtgaccgaaaccgcctttgtgtgatggatttgggcagcaaaaagaagacttatattaccgagagtttcgaatcgggtgtagacgactattgctggaacaataattcccaaagcctgtactttgtcggtgtatggcatggtaccagcatgatatacagtacaaacctgaacggcgaagtgaagaaactgaccgacggtatgtacgattacggttcggtggcgatggcaggcgataaggtgattaccaaacgtcattccatcagtgcagccgatgaaatctataccctcactcctgccgacggacggttggctcagatttcacatgagaatgaccacatcttcaatcagctgaaattgggtaaagtggaagaaagatggaccaagaccaccgatggcaagcaaatgctttcatgggtaatctatcctaccaactttgacccgaacaagaagtaccccaccttgctattctgcgaaggcggtccgcaaagccctgtcagccagttctggagctatcgttggaacttccagataatggcagccaacgattatatcatcattgcccccaaccgtcgcggtctgcccggattcggtatggaatggttggaacaaatcagtggcgattacggaggccaatgtatgaaagactacctgtcggccatcgatgatatctcgaaagaaccttatgtggacacagaccgtctgggatgtgtgggcgccagcttcggaggatactcagtctattggctggcaggtcaccatgacaagcgctttaaagcgttcatcgcacacgatggtatctttaacatagaacagcaatatctggaaacagaagaaatgtggttcgccaactgggatatgggtggcgcatactgggacaaggataatgcaacggcacaacgcacgttcgccaactcaccccaccgttttgttgataaatgggatactcccatcctgtgtatccacggtgaaaaggactaccgcatcttagcctcacaaggtatgtctgcctttaatgcggcagtgcttcgcggagttcctgccgagctattgctctacccggacgaaaaccactgggtattgaaaccccagaacggagtgttgtggcaacgtacattctttagctggctggataagtggttgaagaaatagtttgctcccggcgtatccggggggcatgttcaaacggttgctaatgctatcatttagctctgccaccctgaatgaaatgaagaatctgataacatttactttgtgttatcagattcttcactgcgttcaggatgataaataataggcatgaaacactttctgcctttcgcctgtattatatcatatattatatttcaggttatgaccggtcttatcgggctgcctccggtgctttattctccggcttttcgataccttctccggtcgctctttcctccatacgcttgatgcgggcatcaagatcaggatgagtagagaataactgattcagcttgctgcttttctgtgcaccggcttcttcctgcaactgtttcaacttttggaaagacaaagccatcgcccacggatttttccctgctttcttcaggaactcataaccataatcatcagcctcacgctcctgtttttgtgaataagtggcattaaccaatgcttcgcccaaatcacccaactgagattctgtaagtgcagcagccttaccaccttgcgaagaaatgccgtctttcagagctgaagtcagcaacgcagtacggaaaccgttcttggaatctttgtgagccacgtgccctacttcgtgaccgattacacccaacaactcttcatcactcatgatgtccatcagagaagaaaaaatacggacactgccatctgcacatgcaaacgcattcacatcaatcacatagtataccttgaaattcaaaggaatgccttccacttcattcaagccttcggtcagctttttcaaacggactgtgtatggatcatcatcggcacatacctgattgtgcttgtccatccagtcaatatattcttttacatattctctcatctgctcatcggtcagcgtaactgcctttgcagctttcacagcgccacctacggcttttttcaaattgaactgtgccattgcaggtacagagcaggtcatacacaacagtacaactgccagtttcatcaaagtctttttcattttcatgtgagttgttaatggttcttaattctatttctaaatattaggcaaaagaacgaaattatcgtttatccgccaatcttttcattgatattttaaacgaaaagccaccgcaaactcagtctgcgatggcttttaccccttttttatacacacctttaaacaaaatgacaggccaacttacttttgacgcacctgttatttattagtacgagcttcagcgatgtatcctaaagcttctttacattttgcagtcacataagcccaatcttccgcttccactttgtctttcgggaaaagcttagagcccatacctacgcagaaaacacctgccttaatccatgaagtaagattttcctgagtaggttctaccccaccggtcaccatcagtttagaccaaggcatcggtgccagcagaccttttaccaacttcggaccaagtacatcaccggggaacagtttgcaaaggtcgcagcctgcttcttgtgcaaaccccacttcagacacgcttccacatcccggagtataaaccaccagacgacggttgcaaatcttggctatctcaggattaaacaacggaccgacaacgaaatttgcccctaactgaagatacagtgctgccgtagcagaatcgactaccgagccgacccccattgccatttcgggacactccttagctgcatatttcactacctcggcaaatacttcgtgagcaaaatcaccgcgattagtgaattcaaacgcacgaacaccgccttcataacaggcttttaccactttctttgccacttctgcatctttatggtagaacacaggaaccatgccggtagaaccaatcttgttcaatacggctatcttatcaaatcttgccatctcttactatcttacaaattaaattataacttcttatcgctgaacacgtccgctggcatcaccgcctgccaatgcttctacttcttcggcagaaaccagattgaagtccccattgatggtgtgcttcaaagcagaagctgcaacagcaaattccaaagccgcaccttggttgggttttgtcagcaatccatgaataatgcctcccgagaatgaatcgccaccacccacacggtcaataatgggattgatgtcataacgttttgattcataaaattcctcaccattataaatcattgctttccaaccgttgtgagaagcagaaaacgactcacgcaaggttgaaataacatatttgaatccaaactcctgcgccattgctttgaagatgcctttatacccttcggcattcgtttcgccggcttctacatttgcttccggtttgaaacccaggcaaagttccgcatcttcttcattgccgatacatacatctacatacttcatcaacggtttcatgacagactgtgccttttcttttgtccacagttttttgcggaagttgaggtctacggaaaccgtcacaccatgacgtttggcggcttcgcaagccaatcgggtcaactcggcagccttgtcggaaatggcgggagtaatacctgaccaatgaaaccagtcggcaccttccataatagcatcgaaatcaaaatcagtggggtcggcctctgagatagccgaatgtgcacggtcataaataaccttgctgggacgcattgacgctcccgtctccaaataatagatacccacgcggtcgccaccacgagtaatgaaatcagtcttcacaccgtatttacgcaaagcattgacagcagactgaccaatttcatgcttcggcaattttgtcacaaaataagcttcatgaccatagttggcgcagctcactgccacgtttgcttcaccaccgccataaactacatcaaatgaatcagactgtacaaagcgtgtgtttcccggagttgagagcctcaacatgatttcacctaaggttactatttttcccataattacatgattttaaattgttatttatctattcgtttcattttacaaattaccaaaacactgttctcctgtccgataattgccaagactttaatatcttcgctctatcttctacccggatattttattcgtgtgcgtgcacaaaggtactatttatttttttaaaaccaaaaattgttatatatttgtagatgaaaaaagtaatttattagtgtatccgaatacactatatataataaggtatatgaataaactgcccgaaagaatcagaattaaagatattgcccgcttagcggacgtatcggttggcacagtagaccgtgtgttgcatggccgcaccggagtttcggaaaccagccggaagagagtggaagaaattttgaaacaactggactatcaacccaatatgtatgccagtgcattagcttcaaacaagaaatatcagtttgtctgtctgtttccccagcataaggagggagagtattggactgacgtggaagccggcataaaacgtgcagtggaaaccttttccgatttccatatcacgctctctatctcctattatgatcaatacgagtatgcctctttcacaaattccggcaaagaaatattggcccgggaagtagacggagttttggtggcgcccaccattcccgaaattacgtcacaatttattgagcagctgcaaaagaaagaaatcccttacatcttcatcgattccaatgtacccagcctccggccattagccttcttcggacagaaatcagaacaaagcgggtattttgccgcacgcatggcaatgatgctgggagaaaagccgaaagaaattgtcgtgttccgccagattaatgaaggacgattaggttctaaccaacaggaaaatcgagagaaagggttcagaaaatatatgcaggagcatttccccgattgccggattgttgaattaaacctctacgccaaacgccccgacgaggacgagatactgctgcaacacttctttaatgaacatcctcaaatcaattgcggcatcacattcaactccaaagtatacattgtaggtgaatatttattaaagcacaacaaaaaagactttaagttgatgggatatgacctgctgagccgtaatgtatattgcctgaaagaaggagctgtggattttttaatagcacagcagccgtccgttcagggatacagtggtgtggaaagcctttgtaatcatctcattttcaaaaaagaagtgaaacagtgcaactatatgcccattaccttgctgacgatagaaaatatagatttctatttggatgcctataaaaaataaatctgacaattgacatagagggaacaatatattcaaattaccgtaagtgatgtttcaatcgttccgaatggagatataaatggggaaagagtaacccaaaaaaggataaattaattccgctgacgagatatagaacagtcttttttgtaactttgcaccccatttataaaaatagaaattcatgaacggtgaaaaattaacccctataaccaataaacccagtctatgggcacttagtccgttactggtatttctgtgtctttatttggtaacctctatcattgtagatgatttttataaagttcccataactgttgcattcatgatttcctcggtatatgccatctgcatcaccaaaggattgagcctgaacgagcgaatgttgcagtactccattggtgcagccaataaaaacatcatgttaatgatatggatttttattctggcaggcgctttcgcccaaagtgcaaaagacataggcgccatcgatgcaactgttaatatgacgctccatttattgcctgacaacctcttattggcaggtgtctttttagcagcctgctttatatccatttctatcggaacctcagtagggactattgtagcattagttcccgtagtggtaggcattgccgaaaaaacagacatgaacctggcttttatggtaggtattgtggtgggaggtgcctttttcggcgataatctttcttttatttcggatactaccattgcagccacacgtacccaagggtgtgccatgcgtgataagtttcgggtaaactttatgattgctttgccggcagcattgattgtattcagctattatatcttcagaggaatggatattatgactactccccaaatacagtcggtggaatgggtaaaagttactccatatctggtggtgctgggaacagccattgccggtatgaatgtgaccctagtgctcattttgggaattgccgccacaggaatcatcggaatactgaccggaagcatcaatttcttcgattggtttggttctctgggaacaggtatcacaggaatgggtgatttaattatcatcacactcatggcaggcggtatgctggaactgattcgttttaacggtggagtggattatattatccaaaaactcaccaaacacgtaaatagcaaacgaggtgcagaattatgcattgcaacattagtgagtattgccaatttctgtacggcaaacaatacaatagctatcatcactgtaggaccgttggcaaacgacatagctacccgctacagagtggataagcgcaaaagtgcaagcatattggatactttctcgtgtgtcatccagggaattattccttatggagcacaaatgttaatagcttccaaactggcagcattgtcaccattgagcgtaatcgagtatttatactatccggttaccatcggaatatttgccctgctgagtatcatactccgctatccgaagcgctactcttaaaatgttactacacttttgacacattatgataacagcgtgcacaatgcctgcttcagacgttctatgacttcctccatcggaacttctttgcccaattccttctgcaaagaagtcactcccttatttataaatccgcatggattgatatacccaaaataacgcaagtccgtattgacattcaatgccagtccatgcatcgtaacgaaatgactgctgcgcacccccatagcacaaatcttccgttcccggggagttccgatggcaagccatacgcctgtcgctccttttactctgccggcttctataccatacgaagcacaaacctgaatcaccgcttcctccaatacatgaatgtattcttttaaacccaaatgataatcttccagattcaaaatagggtaacaaaccagttgtccgggaccatgataggtaatatctccccccctgtcgatatgataaagcgttgcaccaatagcttgcagttgtgcctcacccaacaacatattcgcatcttttccgctcttccccaacgtatagacatgtggatgttccacaaaaatgattctgttctcgtatggttttccttcctgctttgcttccaccaatgcattgaaaagcacagtctgcctttcccaagcctcggaataaggtactgttccccaattttctattttcatgttttcctttaattttaaatgtaatataggatacggttcacctgacgcgtcagtagcatctctgcctatcaccttaaatcctaagtgacgataaaagccataagcctgttcattctgttcatttacatcaacataacgcacgcgacaagagttaatggcatacttcagtaatttcttccccactccctttcccatagcttgagggtgcacaaaaagcatctccagcatatcaccgtttatccccatgaagccttctatccgttccggtcctcgcaccgtgtaaacaggcatactacgaagataaacactccacaccaacggtttgagcttcagaatatattgttcggggataaaatgatgagtagcacgcaccgacgcttcccacagctcggtaagttcttcaaaatcatcagcagtagataaagtaacacacataagcattcattattttctgcaaagaaaagatatttatcgtatatttgcaactccaaacaagctaaagaatatggcattatccaataaagaaataccaacagacctacgtgaatatatcgaaataaacattcttccccaatatgcgacttttgacaaggctcatcgtctgaatcatgccgagaaagtaatagaagaaagcatgaagctggcacaatattatgaagtagagcccgccatggtatataccattgcagcctaccatgatttgggcttatgcgaagggcgggaattccatcacctgatttcgggaaagattctggcagccgacgaaaaactacggaaatggtttagtgaagcacaactacaaaccatgaaagaagccgtggaagaccatcgtgcgtcaaacaaacaggctcctcgaagtatgtatgggaaaattgtggcagaagccgaccggattatcaatcccgaggtgagtctgcgccgtgccatccaatatggtttatccaactatcccgaactggacgaagaagtacaatacgagcgtgccgttgcccacctgcgaagcaaatatgcctacggaggatacctaaaattatggataccccaatcttccaatgcctaccagttggaaaagttgcgtgctatattgacagatgagaacaaattaagaagcatctttgaaagactctacaaagaggaaatacaacaaatagaataacacaactatttattcctaaaaattacgaaagtgtctacaggattacagaaagaagagttatctttgtcacaacagaatgtttatgaattatgaaaaagtttatattatccgtctcattgtatttactatctttggcggcctctgcacagtcggaagtaccgaccgacaccatccacggcatatctatggataattacaaaatatatgatgacggttttattctggatatggggatgaaaatagcaacccccatgcgtctgatacctccacagctcacttatgatgcccacagtgtgaaaagctccaaagattattataaactgtttcagcttgacccgaatatcacttacggaaaagaaaatgctacaatattctcacgtggatattccagcttcggaatgtatggattcggagcttatggtttcggccctatgcctcctaccctgcaaagtgctactttcaaactcaaaaacggatggaaaataacaacctatggagaatatgatgcggatggtaataaagttagaaacccaagtgcactgccgtgggaaaagaataactttaacggtgctttcgagatgaaatcggagaatggtaatttcggtatccgtatagaagtacaaagaggacgaacgacaccttactgattgatttatttattgttttattatgagactgtctccaaaggtatattgcactatctttctctgctctgtcattcttcacattgtccgaaataacaaagcagtctagctttttggacagcctcataataaaaaaacagtttacagtttccgccaatttaggcttaaactatttaacaccacactaaccgaactgcaggccatggcagcactggcaatcatcggattcaataagatgccatacatcggaaacaggatacctgctgcaataggaataccaatcaaattgtatataaatgcccagaaaagattctgatgtatcagccttactgttttacgagataatttaaacgcctttgggagcaacagcaaatctgaggtcattaatgtaaccattgctacatccattgcaatatccgtacccttacccatcgcaatactcacgtcggcacgggccaaggcctgcgaatcattgattccgtcaccgaccatggcaaccaccctgccctcacgctgtagttctttaatcacattttctttatcatcaggtaaagcttcggctataaaacggttggcattaatttctcccgccacattttgtgctgtcagatgtccgtcacctgtcagtaacacgacatacttgccttctgcctgcatctgtttcactgcctgaatagatgtcggcttcaccttatcgcttatgacaataacggccaacaacgtactttcctcgccaaagtaaaccagactcttgccactacgctcgtattcttccaccatacttttcagcaggtcggatacttttgcgccgaaatcatttaacagacgatgactgcctgcccaatatgtcttacctccgcgagtcacaacaataccgcgccccgtacgactttcgaaagaatctataatggcaggcttattgccatctttcttcaattcctctacaatagcaagtgccaacggatgttcggatttcaattccgctgcatacaaaatgcctttatgctcgtttacccaaccggcatcatgcaaccaacctgtcactgtcggacgaccttctgttacagttccggttttatcaagtactaccgtatccacctttcgcatctgctccaacgccacagcatctttaatcagaatatgagcttcagctcctttacctataccaaccatcaaagcagtaggcgtagctaatcctaaagcacagggacaggcgataaccaatacagagacagccgagagcatcgcataagagaaatcatccaccccacccactatcatccaaacaataaaagtaagaatagctattgccagtaccgtcggtacaaaaacagcagtaaccttatctacaatgcgttgtacgggagcctttgaaccttgtgcttcctgcaccatgcggataatctgtgccagtaccgtttctcttcccaccttctctgcactcataacaaaagcaccattttggtttatcgtaccggcaagcactttatcattcaactttttttctaccggaatgggttcaccgcttatcatactctcatctataaaagtatctccttctacaataagtccatccaccggaacacgttcgcccggacgtacacttaccttatcacccttctttaattcagaaataagaatatcctcttctttaccatcgcgcagaatacgggccgtcttcggttgcaaccccattaatttacgaatcgccatagaagtttttcctttcgctttttcttccatcagctttcctacaagtacaaaagcaataatcactgttgcagcttcataatatacatgaggctccaatccttgttcataccagaaccgaggatagagtgtattgaacagactaaacaagaaagcgatagaagtactcagtgccactaaagtatccatattactggtaaaatgtttagcttgcttccatgcgttaacataaaaagcatgtccggaataaaacagcacaggcaatgacaacacaagcatccaccagtttatgcccggaaaatccataaaaaacattcccataaaagctaccggcaaagcaaatatccacgccactacagtctttcgctgtagttgttcataataggaatgttctgcttcttcctgttcttccatagagttgtcttcatcgattatcaaatcgaaaccgattttcatcactgcatccttcaactgttccggtgaaacgacatcagaattgaaatccacagtcaggacagcagcagccagattaaccgatgcatcctctactccttcttgtttctttactattttttctacattattggcacacgccgcacaatgcatccccatgacgggatatactttctttgtaatcttgctcatatatctttttctttttttcctatctatcattcaacggacaaatttaggaaaaagttcatgcaactcagttgccaaaagacaaatatattttcgttttttaagaggacaattcacgaagttattctatatttgtggagaaagtttagacagaatacccatattaattaacaaaaagacatgaaaagacgaaatataatgatgtctgttgcaacaacatgtattgtctcctgctttttattgtcaggatgtaacggacaaaaacaaattgatagcagtacaatagaatatataaatctgaaagaggatgtacatttggaagataatacaacctctcctgcctgcaaaatgactattgattacgcttatttagcagaagaaaatggcaatgacaccattgcacataaaattaatcacactgtccagtccactattttaggaaagaagtatgccgaaatggaaccgcaggctgctatagactcgtttaagaatgtgtatgtacgcgaataccgtaacagcgtagcggatttatataaggaagatgtcaagaacggtacctcaaaagacgaactcccttcgtggtacaattacgaatacagcctaaccactcaattcaaagatggcaaagaaggtgttctgaattatacagctgtcactttcgaatattcgggaggagcacatcccaaccaatgggaaaactggctaaactttgacaagaataccggtaaacgactgacattgaaagatgtatttatggctggttcggaaactccaatgagtaaaatgttgctggaaaaactgataaaagaaatggcaaccaaactggataacagcaatattcaatccttggaagacctgcaaaatgaaggaatactgaattcaaccaatatgtatgtgcccgacaatttcctgttggagaaaaacgaagcatcgttcttatacaacaaatatgatatcgccccctatgcaatgggaaccattgttctttcactgccttatgcagaaatagaaaaatacatgatacatcaaaccaacaactaagaaacagaatggaattaatattgaaatactttccccgcctcacagagaagcaaaaagaacaatttgccgccctgtatgatttatataccgattggaacagcaaaatcaacgtgatttcacgtaaagacattaccaacctttacgaacaccacgtactccattcgttgggcattgccaaagtgataaacttcactcccggcacacacgttatggacctcggtacaggcggcggttttccgggcattcctttggctatcctctttcccgaaactaactttcatttggtagacagtatcggaaagaaagtaaaagtagcgaccgaagtggccggtgccatcggactgaccaatgtcactttccgccattgtcgtgccgaagaagaaaaagataaattcgatttcgtcgtaagccgcgcagtcatgcctttgggagatttgataaaaataatccgcaagaacatctcacaagagcaacacaatgcgcttcccaacggactgatttgcctgaaaggaggagaattgggacaggaaacaatgcctgtgaagcacaaaactgtgatatatgacttgaaagaggaattcgacgaagatttttttgagaccaagaaagtagtttacgttaccatcaacggttaaattataatagattaaagcgccatgagaataaagagattcgagttcaacatgtttccggtaaactgttatatactatcggacgagacaaaggaagcggttatcatcgacgcaggctgtttttacgaagaagagaagcaggcattgaagaaatatatcgatgacaacggactgaacgtgaaacatctgctgaacacacatctgcatttagaccacattttcggtaatccttttctgctgaaagaatatggtttaaaggcggaagccaaccaagcagacgaattttggctgaaccaagcagatgcacaagcacggatgttcggtttccaattgcccgaaccacctgttccactaggaaaatatgtatgcgacggagatgtcatcaccttcggaaacaccaagttggaagcaatccacgtacccggtcattcccccggcagcatcgtttattactgcaaagaagagaactgcctgtttagcggcgacgtgttgtttcagggaagcatcggccgtgcagacctcaccggaggaaacttcgacgagttgcgtgaacatatttgcagccgtttgttcgttctgcccggcgatactacagtttaccccggacacggcgacccgaccactattggaatcgagaagaaaaacaatcctttcttcagataaagagaagataaatcctgctgttccggaaattactccgaataccggaaaaccgactcggaatgacctgtggacagcaaatacgatattaaaaatataaacctattattaaaccatgaaaacagatttattagccgaccgacatatcggtattcaggaagcagaccttcccgctatgttggagaaaataggcgtgaaaagccttgatgaactgattaacaagactattccgtctaaaattcgtttgaaagaaccattggcattggcagccccgatgaccgaacgcgaattcgccgaacacattgcagggttggcctctctaaacaagatttacacctcttatatcggcatgggctggtatgacaccatcactcctgccgttatccaacgcaatgtgtttgaaaatcctgcatggtacacctcttatactccttatcagacagaagtttcgcaaggacgcctggaagcgttgctgaacttccagaccgtgatatccgacctcacggctatgcctcttgccaactgctccctgctggatgaagcgacagcagcagcagaagcggcaaccatgatgtacggacttcgcagccgtgaccagcaaaagaaaggcaccaatgtattgtttgtggacgaaagcattttcccacagaatctggcagtcatccagacacgcgtcattccgcaaggaatgaaaatacaggtaggcaactacaaagaactggaatttactcccgaaatctttgcctgcattatccaatatccgaatgccagcggcagcgtggaagattatcgcgagtttgtagaaaaagcacatgcagccaactgtaaagtggcagtagatgcagatatcctgagtcttgccctgctcctgcctccgggcgaatggggagcagacatcgtattcggaagcacccagcgattaggtattcctctattctatggaggtccgtcggcagcttactttgccacacgcgacgaatataagcgcaatatgccgggacgcatcatcggcctgtccaaagacaagtatggcaaaatctgctaccgcatggctttacagacccgagaacagcatatcaaacgtgaaaaagcaacttccaacatctgtaccgcacaggcattgctcgctacaatggcaggtttctatgctgtgtatcacggccaagaaggaatcaagaacattgccaaacgtatccacagcatcgccacttggctaaacaaagccttggctcgtctgggctatgtgcagcacaacgaaatattcttcgacaccttgcgtttcagccttcccgaccacgtatcggcacaaaagctccgcacaattgcattgagtaaggaagtaaacttgtgttactacgacaatggtgacgtaggcttcagcatcgatgagacaaccgatttgaaagatgtcaatctcctgctctccatcttctctattgccgccgaagaaaccatgcaggaagtgaccgacattcccgaagcatcttcgctgaaccgcgacttgcgccgtcgcacttcattcctgacacacgaggtattcaacaaataccacaccgaaacagaaatgatgcgctacatcaaacgcctggagcgcaaagacatctctttggcgcattccatgatttcgctcggttcatgtaccatgaaactgaatgccgcttcagaaatgcttcctctgagcaacttaggatggatggccattcacccgttagttcctgaagaccaagcaaaaggatatcagatgctcatcaataacttgagcgaacaactgaaaaccatcaccggatttgcaggaatcactctccagccaaactcgggtgcagcaggcgaatacaccggtctgcgtgtcatccgcgcatatctggaaagcatcggtcaaggacaccgcaacaaaatactgattcccgcttcggctcacggaaccaatccggcatcggctgtacaatgcggttacactaccgtcacttgtgcctgcgatgacaaaggtaatgtagacgtagaagacctgcgtgccaaagcagaagaacacaaagatgagttggcagcactgatgattacttatccgtccacccacggaatctttgaacccgaaatagctgagatatgtaaaattattcataagtgcggtgcacaagtatatatggatggcgccaacatgaatgcacaggtaggtttgaccaatccgggcactatcggtgcagatgtctgccaccttaacctgcataagacctttgccagtcctcacggcggcggcggtcccggcgtaggtccggtgtgcgtggccgagcatctggttccgttccttccgggacactccattttcggcaacagcaccaacgaagtttcctctgccccatacggcagtgcaggtatcctgcccatcacatacggttacatctgcatgatgggtgccgaaggactgacacgtgccaccaagactgctatcctgagcgccaactatctggctgcatgtttcaaagacacttacggcattgtttacacaggagcgacaggattcgtaggtcacgaaatgattttggactgccgttacctgcacgaggaatcaggcatcagcgaaaacgacattgccaaacgcctgatggactacggttatcatgcacctaccctgtcgttccccgtacacggtactttgatgatcgaaccgaccgaaagtgaaagtctgtgggaactggataactttgtgaatgtaatgcagactatctggcaagaaattcaagaagtgaaagaaggcaaagcagacaaggaagacaatgtattgctcaacgctccgcatcccgaatacgaagtagttgccaatgaatggaaccacagctacagccgcgaaaaggctgcttatcctatagaaacagtacgcgagaacaagttctggattaatgtagcgagagtagataatacgttgggcgaccgcaaacttttgccgacccgctacggaaagtttgagtaaatatcccccaattataggcggctacagtttgccgcctacaataaaataaaacagcccatgtcaaagtctgtttcagagtaaggacatggactgtttttaatatcaatacaatggcaagagttcatttgaaaggaaaagattatcttattcagaagatttacaaaacatgaatagatattcctctgaaaatggattatatccataaatcataccatcaggacctacagtaaaatcagttatcaactcgtccaactctaaattatctatatttttaccttcctttaaactatagatttccacatgcgaccttgcagaagacaaatccttgcaagatacaccttgataaagagcatatatatagtcatca

SEQ ID NO: 6809 - DNA, 237 bp, Unknown
  gut microbiota DNA sequence
aggctcacagccaacatccccaggagtaagtgagcgatttgtcttttatagggcaacagatacctgaagaagaaggagaggctgttactgccgtccttctccttttcgtcctcctgttcatagaatccgggggccggctccagggcgagtgccgttcccttttcttccccttccgtccttgtcaccagccagcacttcttcatctcctgttcggtgtatatgacgttctgcgaggcg

SEQ ID NO: 6810 - DNA, 1559 bp, Unknown
  gut microbiota DNA sequence
atattttcatttggttgatttctttctgaaccccatctaaaaagcgggaagcgtgcgccccgtccatttgcgtgtggtggaactggaaagaaacggtgagcgtcgttttcatcaggcgacgtttgtatttgccccaaataagaaacggattattaaaaatgccgctatacatcccgacagccccgtctatttcatattgtgccaaggcggaagttccgataaccatgctttccgtcaagtcgtgattgacgcaactttcagccacttgtttggttagttgcagatagtgttgattaaataaagataaatcatcacagaaaggaacatcacacgaacttacctcgccctttctgttggcgacaatggtgtttactgcaatggtatcgtactgcatcagtttgtcgtttacgggcagcagataaaattctttcacgctccttgcggctttgccgatgcaccagcacatcaacatattaaacttcatgcccgatttccgactgattttcacaaggcgtgacacgttgagtgtcttaaagaacgtcaccattggcatgggtgcgttcatccacatttcaaaggcgtatgcccggctagtttcttggggatttacttctttcatacttaatgctattttcatttaatgaatcagacggcaaaagtaggagaagcgtttgaacccggatagaacaaacgggacatttatacgggattggtgaacaaatcggaatatggatttgatattttcagcaaagacatgggcgtatatccgcagaacttcttgaactctcggataaagtgcgactggtcagcataaccgctggtgtatgctatttgtgcctggttgatttctttacccgcttgatgctgcatctgcgccaaagccttttggaagcggacgatacgggtatattctttgggattgatgcctacaaatgaatgaaacaaccgctcaaactgttttttacttaggctggcaatggaagataattcgtttacagagatttgcggagtgatatatattcgctgtatggcggcatctattcttttaattctgtgtgtggtatcagctaaattatcggcaatttgtgacaccagccatttttctacatagcttatgcaaatagaattattctcacagtcgaatattcgtgtagccagttcattcaaacttttgttttcaaggctgtaaccggacacttcttgattataaaaaagtgaagtcggtatgttcagaaacatactcatagcgtgagggtggaatacaaccactatcatttctgtattgccgtcagcatacaaatgggatgaaaaattaacttgtccgctgacagtcagtttgtcttgtgtaacattcagttcagggatatataacggtgcttgcttatggaaaatgatttgagggcaaccgataggataagtaaaggcatccagcggtcgattgctcttgaatacccaataatatcttatataaggttgcagcaacttacatggcttgtaaaatttgaacttctcttgaatcattttacaaagatagtaatttcatattgatagctaagtga

SEQ ID NO: 6811 - DNA, 319 bp, Unknown
  gut microbiota DNA sequence
cgtcaatcattactttaaatgcaactttaagacattggtgaacagatgtcgggtggagtatgccaaactccttctacgaaaggaaaagcgcacggctgatgaattgataaagctttgcggatttacatccagaagtgtcttctattctgcctttaccaaagaagtcggtgtggttccttcacggtatcccgggaatatgctcccgtttctttctgaatacgattaagtcctttataaaataataaacaaaaaacaaatcaagtttttaaatttataaatttaaagtttttctattatgaacaaaaaatttttaagtgta

SEQ ID NO: 6812 - DNA, 342 bp, Unknown
  gut microbiota DNA sequence
gtgataaggaaagtaggaaagggcgcatggcggatgccttggctctcggaggcgatgaaggacgtgataagctgcgataagtcacggggaggtgcaaataacccttgatccgtgaatctccgaatgggacaacccgttaccttgaagaggtaacatccatcaatgatggaggctaacgcagggaactgaaacatcttagtacctgcaggaaaagaaaataacaatgattcccccagtagtggcgagcgaacggggaagagcccaaaccgttcatgttacggcatggacggggttgtaggaccgcgtcgttgcaagaaattttgcgagaagaacgatctggaa

SEQ ID NO: 6813 - DNA, 996 bp, Unknown
  gut microbiota DNA sequence
ctgcaaaggtgggataattattgtatatttgcacccagaagttacgaaaagagtgtaatttattggaaatgagcattgggtaatcgctcataatagtaataggttacgaattagttagttatctactgcattattcttctgtgcgttgcgtaaccttcaaagaactcttcgtatgcaaaagtaacaataaaacgggagatttagaaatgaatctcctgattttttcttctcacacaagtttttccgtaaaagcgattttatccgtcagcacaccatcgcccaaaaagattttgaacgaacgtgtgccgactgccgcataagcggagaaaagggctttgcctcacgcctaaacaatagtttagactgatgagacaaggcccctttcttttgtgcttatgccaaagaggtgcttttacggggttttgacgatttttcttttttcgttgtccttttgagccggaagcggaaagccgtgtatgaccgcacattccataaatggaacaagccgtcactcacggcagacaaaccgggaagaatgattttatccatccgaccaaacacgtttggccaaacagataaaaacatacttccttgccgatggtttgcccggtttcacgctaccggctatgttcttttctgttggggatgtctttttcacggatttctcttttgaagttttcctgtctaatctgcctctacttccgtttacctccattttcgcgcctttcagtgagccgcatcaggcagtcattttcgtgctgggtgcaaaggtaactccgggattgtacgggaaagcaaggtcaagcctcctgttttctggaaaaatctccagcccttcgggtagtattttcccgaaaaaccttgcattccctaatccctacctttttaagcacccgaaacgaaaacgaccgatgcgacagaaagacgcattaaaaaaaatgtcggataaacgagaggcagataagatagtttgaaactcaactccctcagctcttg

SEQ ID NO: 6814 - DNA, 376 bp, Unknown
  gut microbiota DNA sequence
ataaacaaattgagtttttaaatttataaatttaaagtttttctattatgaacaaaaaatttttaagtgcaatcctgttcggagccttgatggtatcctctacaggaacgtttgtgtcttgtaaagactatgacgatgacatcgacgaaatcaacaaggagttgaccgatatcaagtcaaagctttcagaccttgaatcgaaagtcaccaccggtggcgcttatgtaaccaagattgaatctgtagagggcggtttgaaagtatctgtcagcgacggtacttcttacaacctgactattgccggcacacctgcaggcagcacggttgtcatcgacaagacaacaggtgaaatcagcatcgacggtactcctacagg

SEQ ID NO: 6815 - DNA, 6189 bp, Unknown
  gut microbiota DNA sequence
aaaataaaattattattaaattaaatgattgtagtagtttttacattaatggatttaagaataaagtaatagatactccaatgatagattttgaaaaatctagaggaagattgaagtaacattatactccgggaagtgtttccgttgataatcataggggaacttctgcaagtttaggctatagggtaaagtcaaaacattgacaatgctatcatttagttctgccattctgagctttgcgaagaatctgcaaacataaagtagatgtaaacacttccttcactacgctcaggatgacaaaatgataagactaccgagccattgggaataacccttctgcgcatatgttttttgtgcaggaaggataagttacgtatggcatcagaacttaaaaagtccacttcttccacaccattcatttccaccaccacggtatggggcggatggtataagtatggctgctgccatcggcatactcttccagcttcccgtcaccccatttgatgagcccggtcaagtcgccgggaggtgtgcatttgtgatataccttcctcgcttttttattagccttaagacttgtttccactcttccatttttcggcatattcattcaggattctgcgaatgctcagccctattttaatgtaatctttctcattaagattggctaaagagactcgtatgctccattcaggtccgtcgaatccccctccgttcagcactaccaatccggtttctgttgccagacgaaagaccacatttagtggattatatgttgatttcaggtaatggacgaaatcatcgccatagaatttctttgcccataccagcatatctatttccgaataatatccggcacgaagcgggtcatcgggtaaaataaatccggtattatcccataatgctttcagtctgctatgaatcaggttaagcatggcatgacgatatttatcctctttatcaagcaatgagaaagcagcaaacaatgacatttgcatttgttgtggaagtgacagtccggcggtgtggtttagagcaacctgacggctgtcggccaccatgcggtcaatgaatttcatcttttctacatctgtagtcaaagaaccgtatcgtttggcaagttcacttttgcgtttacggggtaaagcggcaatcagcttgtcgaatacattattttcgtggatggcattgacggctatgcgccatcccgtagctccgaaatacttcgagaatgaatatacgcagatggtattgaacggtaaatctgccaacagacttctaaatccgggaacaaaagttccatagacatcatctgttattatcatcaggtttggattccaacgatttactacgtctttgatggcatctacacattccttgttcagctcgtagctgggcggattgctcgggttaattacaaacagggctttgtacttcgggtcacgcaacttgttgatatcctctactttgtattgccaggtgtgcaagccgttttcgtctatcgtgtcagcgctgatgttcagtacgtcataatcgtaacgagtcagttcgggtatttcgatgtatggagtaaaggcaggaaccatcaaagcgatgctgtctccgcggtgcaataggaagttttcttctaacgaatcgaatacatagcacatgcctgccgtaccgccttcggtggcaaaaaggtcaaagttgccttgagggggacgtccgtcacacatttcccgattcagatagtcgcgtacaagtatttccgtatacttcaggatacggtcaggcatcggatattggttgcctgccatactttcggcccactcatgtactaaggaatcaggatcgactgcatgttccatcaacatataattataagtacgcttcaacagaccgattcccggttcgccttcatgggttttcagccacagctcaaaccgttgggcaataccttctttctgaggaataccggctattccttcagacatatccatgacacgtcgagattctgcaatggcaaaagatcccaaaatgaagaaggcttcacgagcttcggtggcaatccagttggggtttcctctgccggcattcagcatgacgtgtgccatcttcttcacactttcatctgccatttctatcaaacggttcttgagctcaaacggactgattttttccaagttcttgtccattttcgctacgctgctcttatcgcttaaatattccataatgttataaggtttagatgattacattaataaaataatgactactccccaaataatgagaagggtgttccccacggcgtaggtcacggtatagccgagcgatggggtctcactgtctactgcttcctgaatagctcccagtgcagcagtggtagttcgcgctccggctgtgcatcccaatgccagtgcaggatggaagtgaaatacatatcgggccaatatcagtcctagcaataaaggcaatgaagtggcaaggatgccgataataaaaagcattggtcctacttctttcagtccttggatgaaactgggacctgcagagattcctacgacggctataaacatattcaatcctacattattcaatacccatagagaggattccggaatttgtccgaatgtggggtgtttactgcgcaaccatccgaataccagacctgcaatcagtgctcctccacttgtgctgagactgatgggaactccgcctatgtgaatggccaaggcgccgataactcctcctattaagatgccgatgccgacaaataccatatcggtagcattggtaggccggtcgatatatcctaattgcttagcagctgtttctacttctttcttcagtcctaccaattctaatgtatcacctgaatcgaccatggtttgggcaaacacgggaatatcaatacccgcacgtttgatgcgtcttacactcactccatgcatgaaaggttgcttacgaatgaattcaagttttcggttggcatacggtttcttatgtatcatgaccggcaatacctctacagggaaatcaagcaactggggatctatcacttcttcgccaatccaatcttcttctcctatggcaaattcacgacgtccacttaatactacttcgtcacctttttgtaataattgtcccggaagaatttcgttaataatggtatgattatgcctcattctttcaacaaacagccttttcccttgcgaaataaagtaagattcgagttgctctaccgttttaccgtttccaaaccaatcgttttctatggtataagcacggaatacgaccggtcggcgagcatgttcgaagccgggttcatcagcctcactcgttcccatttttgcttccagttctttacaggcagcttttactttttccagtccgcccaacattttcggacccaaagaagagagtacccatgctgaccctgcagttccgtagatataggtaacagcataggctacgggaataatatttatcatattgtttttctgctctgtgctgatgtttaagccattgatggtgtcgtctgctactccgataacagcagaaatggtttgtgcacctgccagtaatccggctgcttcgcctgcattatatcccattataagtgctaaaatccaggttataaccaaacagccaacgcacattaagacggcaaatcccacttgtggcaagccgtctttttttaatccacgaaagaattgcggtcccactttgtaaccgatggcaaataaaaatagtagaaagaaaaccgatttgaccggctcttcaatggtgatgttgagttgacctaccagtactccgaccaaaagtacgctggtgacgattcccagactgaattgtcctactttgattttaccaatccagaatcctgcggcaatagtgagaaaaatagccagttctgaatgttgtcttaatagatgtattacccattccatatattcttatttcttttataattgcaatctacaacagaagggataaaaagaagttgagttaaaatcatccaaattgtgcatagttctaatattttttgttttatttgcacagataggatgattgaagtatgaaaattgaagcgattgtaaaatatattgtagtgagcttcttactgtttgcaaacttgagttgtaaagaaaataaagacgaaacacttatagcaaaagtaactgacctgacagaagaagaagaggttatatcggatatagagtatgatggtgacggcagaataatacgttatggtgatactccgatagtgtatgcgggcgataaggtaaccataggaaaaatggattgccttcattcgggaaataagctttgctcggtaacttttaaaatggctaaaggcaaggcgatagaaagtcgtacacgttgtttgttgaaaagaggttcggaaacatgggatgtttttaagacttcgacttatgaatacggagctgatacattgtgtatcaagtcggactattttggagtggaaggaaatgatttcttaaaacgcgtctgtacgaaatatatatttggtgatgatggaaaactgatggaatccattacctcacatcatgaattaaatgacagtacttatgtgtgtcatagttattataattatgataatcatattaattatcgggcaaatttgaatatacaggcttatgtaatggatagtgatggcttggatggctttttctattttttactaaacttgggggatttcagggtagatacagttttgcccaatgatatcggacgttgtgtaaatcatggtgctgagacttataacgtgcatgctaactatagattggatgatgaatctccgataaagatagaagtcctgtataattatacaaaacttctgtctcgtatcgaattgtcttataagtcattaaagtagttcatccaataggatatagatatcttcttccgaaaatcctttttcaataaggtattttttgtcttccaaatagaaggtaaggaacatgttacggtcttcgcacatactctgtgctttttgataatagttgatagccgtttcgatatttcctaatgtatagtataaatgtcctgcattcatccagtcttgcattttgggcttggtagcctgaagcagtagatcataatatttacgtgcttcttcatatttgccgataacaaatgaacaccagccgatagcacggcgtgcattattgggatttttttccaggtattccactttaaagaagtaccccaaagcctcttcgtatcttttcaaggctaccagacattgaccaatctgtaaggacaggtttaaattgtcgggctgaacaatttctacttttttgaagtattgcaatgcctgttcaggcatgcccagcttatggtaacacaaggccagatgacggttagtccataaggcatccggggcaatgatatcagcttgtttataataactcaacgctttatcgtaatttcccaatttctggagggaataaccggctttctgccataactcggagttggttttattctcttcaagcaggatgctgtatagctggaatgcttcctccatataatctttttggaagaaataatctgccaactttttcagttcttcaggttgggttattgcttttttaaggctgttatatttccacagttcaaagcggctttcgaagatgtctttttcttcggaacggcgagaccataatttgaagaagcgatataaatcatgaatatactggcgactgatattctcttttttcaaggtggacttcgtcatctttgttatctgttccagctgttcttgcgatacagagctttgctcgttcatctgatgtatcatcagctctctttgtgattcaggcatttgtatcaagctgaaacagaaagaatatttatctgaattgcagaaggaatcgctattgagtataatgtccaataaggacattctcttttcttcattatctccaaatatggtaacaatatcgggaaattggcggtcgaaaggatagaaccaatgtgacatttggcggaaaaaagggaactgctttagttgagagaatgtgctcatataaacatcagctccctccatttgcaattcgcccatttcacgtaatttgtcagtaatgcccgatttgtcaatccagttttcccattccgggttaagatcatcggagtcttctgtttcatcgaacccgattttgttggagttcccaatgcgcg

SEQ ID NO: 6816 - DNA, 4940 bp, Unknown
  gut microbiota DNA sequence
gtgaaagctgcaattgaatctgtatggtatgcaggttcttaataaaatcagcatcttcattgagtagtgagagctttgcacgtgcttcgggatacatcatgatacgatgttcatggaaaagtgcagttatcactatacctacgatagcacgttggttcaccataggatcagggtgattatacgcttcgaggagcagcatatattttcgtatatcaaaaattctggattggctcatcgtgacggcactgatgaagacgcaaagatcattgaccggtaccagaagtgaattgagcagtgtctgggcttcctgtgcttcggcttccgtccaatataaagaaacccaggttctttcgaataactcgttgagtgctttttcatgacgttcgcgtattcctgccaattctgatttacagcgattggcatcactgtaaatcagaggagctgtcgctgcatcttccgtataggcttccaattgcatttgcagctcggaaagagtatgcggtttagcgtgctcataagtgcgtatcaaatcataatataaagcaaaagaagatgtactgtttttcatgatatgtgtccgttctgccatttcgtaagccgatcggaatattttattatacatatccttttgtttgggatcttttatgccctttgcgttgtattgcaacatcagatcgtatgtcgtttgcagtgtttctacgtcagtacgcagctgccagctggaacattggctggccatggcatggatttgtaccaatgcttctttcaaacgatgattttcgagtaaattgaaaacgtattctatttcattatgcatattagccataagttatatttctatttatgtgtaaaacaaccggaagcccttttaagttctcatttcagccaagtggcacgtttccatatgtattccatcggtccgtgtgaatgatggctcatccaccagcggcagaatgtaaactgcaagatgaagaatgcgatacccgccaggcaactgacagtgatgccacattggttgtgaagagcaaatccccagttatagtataacatagaacctactatgctttgagtaatatagttggtaagactcatctttccgtatggagtgattttcattaaaagataatgcatatttgtattatagaatgcaaagataactcccgaaaccaataccaacatgaatgagaagttagaaagcgaggtgatgataagtgataaaggggtcaatattgatttattgacaatgaatgccggcaacatattgcctaatccgtataaaggaaagaatgcgataagtgcaccggcaagtattttattccataccttcaagttctctttttggaatagtccgcgtcgtccgattaacatacccaacaaaaacaaagctgccgtttggaatacacgtccgtgatcccatgcccaggcaagactggctatttgtccttcccataaattcacccggactgtttccaaaaacgaaccatgactttgtacggcaaaggtggcatcccaaaagctgcgggtgggaatggccggagtaatgaaagacgggtccaggcaggcacgtattacatagtaaagtggcaaaggctgtatcaatagcacgcaagcgagaaggaatacccatttgtctttcagacggcaggtgaggggcaggataaaacctaccagtgaataaagtaccagcacttccgcggtgaagaagctggcattgatattgcctattaagaataacaggatgagccgccagcagaaacgtaatcggaaatcgttgccgcgcatgcgctgattatcgttctgaataaaaaaactaaagccgaagagaagggcaaatacagcatatgcctttccgccgaacatgaagaataatccattccagattgctttgtccgtaaagttgagccagtcactctgcgtggttgtatctggaaatgaatagaaattaaaatgctcaatggagtgcagaatgatgattcccattactgccaatccgcgtagcacatcggctacatctacacgtgcgtgtcctttaattgtgcttattacttttgtttccatgatttaaacattgagtcacaaaagtaagtaaaatcttaaatagttggctataattagaggaagtaataagaaaattctctaattttgttcccatcttaaacgaagatatggacatttcggaattacaacgtatatatgccggacacccgaatactgcgggattggctgcgttattggaagattcctcggtgaggactattttcctgggaggcttacatgcttcagcgacacctttatttatttcctcctttatcagagaaaataaacagacgtttgtttttatattgggagatcaggaagaggcaggttatttttatcatgacttgacgcaagtaaatggagaagagaatattttattctttccttcttcatatcgtcgtgccatcaaatacgggcaaaaggatgcggcaaatgagattcttcgcacggaagtattgagccgtttgcagaaaggtgatactttgtgtgttgtaacctatcccgatgctcttgccgaaaaggttgtttcacaagaagaactgactgataaaacattgaagctgagtgtaggtgaacatgtggatactgagtttattgcagaagtgcttaccggctatgggtttgagcatgtggattatgtgtatgagccggggcaatatgcagtaagaggaagcattatcgatgttttttcttttgcttctgaatatccttatcgcatcgatttctttggtgacgaggtggatagtatccgcacttttgaagtggagaatcagctctcgaaggaaaagaagcaaagcatagccattgtgccggaactgacaaaggcgacggacaggaacggtgtttctttttttgagtttataccaaaggataccgtattggcaatgaaggatttcctgtgggtacgcgaaagaatacaatccgtcagagatgaggcgctctctccacaggctttggctgcttatgaaggggagaagacagaattgatgagtttggagacaaagttgattgatggttcagagtttgcagttcgtgcgttagagttcaaaagaatagaatttgggaataagcctacgggtactccgcaggccactttgccctttgatacaagtgcgcaaccgatttttcacaagaactttgatttggtaagcagtacgtttaccgattatctggaacagggctatacattatatatatgtacggacagtgaaaaacaggctaagcggttgaaagatatttttgaggaacggggagataaaatagcattcactccggtcaataagacattgcacgaaggatttagcgataatactcttcggagctgtttttttaccgaccatcagatattcgaccgctttcataaatataaccttcggagtgacaaggcccgtagcggcaaagtggcactgacattaaaagagttgagccaatttgaaccgggagattatgttgtgcacattgaccatggagtagggaagtttgccgggctggtgcgtatccccaacggcgataccacgcaagaggttatcaagttggtttatcaaaatgaggatgtcgtctttgtgtctattcattccttgcacaagatttccaagtataaagggaaggaaggagaaactccgcgcctcaataaactgggtaccggtgcttgggagaaaatgaaggaacgcaccaagaccaagattaaagatattgcccgtgatttgattaagttatactctcagcgaaagcaggagaagggcttcagctatactcccgacagctttttgcagcatgagctggaggccagctttatttatgaggatactcccgaccagctgaagacaactcaggatgtaaaggctgatatggaaagcgaacgtccgatggaccgtctggtgtgcggggatgttggttttggaaaaacggaaatagcagtgcgtgctgcttttaaggctgtgacggacaacaaacaagtggcggtacttgtaccgactaccgtattggcctatcagcactttcagactttccgtgaacgattgaaggattttccgtgtaaagtggattatctgagtcgggctcgtagtgccaaagacagttcccgcatcgtgaaagaattgggagaaggcaagattaatattctgattggtacgcataaaattattggcaaaagcattaagttcaaggatttggggctactgattatagatgaggagcagaagttcggagtcagcgtaaaagagaaacttcgccagataaaagtcaatgttgatactctgaccatgacggctacccctattccgcgtactttgcagttttcactgatgggtgcgcgcgacctttctgtgatacagactcctccccccaaccgctaccccatccagaccgaggtgcatacattcaatgaagaaattatcactgaggctatcaactttgagatgagtcgtaacggtcaggtattttttgtaaacaataggatacagaacctggtggagctggaagcaatgattaaacgaaacatcccggactgccgtgtttgcatcggtcatggacagatggagccggaaaaacttgagaagattattttcgactttgtgaactatgattatgatgtgctgctggcgactaccattatcgaaagtggaattgatatccccaatgccaataccattatcatcaatcaggcgcagaatttcgggttgagcgatttgcatcagatgcgtggacgtgtgggacgtagcaataagaaagcattttgctatttattggctcctccactcacttcgttgactcccgaagccaaacgtcgtctgcaggccatagagaactttagtgatttgggtagtggaatccacattgccatgcaggatcttgatatccgtggagcaggtaatatgttgggtgccgaacagagtggtttcatt

SEQ ID NO: 6817 - DNA, 24309 bp, Unknown
  gut microbiota DNA sequence
gatttgggatacgaaacttatcagaagattttggctgaggctgtgaaagagctgaaagaggatgaatttgcagacctttatgctgaagagctgcaagcggcaggtgaggaaaaaataagtggtgaaaactttgtggatgagtgtcaggtggaaagtgatttggaattattgtttcccaatgaatacattcccagcagcagcgaacgtatgttgctttatcgtgagttggatggcttggagctggataaagatgtgttggcattcaaatcccgtttggaagaccgtttcgggaaagttccgcgcgaaggtcaggaactgcttcgcattgttcccttgcgccggatggcaaaacgcttgggtgcagagaaagttttcctgaaagccggacgaatgacgctgttctttgtgagtaatcctgacagtccttactatcagagtgcagcctttggaaaagtgattgattacatgggaaagaatccccgttattgcaatcttcgtgagcagaatggtaaacgcagtatggtgataaagaatgtggaaacagtagaaacagcggtcggcatcttgcaggaaatagtaagcctgtaatatcgtttttcaccggtatctttggcttttccgaatattctctttatcttgccgattattaacgttgtaaatcatacatttaatatgcggcagctctttatactgttcagcttgtgctttagtctttcgcttactgcgcaagagaaaataaccttgttgtttgtgggagacctgatgcagcatcaggcacaaatagaggctgcccgtgtagggacatcctatgattattcgtcttgtttcaagcatgtaaaagatgagataagtgcggcagacttggctattgccaatctggaagtgacattgggtggcaagccctatagcggttatccggcgtttagtgctcccgatgaatatttgtatgctgttaaagaggccggttttgatgtgttgcttacagcgaataatcattgtcttgaccgaaggaaaaaaggattggaacgcaccatcctgatgctggactccttgcatattccacatgcgggcacttatgtaaataagggcaaacgggatgagggctatcccttgttgatagaaaagaatcattttcgtattgttctgctcaattatacttatggaacaaacggcattgaagtcactccgcccaatgtggtgaactacattgaccgggaacaaattaagaaagatattcttaaggcgcgccgcatgatgcccgatgtcattatagcgtgtatgcattgggggatagaatatcgttcgttgcctgagcgttcggaacgggacttggcagattggatgataactcagggggtagatcatgtgataggttctcatccccatgtacttcaacccatggaggtcatacaagataagcatactcctgccaaacatgtcgttgtgtattcattgggtaattttatatcaaacatgtcgaaagaagatacggatgggggagctatggtgaaattggaattgcagcgtatttttagaataactcgtttgattaactgtgaatattctctagtttggacttcacgtcccaatttaagtggaaaaaaaggatttgagctttatccggcttctttccttgataaaccgattaaaaatgaggaggttagtgcgatgaaacgttttcttatgagagctagaattttgtttgatacatacaatagaggaataaaagaatatttttttgaataatttttcggcaaaaagtttgcagatataaaaaaaagccttacctttgcatcgcttttgaaaggaaagccaatacggtggctgtagttcagttggttagagcgtcagattgtggttctgaatgtcgtgggttcgagtcccatctgccaccccgatagaagaggaagttcgataagaatttcctcttttttattgtagtaggggctcagtttgaaaagggctctggggggcggttcagtttgaaaacttggggcaatctgaaagttgtttcggcttcaaaaggaagttgataaaagttgctttcacgcattgcatgtattgaatccttttgtttatcaatgtttcggtgtgaaaggagaccgataatgttcatttcatacaaaatctaccccgtcagggagcatgttttacatgtacgttcgcatgtacctccaaaaagacaaggacatttttttttaagaccaagagctttcccaaaaagaccatagtctttgtaaaaaacttcaagacctttttgaaaaagttggaagagttttcagaaaacttcaaagtcttttcgaaaggtacactacagccttttataatagcactcaatttccatatatctttcatcaaccgtggattggctttattttagattttaatttatcgttgaatcgaaaaaatacattaattttgttcgttaaacgcataatagcaataaaacaatgagcaatattttgaagttgaccttaatctgtagtttgatattccatgtcttgatggggaaagctgccggagtcggagaattaaaacaaataaaagagaactacaggcagatgttaataccgtcatccatagagcaggattcattgctttcggatttgataaagataaaaccggaaaaggagatgtctgatcaggcggtagtggagttgcaccaactttatccttttgatttgaaaaaaatagatggttatctgtcattgatgtcggcagacggttcgtggactgacattaattatgcagatactaagcgttcaggctgggaacctaaactccatgcggaacgaatattggaactgtcgaaactgtattattcaaaaactacagagcattatcattcggaaaaggtaaaagaggcaattcatttagctttgaaatattggtttgataccaagcctcgttgtctgaactggtggtataatcagattggtattcctaaaacactgggagctgcttttattttattggaagaacagttgacagaacaggagcaccgggctgctgtagcggtaatggagaatgctaagttcgggatgacgggacaaaataaggtatggttggccggaaatgtcttgattcgggctcttttgcaaaatgatgcagatttagtgaaggctgcgcgagatgctattgcctcggaaattgtattgggtagaaaggaagggattaaagatgattggagctttcatcagcatggtccgcagcaacaattcggaaattacggattgtcttttgtcacgggaatgagtttcttctttcagctgttcaaagataccgattacgagttcaccggacagcagagggaaatattggtttcgttgattgacaaaggttatagatgggtgatatggaacagatatatggatgtcagctcgttgggacggcaattctttcataatgctcagatacataaggcatatagtttggcatttgctgctgaagatatgggattggcaggttttcctgcgcatggtaatacgttgataggtcataaacattttgatgattccgattacacggttcatcgtagcaaagattggatgtcttcggttaaaatggcttctcgcagggtgattggtacggagttggtaaatgaggataatctgaaaggatattacttgggagacggagcaacttattattatgttcggggagatgaatatctggaagtatttcctttttgggactggcggaaaataccgggtgtcacttcgtatgaggatattgcaccgatgcctaatgtcaatgtgacaaggtctgggaataacagtgatttagtgggtggcttgagtaatggaaaaattggaatgacagctatggagttgaatcgtgacggactggaagcgcataaagtatggttatttgccgataaatttgttttctgtttgggggccgatattcattcagatacaactttgtgtgtaacaacttccatagatcagcgttcaaagagtggagaactttatgtttggaataagaagaaatggagtgcaattacaggagcagaagcgttccggcaaaaagatttgcgcttttttcatgatgctgtcggttatattgttttggacggggatacatgtgtggcacaatcggaagaacgcgagggacgttggagcgattttatgggaatgtatacgcctgctactcttcatggagaagtggcggcattgcatttgcgtcatggtgtgaaaccgtcgggtgcttcctatcaatatattgttcttcctgccgctacaaagaaggaggtggaagagtttgatccaaagatgattagagttattaaaaatgataaggttgctcaagttgtttcttctcctgcatgtggagaaggatattggatggctgtttatcaatcagaaaattttgatatcgaaggattgttttttaaagcggttcttccgggtatttattatgtagagaagggattgggaggtctggaaataaaattatcatctccctttagaatttcgaaataaataaattgcaatgcagttatatagccgaaaggaaagtattgaacggatgaatgacttggccggcaagggtaggccgtttctttttatcatagactataaacaagaacattcctatgtggaggaaatcagtgagattgattcaagtttttgtcagtatagttttaatgggataaccaatgtagaaaagaggtgcgaagaatatgacggaatgttaatatgggagactgctccaccggctttggaagagtatcgcattgcttttgatgtggtgaagaataatatattggcaggtaatagttatcttactaatctgacttgtcaagttccggttaagactaacttgacgcttgaagctgtttttcggtattccgaggcaaagtacaagttatggctgaaagatacgttggtttgtttctcacccgaaatctttgtccgcatcgaagaaggaaagataaagtcgtttcccatgaagggtacaatcgatgcttcactgcctgatgcatgtcggcttttgatggatgacaggaaggaagcggccgagcatgccactattgtagatttaattcggaatgatttgagtatggtatcggaacaggtgaccgttacccgttaccgttattgtgattgtcttgaaactaataagggaccgatacttcagacaagttctgaaatttgcggggtgttgcctgaagattatttgtcacatatcggagatattcttttcaggctcttgcctgccggctccataaccggcgctccaaagccgaaaacaatggaaattattgctgaggccgaaaactatgaacggggcttttataccggggtaatgggatatttcgatggacggaatttggatagtgccgtgatgatacgtttcatagaacaggagaacggacatctttattttaaagcgggtgggggcattaccggcaaaagtgttttggagagtgaatacaatgaaatgaaacagaaaatatatgtaccaatttattgaaaccatacggatagagaaaggaaatgcctgcaatctgttttatcataatcggcggttaaatgaggtccgtaggtatttccggccggaatgcgcacccttgcagttggaagattatctgcacttgtctgctgatatgaatggtgtgaaatgcagggtggtatatacggaagaaggcataacggaggtatcttattctctttatgagatgcgacctgtccggtctctgcgtatggtgtgttcggatactatagactattctttcaagagcacagacagaagaaagttgaatagtttgtttcagattcgtcaggataaggatgatatattaatagtgaagaatgggttattgacagatacttcaattgctaatattgctttatatgacgggaatgactggtatactcccttgcatcctttgctgaagggaaccaagcgggcggaattgctggataaaggcgtattgaaagaaaaagaaataaaaaaggaagaactgtcatctttttcggcggtaagattgtttaatgcaatgataggttggggagccatagagtttccggttgccaatgtgtctgactagattgttaatcgcaggcatttttttgagagtttcttttgtttccttaaataatttgctatatttgcaaaaaaaatataaatataggtaaggtatgagattgcggacagttgcaaaattaggtgtagtgctttctgttgtattgttctgtatagcagttggtttttatggatttacacgattgagcatgaccgatagaggtcgggagttcaatctcttctccttggtaccttcaaacagtattggtgttttggaaagcgataatatcaattattttttaaatgattttccacaacttaattatagcaatgaactgggagattttcagtttcccggtttattcaattttattcttgggggattgaatgagtatgccactcagaaagcacatggcctgagcagtcggatgagccgtttattggtaagttttcatgctccggggtctccgcgtgatcaggttgtatatttccgcatgggtgcaggagacgaaaagttacttgccgatatgttgcaagagcgtgctccgggtgagtttcagccgaagaaagaaaaatatagaggaaagaatatttatatttatcctttgaataataatgaatttttggctgtttatagtgggtcaggtttctttgtcgcgagttatcagaagcggttaatagaagaagttatagatgccaaggaggacgaaacggcattgagtgatgatgaggtattctcgaaggtatttgagaaaaagaagtctcataatttcctcacattatatggtcgtacgacttcaatgcctttcctgcagaataataatcgttgctggagtgagtttgattttcatatgaatagtgatgtggtatatcttacgggggatacttttatgcctgatacttgcagctgtacttccgaatttgtggcaaaaatgcagtcagtgcccgatgtcaaggaagacagcattgttatttcgggcaataaagattcgatgaacgggtatatggatgaagcaatagaagaaaacgacggtagtggtcggacactgtttgacgagtgtgtggcgaatctttctcgtgacgcttctttcatgttagtggccgatatgcataaggtttctgaaaatcctgagcgttttcgtccttatctgccgccgtttattttagagaatgctactttatttcattcatttattctgtctacccaactgtcaatttctgaggaccgtctttctcatattatggtgctgacgtacaaggactaacgtagcttatgctgatgaaagtgtggagctacttttgtccgaaagtagaataaagaaataaccgttaatactgctccgaataaataagctattttgaaagtggctatttgtgcgatatatccgcctgccagcatacccactcctatacctacatcccatgaagtaaggtaagtgctggtagctgtacctcgttggctgttgggagccagattgacaaacaatgtattgaatgccggaaacatggttccaaaaccgatacccagtaataaagctatgaaaaagaagaaataggtagtccactgtaggctgaagtcgattaaccacccacaggcactcagcccgaaaaagcagaaacaaaccaaataaagtccggcttcgataacttgtgttatcttgccacggtcaaccaatcgtccgctgaatagtcggctggtagccattccaaaagccataaatgtgaaaaagaaacctgtttcagccgtaattcctatttgttgcgaatacatggcaatatagttggaggtcattccgtaaggtacggacagtagtaacaggcagattccggcaggaatgcctttcaataaaataaatcggtcgagcgatatcggttctcttttcacgggctctttgacgggggttttcaccaatgatgccatgaccagtcccaaagcgcaactgaccagtgcacaccaaaatatcacttcaaaagagtatgcattatgtagaaatagtcctaccatcgggccgatgctcattgccgtgttgttcatcattccataatatcccagtccctctccacgccgtgaactgggcatgatgtcgatgactaccgtgtttcctgctactgtgaccgttccgaaggctaagccgtggaagatgcggataagtgtgaataaagtgagggtgcccgccaacagatatccgccgaaggcagccgtaaaaagaaaataagctaataaataaagcggttttctggcaaaagtatccagcagatagcccgaaaacggacggatacataaggcagctattgtgtaacatgaaaggataataccaatggttcctttttcgctgttaaatatctcggctaaatagaacggcagtaccggcattagtaaatagaaaccaaagtagagcagaaagttggctgcgagaatttctatatagttttttgttactagcttatctttcatatattgtcatataaagaaacgattaacagacaaaagaatgttccgtctattaatcgttttatgaaattcaaaacaaagactgattaattggcagcttcgaactcttttaagaaacgtgtatcattttcagagaacaaacgcaggtcgtttacgcgatatttcaggttggtgatacgttcgatacccatacccaatgcatatcctgaataaactttgctgtcaatgccgttggcttccagtacattcgggtctaccataccgcaacccaaaatttctacccagccggttcctttacagaacggacatccttttccaccgcagatattacagctgatatccatttccgcacttggctcggtgaaggggaagtaagaaggacgtaaacggatttgagtttcggcaccgaacatttccttcgcaaataaaagcaatacttgtttcaggtcggtgaatgacacgtttttgtcaatatagagagcttctacctgatggaaaaacgcatgtgcacgatagctgatagcctcgttgcgatatacgcgccccggacaaataattcggatgggtggctgggtgctttccattacccggctttgtacggatgaagtatgcgtgcgcaaaatgacattgccctgtacatgctcagggttggcttcaacgaagaaagtatcctgcatatcgcgtgccggatgatcttcggcaaagttcatggaagaaaaaacatgccagtcatcttctatttccggtccgtcggcaatactgaaaccgagacggtggaaaatatcgataatttcattcttgacaatacttaacggatggcgggttcccaattcgataggatatgccgtgcgggtaagatccatttcagcggcaccgttgtcttgtgtttcaaaagcttccttcaatgtggatatacgttcctgagccttgtttttcagctcattcagtttcattcccacttccttcttttggtcggcaggtacattgcggaagtctgccatcaactcattaattgctccttttttactgagatatttaatacggagggcttctaattcctctgcattagcagcgtgtaagccttcaatttcctgaagtaattgttctattttagctaacatactttcttctttatttttttaatgaccgcaaagttagcgaattaaaccgaatattttgctgaaaactaaaaaaagagatacttttgcattgattttttctaaaaatagaaaatgaagaaactgattatcggagtttgtctgcttgtgctgattagctcctgtggaggtggtaaaaagaaaatagaccccttcgagatgctcactgaagagattgattcgctggctgccgttcctgatacggtggaagtgatggaagtggtggaagaagaaccgatggttccggctaccgcagatgaaagttttgccgactttatctacaattttgcaattgacgaaaagctgcaagtgtcgcgtattgtgttccccttgccttattatacgatggataagaaggaacatatcgaaaagaaagattggaaacacgacccgttgttcagccaattggactcttatactgttctttttgacaaggcggtggatatggaagcggaaaaggatactactgctaccagtgtgaagattgagtggatttatctgaagacaaacaagattaagagatattattttgaacgtttgaaggggttgtggaagttggaagccattgattttgcagatatgccggagaatgaggacagcaaggagagcttctatgagttctatgaacattttgccaatgattctcttttccagcaaacacgtcttcataatccattgaagtttgttacggtagacccggacgatgaatttcaaataattgaaactacccttgaggcaggacagtggtttgcttttcagccggtacttccccgcgagtttctgacaaatgtaaattatggacagaatgagaattctaaatcgaatacaaaggtaattgagataaaaggattcggtaatggatttaataatacgctttactttgaacggcgcaatgggttgtggaaattagtgcagtttgaagatttaagcgattaaccctgttaatgactgatgaaagaaataaaggagtattcattgttgccgcataatactttcggcatggatgtaaaggcgtctgtgtttgtagaatatgggtcggttgctgaattgaaggctatattatcaaataaggattatttaaaaccgtcatggttgcatattggcgggggcagtaatttgttgtttacggcagattatgaaggaaccgttctgcattcggccattcatggttatgaagtagtggatgagaatgataaaactgtcgacataagggtaggagccggagaggtatgggatgattttgtggcttttgccgtgcggcacggatggtatggtgcggagaatttatctttgataccgggagaagtgggtgcttcggctgtgcaaaatattggtgcatacggtgcggaggtcaaagatttgattgtttcggtagaaacactggaagtctctacggggcaggaacgtgtgtttgctaatgatgagtgtcactatgcctatcgtgagagtatattcaaaaaagaattgaaaggaaaatatatcgttactcatgtgacttaccgtcttggaaaacatccgctttttaatctcgaatatggtaatgtgagaggtgaattggagaaacgcggatgcgagataacattggacaatgtgcgtaatacagtaattgagatacgtgaagcaaagttgccggacccgaaggtgcaaggcaatgccggaagtttttttatgaatcctgttgtatcgcgtctgcaattcgaagcattgcaaagagaatatcctgagatacctcattataatatgggagaagatagggtcaagattccggcagcgtggatgattgatcgttgcggctggaaaggtaaacaggtaggcaatgcaggtgttcattccaaacaggctttggtattggtaaattgtggaggagctaccggaagagaaatcgtagatttgtcccggcagatacaagagtctgtctttttgaaattcgggataactgtttctcctgaagtgaattttatttaactgttatatgaagattacaatactaggcagtggaacatctacgggagtacccgaaatagggtgcaaatgcccggtttgtaccagcaatgatcctcgggataaccgtttgcgttgttcgggactgatagaaacagagggagtgcggattttgatggattgtggtcctgattttcgtgaacagatgatacgtctgaatgattttaaaccccttgatgctgtattcatcagtcacgagcattatgatcatgtgggtggcttggatgatttacgtcccttctgtcgctttcgtgatgtgccggtttatgcggaacgatatacggcagagcgtttgcgtcaacgtattccttattgttttgcagagcatctttatccgggagtacctcgcatcctgttgaaggagattgtgccggattcaccttttacggttggcaactcgaaggaagctaaggtagagattattcccgttcgggtgatgcatggcaaacttcctattttgggataccgtattggtaatatggcatggattacagatatgctgaccatgccggagtctgagtatgagcttctgaatggactggatgtactggtgatgaatgctttgcgtccccaatctcatagcacacaccaaaatctacaggaagcattggacaatgcaaagcgtatcggagctaaagaaacttattttattcacatgagccatcacatgggattacattcggaagttgagaaactgcttccccctcatgtgcactttgcttatgacggagaagtaatttctgtcggttagactgtcggttttaatgaatattggcaaagtccgtttagcccgcattcttcacatttgggagttctggccatgcatacatacctgccgtgcaagatgagccagtggtgggctgtcggaacgatttctttcgggatgtatttcatcagatatttttctgtggccagcggagtagtacaagttttcggtaccaagccgatgcggtggcttacgcggaaaacatgagtatctactgccattgttgctttattgaataccacgctttgaattacattggcggtttttcttcctactcccggcaattttatcagctcttccagtgtaccgggcacttcactatgaaaatctttaaccagcatctgtgccatgccgaccagatgttttgctttattgttaggataactcacactgcggatgtattcgtaaatgacttccggcgtagaggctgccagggcttccggtgtagggaaatcccgatagagaggcggggtaatcatgtttacgcgtttgtctgtacattgtgcgctgaggatgactgctatcagcagctcgaacggattgttataatgcagttccgtttctgcaacaggcattgcattttgaaaatacgttattaccttatcatataattctttttttctcatgattgtccttcacttattcccgaggtctttaatttaaattagttacaaagataatactgtttctcaaaaaagtgcgtatctttgcatccgaattagaaaaaatagacgtatgatgccgtgaatagcggtcgtgtattctagaacaccacgtaaaaaacaggaaaaatgaagaataataacactgtatctgtatcttttatgttgcttggcatactgttctgtgtatgtctcgttgcagcaaacttattggaaaccaaggtagtccggatttggaaaattactgcaactgccgggcttgtcgtattccctatttcttatatcatcaatgactgcatagccgaagtgtggggctttcgtaaagcaagactgattatttggatgggttttgccatgaactttatggttgtcgcgttggggcaacttgccattatgatgcctgcagcacccttttgggaaggggaagaaggatttaattttgttttcggcatggcaccgcgtattgctgtggcaagtttgactgcctttttggttggttcttttctcaatgcttatgtcatgagtaagatgaaactggcttcgggaggcaagaatttttcacttcgtgccatcacttctacattggtgggtgaaagtgccgattcgctgattttctttccgattgctttcggagggttgatgccggtgagtgagctgattaaaatgatgattcttcaagctcttttaaaaacagtttatgaaatcattatccttcctgttaccatccgtgtagtgaattatataaagaaggtggacggaagtgatgtctatgatgagaatatttcctacaatgtattaaaaatcaaagaactataaatcatgaataggagtgatgcattggttgtgttcagcggtgggcaggactcaactacttgtctgttttgggcaaagaaacattttagtaaagtatatgcgttgagttttgtctacggacaaaaacatgtgaaagaggtggaactggcacgttccatagctgccggggcaggagtagagtttgaagcgatggatgtttcttttatcggtcatttgggtaagaattcattgacggataccactattgcaatggaccaggataagccggccgatagtttcccgaatacttttgttccggggcgtaacctgtttttcttgagcattgcagctgtttatgctcgcgaacatggcattaaccatattgtgaccggtgtgtctcagactgatttcagcggttatcccgattgtcgggatgcttttatcaagtcattgaatgtcacactcaatcttgccatggacgaacaatttgttctccatactccgttgatgtggattgacaaggcagaaacatgggcactggcggatgaactgggagttcttgatttgattcgcagggaaactttaacttgttataatggcattcagggtgatggatgcggacattgtccggcgtgcaaacttcgccgtgaaggtttggaaaaatatctggcaagtaagaagtgatttacttgaaactaaaaaataataactatatggaaagaaaagatgaactgacaatattaggaaagaagacggaatacaagcaggattatgctcctgaggtgctggagtcttttgttaacaagcaccccgggaatgattattgggtgcgtttcaattgtcccgaatttaccagtctttgccccatcaccggacagccggattttgctgagattcgtatttcttatctgcctgacatgaagatggtagagagcaagagcctgaaactttacctgttcagctttcgcaatcatggcgattttcatgaagattgtgtaaatatcattatgaaggacttgattaaactgatggagcctaaatatatcgaagtaacaggtatctttactccacgtggcggcatctctatttatccgtattgcaattacggacgtccgggaacaaaatatgaagaattggcgcaatatcgtttgcgtaaccacgatttataaacggcgggcttccacccaaggggaagatgaacttaaagtcgttcactcctttcggtggaagcaaaatatctttaggataattccagccccaatgcttcttttaattttagcagattgggattctttttactcatcatctggaaacgttctacatggctataggcacgtatgttttcagtcggggcacttacccgtattgtcatcgttatttttcggttatggagacgttcccgcaagtggttttgaattgcctgaaccaactgcgtcatatatttttctaccatctcgttgtctaccaatacttcgaaagtagtatcattcagcagtttcggatgcatattcatcatacgtgccgagttcgctttctcttcaaccggcagattagctgcaaattcacgccaataatagtttaaatctttttcgttaaagatataatcctcatacgacgcactgcttgatgtagcggttgcatgggcggcagaggtgttttttgcatctgttttctcagctgtttgttcatgcaggggacggcgtatggacatgcccaacgtacccgctttaaatactggaattttcttttcttcctttgtcgtaggcagcgggttgggacgtccacccgtattcattccgtttgtagaaccttgtgttgcagtcggtgatgaagcagccggagcaacaccggtctgtgcagcggcaaccggagcctgaggctgcgattgcgtggcaacttcaggagttgcttgctgtgtaaatatgggttttatgtgattctttttagggctgcgcccaccggccaaatcgtcagcgtcgggcaaggtcagttgcgcacattgtatcagtgtcagctctaccagcaagcgtttgttcttgctggcgcgatagtttaaatcgcagtcgttgcacagcttcatggctttgtacaggaacttggcctcgcactttcgggcttgtgcctgataacgctcacggatacttgcacctacctccagcagttgtaaagttgaggcatccttgctcaccaataaatcgcggaaatgtgaagaaagtcccgtaataaagtggctgccgtcaaatccttttttcagtacatcattgaaaagcagcattgcttcgggtaccttgttttcaagtaataaatccgtcaatttaaagtagtattcgtaatccaatacgttcaggttctcgatgacactcttataagtaatgtttccccctgtgaagcttactacttggtcaaagatggaaagcgcgtcacgcatacctccatccgctttttgggcaatgacggtcagcgcttcgggttcggcattgatatgttcctgctttgccacatattgcaggtgctctgtggtatctttaatgccgatgcggttgaaatcatagatttggcaacggctcaggatagtaggcaatatcttatgcttttcggtagtggcaaggatgaaaatggcatgatgaggaggctcttccagggtcttcagaaaagcattgaaggcagcttgggacagcatgtgtacctcgtcaatgatatatactttatatttgccgatttgcggcgggatacgtacttgctctatcagcgaacggatgtcttctacggagttattgctggcggcatccagctcatgaatgttatatgagcgttgctcgttgaaggcaaggcacgattcacattggttgcacgcctctccgtcagcagtgggagacaagcagttgatggttttggcaaagatacgcgcacaggttgtcttgcccacaccgcgtggaccgcagaacaggtaggcatgtgccagcttgccggtagcaatcgcatttttcagggtagtggtcaaagcacgttggcccacaaccgattcgaatgtagcgggacgatattttcgtgccgatacgatataattttccataagcggagttcctttactaaatatgagttctgcaaaagtacataaattatcggtgtttttatgtatggttgcctgaaatatttctatctttgcgcaaaggagaaaaaagaacgttagatatgagtaaattgctgactatttggaactacatccggcaccataagtatatgattacgctgctggtatttcttgtggttattggttttttggatgaaaacagtctgattcagcgcgcaaagcaccgtaatgaaataagtacgttaaatagtgaaatagaaaaatacagaaagcaatatgaggaggataccgagaagctgaaagagttgaccagcaatcccgaggctttggagaaaatagcccgtgagaagtatctgatgaagaaaccaaatgaggatgtttacgtttttgaacaatgaagaatctttataatataatatttatggcaggtgccgggctgttgctgcttggtgcagtattgcaaataacccgttgggattttgctccttttatatacacagtgggtgcggtgatgttcggctatgtacaggtgatgggaaatcggtatgatggcaagaactttatcgtcaagcgattgaggaggcagcaaatctttggtgccattgcgttggtttttgcgggagtactgatgtttacgatgaaccgtaatgagtggattgtctgtctttccattgctgccatactcgaactgtatacagcattccgcattccgcaggaactggataaagagaacaagtagagcattctcatcttttgaataaaatgccggttttgttctattttgattcatctccgcacataagccaagaataaccggatgataagtcctttcatcagtcggattaacttctttttccttttaggttaagtcttcacgtacggcaaacttttatagtcttcggctgtggactgtatagtctgctgcaatggactgtacagtctgttataacagactgtaataatcttccgcttaaaaggtcttagacagtggtaagaaataacttaatcttccttttgtttacagataaaaagtagatgaccggtcaccccgtattgtataatttccggatttcgaggggaaggaaggtaaaaaaaactaaaccggtctatcccatcgtcagctgtaggggcagggtttgcctgcccgaaggcacaaagcaaactgttttcgggcgagcgaacctcgcccctataaactaaacgacagcattatccacgttttgacagcctcttttttagagacgaggaaggtagtgtgctaaaatgaaaacaaactaccactattccacaatagtcatttcatctatcagatgttttgcacctgcaaacttatcgatgataaacaaagtatatcggatatctacgcaagcggcacgttgtaactgcggattgtaggcgatatcacctgtcaaaccttcgtagttacggtcgaatccggtaccgattaattcgcctttactgttgaagaccggtgaaccggagttacctcccgtattatcggtggctgtggcaaagcagataggcatttctccgtttttcatggcataacggccgaaatccttgttgttatacaattctttcagttttgccggcaccacgaactcgaaattatccgggtcttctttttccattacgcctttcagtgtcgtataataactgtattccactccgtccttcgggctgtaagagccgatttttccgtaagtgagacgtaatgtagagttggcatcgggataaatgggtgtgccttcctgttgtttcagtttcatcataccttccacccatgtcttgtgtgcaaggttgtatgcatccgtttctgctttcatagcctggtcggtcttttcatacccttcgtctacggatttggcatattgcaccatcaagtcgttttctatggttttggcatccggtttggccatgaaccggtcaaaggcttcacgactgcggaagatagaagtatcgaaacaggcatctacaaatgcatcgatatctcctttgaacttcttgtctatcacccggaatatgctgatgcgctgttcggcaggaatcagttcggcataagtctttaacagtgcctttgagactttgcggtctacttcgggactgtaatctttattaaagaacttgtcggcctgtttacccaaccggctcaatgcatgatccagcggattgatttctttggtagcgtggggcactttgtaaccttgtttcagtgcttccagcacttggtctgtggaaggaattttatagaattccgttcccagtttgcaaacttcatagatggcttgctggtgataaacagcgtcatggcgtttgcttacgatttcgcggatggcatcaaatgctttttgataagtatctgttcccgttttgcggccgtatgccagaagtttttcttgttgctgcttcttggtgtcgagcacattgaggtgaatcagtccttcgttcatgccgatggcattcttccagtagttggcagaagatgcatacttgctggcatactggatgcgtactttatcacttttcagcatttcttcgagcagattgttgaggcgtaccgtacgcactgtcttacgcatgaaattggtagtctgcatacgttcttccacctcatcggaaatcatataacgccagttgcgtccggggaatcccattacgaaagtaaagtcgccctctttcacaccgcccagattgatcgtaaggtgtttcttcactttcagggggatattattctcattgtattcggccggtttaccatcgggggcggcatatatgcggaacatggagaagtcaccgcagtggcggggccacatccagttgtctgtgtcggctccaaactttccgatggaagaagggggagcacccaccatgcggacatccttgtagatggtctttacaaaaagatagtaacggtttgctccgtagaaaggtttcaactccaaggccgtgaagggagtgacttctatgttctcctgcttggcaaagcgttcggccactttgccaaggtaagaaggggagaggtagttcaggccttccgggtccttgtccttagccaactgttcttttacataaggagtgatatccagaattttgtcgataaaagtaatggtcagcccctcgcaaggcaattcctccttgcgggtcatcgcccagaatccgtctgtcaggtagtcgtgctccaccgaactgtgttgctggatatatccgtatccgcaatggtgattggtcagcaccagtccttctgctgaaataacttcaccggtgcatcctccgccgaaatgtaccacggcatctttcaggctgatactgtcggggcaatatactttgtcaatgccgatgtccagtcccatgtcgtacatggtggcggcattttgttctttcaggtctgtcaacatccacataccctcgtcggcatggccggcaagggtggtgaagctgagaagtgataatatgattgtctttttcattattctactattgtcatttcgtcaatcaggtgaccgcaaccacccagtttgtcgataataaagagtacatagcggatgtctacggcaatacagcgttggaggttattgtcaaagttgatatctccactcagtgattcccagttgccgtcaaaggcagtaccaatcagttcaccgctgccgttgatgaccggagaacctgagttaccacctgtaatgtcattggtcgtgaggaaacaagccggcatctcaccgttaggcaatgcataacgtccgaagtctttggcagtataaagctctttcagtttggcgggaactacgaattcgggattggtggggtcttctttttccattacacctttcaatgtcgtataatacttgtagtgtataccgtctttcggattataagatttcacgttaccataagtcagacgaatggtgaagttggcatccggtgctttaggttcgggagaatacatttcacataagccgcgtacatacgttttgtgcagcagctccaatccattgagtgcagttgacaattccttaaccaatttatcacccagtgcatatttggatttgacaaaagcatacatcgggtctttttcaagagcttttacattgggcttgctgatgaatttattgaaattcttttcattggagaagatggaattatcatataaattgtcgatatatgcatcatagtttcctttgaaatcgttttggattgtctggtagaaagaaggcaacgcgtcagcttctaccatttcggcatagaggggcaacagggctttggctactttgcggtctacttcgtggtcataatccttgttgtgaacggattcataaacgctcttcatcatatcggtatattttttgataccggctttatctttgttctttaccgctactttcaggctgtccattacaatataaggagtaccgaactcaatgccgcttctcaaaatttcattgaagcaagtgaattgataaagaacagggttgctcttttcgataatggcatcgatttctcctaccacctttgcatagtcggcccgattgttatcctttgcaaacttggcaaagcgggcttcctgagccgctttcgtttccagtactttattgtctgcgatagctttgttcataccgatggaattcttccagtagttactgcttcccgcatatttgctggcatactgaatgcgcactttgtcgctggctgccatttcttttttcagtacatcctgacgggtaccgcgaatgcggatacggggctcattgctggcggtcattcgctgtttgacttcgctttgagtcaagtagcggctggtgcttccggggaagcccataatcatggcataatcaccttcttcgatacctttcagtgagatagccaaatgtttcttagctttgagaggaacattgttttcattgtattcggccggttcaccgttagcgtctgcatagatacggaatacagaaaagtcgcaagtatgacggggccacatccagttatcggtttccccaccgaatttaccgatagatgaaggaggtgcggcaaccatacgtacgtcactgtatgtttttaaataaatcagataaaatttgtttccggcatagaaaggaagcgcttgtgcactgatacccggctttccgttcaggtcgcttgctttcagttcctcgttggcaaatttatgtaagaaaggctgaccgaatgtttcttcttccttcacttctccggcttttacctttgcatttattttatctgtgacatccacaatacgttctacaaatttgaacttcaagcccggagtagggagttcttctttacggctttttgcccaaaaaccatccgtcaggtagtcatgttctactgaactgtgttgttggatagaagcatatccgcaatgatgattggtcaggataagtccgtcgggagaaataatttctccggtacatcctccgccaaagatacctactgcatctttcagcgaaactttgttggggtggtagatgtcgtcggcatccagcttcagaccctgtgctttcatgcggtctgtcaagtgctgttcctgcatgagttgcaacaaccacataccttcgtctgcctttgatggcaagaatgccacgcacattaatgcgagcattaagagtttaaatcttttcatgttgtgtactaaatgttatttctttatacttatatcggttacaaaaatagaaaaaaaacggcaagtatcagtcaaaaaactcaatcacagtgataatcttatattaagttttaaattataataaaaaatttttgtcagtggattatagattgtacctttgctcaccaaaaagtagtaaagggtgtgtagatgagcatgaataaactttttttctctgtagtgtctttattgactttgacctcgtgtgccagcgaatataaaatagaaggtagttcttctgtttcgaggttggatggaaagatgctgtttataaaagttcccgatggtgaccgcatggtgaaggttgattctgccgaggttattcatgggatatttaaaatggaaggagttttggattcgtccgttattgcttctttatatatggatgatataaatatcatgccttttgttatcgaaaaagggaagatagccattaacatagacaatgcccgcatcgtggtaagcggaactccgctcaatgaccgtctttatgattttgtgggaaagaaaacttcgcttgatgaccgtgcctacgagttagagcgtaaggaaagccgtatgattatggatggaaaagaccccaatgagattcaccatgttattatgacagaacgtgagaaactggctgctgagatgaatgacttggcaaagcagttcattaaaaagaattatgataatgtattaggaccgggggtatttatcatgatatgcagtaactttgattatccggtcatgactccgatgattgaggaaatcgttaaagatgctcccgacagtttcaaaaataatccgatggtgaaggagtatatcacggtagctcgtgccaatatggagaaactgaagagtacacaacctgttcccctcgattaaagattattgatcggggttgtccacttttccctgatattcttccggcaatgatttttctatttctttgtaagcttcttccatggttgttttgatattgtctattccctggctttggggatatatgggtttatgaatgatcaatgtcatcggatgccatgagacgaaacctccggtacgcgggagaacattgaatgaaccgacaatagtaagcggtacgaccggcagttgtaactcatccgccaactggaaagctcctttcttaaaatatcccatgtgtcctgtaaaggtgcgtgccccttcgggaaatacgaccagtgaagttccgttctgcaatacattacgggcatgttcgattgtctcttttactttcttcggtccggatttatctacaaaaatgtgacctgccgcttcgcatgctttaccaacaaaaggcattttccgcaggctcttcttcatcatccatttgaaattgcggcccaaaaagccgtaaatgaggaatatatcgaatgagccctgatggttggcaacaaagacatatgaagttttgtccagtacttcgggatgccctactacttttacgggaatcagcaatacataacagaataattgtgaccagatttttccggggtaatatccccaaacatgcgggtcgcctatccatgaacctacaatagtgacaagggccgtaagtattgtcaatacaagaagtatgggaagtgctataaaaatctgatataaaatatagagtgctttcattgttctcaatttttaaatcatacaaagatacaaaaactcgcccacattcggataacttttg

SEQ ID NO: 6818 - DNA, 2036 bp, Unknown
  gut microbiota DNA sequence
ctcctacatgacaataattaaccatgaaggtagctaaacgaacgagtaacgacacctatttttggtataatctgttttatttctctacaatggctttggctttctccagagctacattgatattgggacaaatgttgtcttcgccgagcaagtcataaaaaccggctttctccaatactttatgcaccttttcgtttacgcctgaaagtacgatatggatattttctttcttagacatttcacaaaggttagtgaggttgtgaataccggtagaatcaatgaacggcactttacgcatacggatgatacgcactttcgggcggtcgcccagttcagacatgatttcttcaaatttagtggcgatgccgaagaaatacggaccattgatttcgtatacttctacgccttcgggaaccatgagatgctcttcgtgcacttccaaatcggattcattattaggatcgatttcattcttgataaccgaaatatcggtggtttccataacgcgtttcataaatagcacgcaggcaatcagcaatcctacttcaatagcgactgtcaagtcgaaaatgactgtcaggaagaaagtgatcaataatactgtcacgtccgatttcggattcttgagtaatgccttaaaggtgcgccagccactcatgttataagatacaatgactaacacgccggccagacaagccatcgggatgtattgtgccaacggcatcaggaagagcaggatgagtaataatacgacagcatgaataatgccggccaccggagactttcccccattgttgatattggtcatggtacgtgcgatggctccggtagcaggaatacctccgaaaagaggagcgatgatattggctgcaccttgggctatcagctctgtgtttgaatcatgacggtcaccgattacaccgtcggcaacggcagccgaaagtaatgattcgatggcacccaatacagcaattgtgatggctacgggaaacaagttcttgattgcttcccaattcaattcgggtaccactgcatcgggaagttgtgattggatggtgaatcggtcgccaatcgtatcaatgcaggtaattcctccgtatgttttcatcagatagactgcaatcgtcactacgatgatggatattaacgaaccgggaatcttttttgagaatttgggagtgatggcaatgatgaatacactgaccacactgacaatggcattccaccagtttactgtatcaaagtggcggaaataaatcatccatttgccgataaagtctccggggactttctctccgccaaagttgagtccgaagatatcagctatctgtgtagtgaagatggtaacggcaataccactggtaaagccgacaatgatgggatagggaatgaatttgatgacagctcccagtttaaacactcctaataaaacaaggagtacacctgccatcagtgttgccactgtcagtccgctgatgccatattcttgtatgataccgtagatgataacgataaacgcgcctgtcggtccgccgatttgtactttgcttcctcccaataaagaaatgataaagcctgcaacaatagcagtgataatacctttttcgggagatactcctgaagcaataccaaatgcaatagccaaaggaagtgcaacgatacctacgataatgccggccatgaggtcggccatgaagctctccttcgaataattttttaatgtagtgaagagcttcggtttaaattcaaatgctttcattttataatttactttatgctacgaaatgtgttcaacacagaatggaggtgcaaaattagacaaaatttatctataaattaagggattattgattttaagttcttatttttgttgcatgaagggtgttcttcgtatattattggggagtttgagcataaatagctttcttgtttaagaaacttttgtagttgatgaacatattcaagccgtattgcgtttattttatataaatagaatgtttaattaaacataaaattataattgtaataaatacaaa

SEQ ID NO: 6819 - DNA, 1266 bp, Unknown
  gut microbiota DNA sequence
cgttacgcctctgtaggggatgtcattgtagtttctatcaagagtgtaatcccctctagtgatgttaaaaaaggtgcagtatcaaaggctttaattgtacgtactaagaaagaaatccgtcgtgctgatggttcttacattcgttttgatgataatgcttgcgtgttattgaataacgcaggtgaaattagaggaagtcgtatctttggccctgtagcaagagagttgcgtgctgcaaacatgaaagtggtatcacttgcacctgaagtactttaattttgtaaaagatttaagtaatgagtaaattacatattaaaaaaggcgatacagtttacgtaaactctggtgaagataaaggtaaaactggccgcgtgctaaaagttcttgttaaggaaggacgtgcacttgtagagggtattaatatggtatctaagagtaccaaacctaatgcaaagaatcctcaaggaggtattgttaagcaggaagctgctatccatatctctaacttgaatgtggttgatcccaagactggtaaaccgacacgtgtgggaagaaaagaaagttctgatggaagaacatttgttcgttatgctaaaaaatcgggagaggagattaaataatgagtaatactgctagccttaagaaagaatatgcagagcgcattgcgcctgcattgaagaatcagttccagtattcttcatctatgcaaattcccgtacttaagaagattgttatcaatcagggcttgggtatggctgttgcagacaagaagattattgaagttgctattaatgagttaacagcaattactggtcagaaagctgtagcaacagtttcacgtaaagatatcgctaactttaagttgcgtaaaaaaatgcctattggtgtaatggtaactttgcgtcgtgaaagaatgtatgagttccttgaaaaactggttcgtgttgctttgccacgtatccgtgactttaaaggtatcgaaagcaagtttgatggacgaggtaactatacattgggtattcaggaacaaatcattttccctgaaataaatatcgatagtattactaaaattctcggaatgaatattacctttgtaacttctgctccgacagacgaagaaggttatgccttgttaaaggaatttggtttaccgtttaaaaactcaaaaaaagattaatatattatggcaaaagaatcaatgaaggctcgtgaagtaaaaagagccaaacttgtagccaaatatgctgaaaaacgtgctgcgttgaa

SEQ ID NO: 6820 - DNA, 2025 bp, Unknown
  gut microbiota DNA sequence
tgtttatttcaaaaacgggtttacaagggcagcaggataactgactgcctttttttattgcctttttttatctactaggcaagttatatagcatctacttcgatatatccgctagtcgctaatatacaaccatttaactatctattccgaatatcgcctatctgtcaatagccataaatataaactattgtcaaaagaactacataaagtcactattcttgtctgttagcttactgacagaagaaaataacggcaatatggcgatatagataagctggctatagaaagtgttcctttgattaggtacaccgcccagaggtgagtataatcgtacatagataaaaagattggaattaccacgagcagaggcataaccagaactgcctagagtaattcaagcactatagattttacagtatataatgaaactaacattgaatcatggagtattacacgtttgaacaattaaaggaaatggctttcaaggatggcattaccggcaataaggtagctgttggtatatgggcaaagatgaacggctttctaaagaaaaagaagcagataaacaagcgtagaattacattctactttaaactggatgattggcaaccttataatgtatgactgccaaagcctttctataaggcagcgtcaaaaacgctacatagtgcctatctcagcagacatagttagccagataacacaagaaagtaaattacagatgttttttaaagatagtcttagtgaagtggtactaaggaaaaatgaaccgtagtctatgggaaatttgacaccaagtataggggaaaaatgacactctatacattactacaatactaacattacaacttagataattcagtgcttcgcacttcattatcaaatttctagctttcgtagataagtaactaatgataaaaacgtaacattatgatgatatacaacaacagactgttcaataccagaaaggaattgaagcggtatctaggtggaacacgtaaatataacaaggctctgaaaaacggagagatttataacatatatcaagaagaatcaaataaccaaccgtttgcgcacaatggaacaacaatatacgacactgacaaaagacattaataatgtagataatgaggatgccataatatatgcctatataaagtcaaggatgaattataaaacttccattgcagataatgttacggaaaaggagatttccgaaaaactaggcatatcattaagcactgtaaaaagaagcgttgcaaggctaaagaataataagaatcttattgataaagtaataagtaacaatgtaatagcagagggaagctacaagacctacaacaaatatcatgtggcaaaatgtaatgagaacttcttctatatatataacagtttctttaatgatgatatgaacatagcaaaagccagtgaacgaactaaattaaaaaacttcttgcttaaattaaaggcaatatgtaaaaaggaaacgaacaagtatataagtgaaaatccgtatctggatgggcttaacaaaacggaactatctaagaaactgggcattgatgcaaagacattaaataaatatctggaaatggcagtcaatgcaggacagataaaatatataactaatggtttgctgatactgaacaagtctattattccagattttaaagaggctgattcagatacaagaatctatcatattatctatgactggtgcattgataacggtgttgttccaccagatagaaacgatgaaataaaaataataggaggtgacagtatcagaagaaaaaacagcttacttcttgaaatagctggaaagctagactatatgaaagatgaagaaattaggagtttgctaactaatagaataacttccgaagaaataactttggaatatatagctaaagtgttgaatataaaaactaaaaagaagaaagagtatataccgtgttccatcatcatgcttgactaaactaactaatcacctatattcagtttggctgaaagtcaagagagcag

SEQ ID NO: 6821 - DNA, 221 bp, Unknown
  gut microbiota DNA sequence
ctagcaatagcggttgtgaaggtgctgcatggttgtcgtcagctcgtgccgtgaggtgtcggcttaagtgccataacgagcgcaacccttgccgatagttactaacaggtcatgctgaggactctgtcgggactgccatcgtaagatgtgaggaaggtggggatgacgtcaaatcagcacggcccttacgtccggggctacacacgtgttacaatgggggg

SEQ ID NO: 6822 - DNA, 36343 bp, Unknown
  gut microbiota DNA sequence
gtcttaaaccggctaaggaactccttgcttaatacctcatcaggcactgcttgattctttgctttcataattttcttcattttgcaaatctataaaataaaaaatacggaactcaagctgaatcccgtatttcacatttacacaaaatattttatagtgccaaaaaaggattgaatactaaaaaaaatcactttttcagcatcctcgctcattacgacacaccttctttatacctctatcttgaaaaaaattatctcggagacatattattctccatacatacgtgcacgcatttccttaatatgatccgaagtgatgtattcatcatattccatcatcttgtcgataataccgttcggagttaattcaatgatacggttggcaaccgtttcgataaattcatggtcatgagaagcgaacaatatatttcctttataactcttcaagttattattgaaagcttgaatagactccaagtccaagtggttggtaggtgtatcaagaatcagacagttggcattgcgcaactgcatacgggcaatcatacaacgcatcttctcgcctccagaaagaacattcacttttttcagcacttcttcacccgagaacaacatacgccctaagaaacctttcatatagacttcgtttccttcaccaaactgacttaaccagtctaccagatttaaatcgcattcaaaaaaatcagtattatccaacggcaaataagcagtggttattgttactccccagtcgaatttaccggcttgcggcttacggtttccattaatgatttcaaaaagagcagtcatggcacgagggtcacggctcaagaatacaatcttatcccctttttcaacattaaagttcacgtcattaaacaagaccactccatcttctgtctcggcacgcaaccccgacacttctagaatttggtttcccggttcacggtcgggagtaaagataatacccggatatttacgagaagacggtttaatttcttctacattcagtttctccaacatcttcttgcgactggtagtctgtttactctttgccacattcgcactaaaacgacggataaactcttccaattcctttttcttctcttcggcttttgccttttggttctgctgctgacgaagtgccaactgactggactcgtaccagaaactataattaccggcaaacatattcactttgccaaagtcaatatcaaccgtatgtgtacaaacagagtcaaggaagtgacggtcatgactcaccaccaatacggtatgctcaaagttggacaaatattcttccagccatgtcactgtgtccatatccaaatcattggtcggctcatcaagcaacaagttatccggatttccgtaaagagcctgtgccaacataacacgcaccttttctttaccactcaagtcacccatcttcatataatgcttgtcctccttgataccaagtccgctcaacagcatagccgcatcgctttcggcattccagccatccaattcagcaaatttctcttccaactcggataccttcaaaccatcctcatccgtaaaatcggtcttggcatacagttcttcgcgctgcttcataatatcccataatactgtatgccccatcataaccgtgtccattacagtatattcatcaaatttgaagtggtcctgactcaatacggacaggcgttcccccggccccagtgtcacagaccctttagtcggttccagttcacctgaaattgctttcagaaaagtagattttccggcaccgtttgcaccgattactccataaatattgccattggtgaacttcatattcacatcattatacaatactcttttaccaaattgaatggctaagtttgaaactgtaatcatccttatataccttagtttatatattatttcgatttttgaaagtgcaaaggtaggcattttaattcagaaaagtatgccagtgtgacatattttccctacttttgcaaaatatttgagacagggaaacaactaggcacgaaatttgttagcaataaattaacctaaaaaccctgactgattatgagtaagaataagaaaaacaaaaagtttaataagaatatgaacccaacagagaaaaaccaacctcaggatgaggaagttttgaaaaaacaagaaaagacagaagaagctgctcttgacgaagagactcagaaggaagcagcagaagagctatctgccgaagaaaaggtaaataaggatttggctgacgctcaaaagaccatagaagaacaacatgataagtatttacgtctttctgccgagttcgataattaccgcaagcgtaccatgaaggaaaaagcagagttaattaaaaacggtggtgaaaaaacaatctctgccatcctgcctattctagatgatttggaacgcgctttgaatatttcagagacctcggacgatgtaaaagcaatgcgcgaaggtatcgaactgatttataacaaattcttaaaggtattaaatcaggaaggacttcagaagatagaaactgacggcaaagattttgataccgattaccatgaagccattgcattggttcccgcaccatctgaagaacaaaaaggaaaaattctggactgtgttcaaacaggctataagctgaatgataaagtaatccgccacgccaaagttgtagtggctcaataaaatagtatcataaaacaacatggcaaaaagagactattacgaagtgctggaagtggacaagacagccactattgatgttataaagaaagcataccgcaagaaagcgatacaatatcatcctgataaaaatccgggagataaagaagctgaagagaaattcaaagaagcagccgaagcatacgatgtgctaagcaatcccgacaaacgtgcccgctacgaccagttcgggcacgccggtatgagtggagctgccggtggcggttttgaaggattcggacaaggtatgtctatggacgatattttctctatgttcggcgatatattcggaggacgtagtggaggtttcggaggattcagtggtttcggtggaggcggacgtgcctctcaacgcaaattccgtggttcggacttacgtgttaaggtcaaactgagcttaaaagaaatttctacgggagtagaaaaaaaattcaaactgaagaaatatgtagcatgtgatcactgccacggctcaggcgccgaaggtgaaggaggtacggaaacttgtcctacatgtcatggaacaggtagcgtgacacgtactcaacaaagtatctttggtatggtgcaatcacaaagtgtatgcccccaatgtaacggtgaaggtaaaatcatcaaaaacaaatgcaaggtttgttcgggtgaaggcatcgtatatggcgaagaagtggtggaagttaaaattcctgccggagtagccgaaggtatgcaactgacagtaaacggaaaaggtaacgccggaaagcacaacggagtaccgggtgacttacttgttgtcattgaagaagaatcacatcccgacctgattcgtgatgaaaatgatttgatatacaaccttctattgagtattcctacagctgcattgggtggaactgtagaaattccgactatcgacagtaaagtaaaagtaaaaattgaagcaggaactcaaccaggcaaagtgctacgattacgaggtaaaggattgccaaatgtaaacagctatggatatagtacaggtaccggcgatttattggttaatgtcagtgtatacgtacccgaaacactgaataaagaagaaaagcaaataatggagaagatgcaggaatctgacaacttcaaacctaacctgagcatcaaggaaaagatattcaaaaagtttaaaaacttctttgattaactatctcatagccgttgtgctatgaccaaaaagttactttcatccactatagagaaaatgttttcatctttacagtggatgaaagtgtattttacctcttatatctgcccatttttatcatatactatcacaacggacaataacttttacgattatgacttacgaagaaacactggattatttatataatagtgcccccctcttccaacacataggaaaggatgcctataaagaaggattggaaaacacttatcttttagatgaatatttcgaacatcctcatcgcaaattccataccatccatatagccggcaccaatggaaaaggttcatgctcacacacattagcagcaattctacaatctgcaggatataaaacaggcctctatacatctccccacctaattgattttcgtgaacgaatccgcatcaacggaactccggtttctcaaaagttcgtaattgacttcgttgaaaagcaccgtaccttcttcgaaccgctgcacccctctttctttgagcttaccaccgctatggctttccattattttgctactcaacaagtggatgtagccattattgaagtgggactgggcggacgcttggactgcaccaatattattcatcccgatctctgtctcattaccaatatcagctttgaccatatacagtttctcggtaatacgctggcaaaaattgccggagaaaaagccggtattatcaaagaaaacacaccgatcattattggtgaaacaactcccgaaaccaaacctgtatttattgaacgcgcacagagtgttcacgcccctatcctatttgccgaagaagaacatctcttacaaagttcttctgtcaacgaaaccggtgaacgaatttatcaaacaacagacttcgccgaactaaaaggagaattgggaggactttgccaacttaaaaacaccaacacactgctttcttccattcgccaactaaaaaagataggctaccacctcaccgaagaaaatgtgcgcgaaggctttgcccatgtttcaaaactgacaggactgatgggacgttggcagaaattggaagagcaccctgcattggtatgcgacaccggacacaatgtaggaggcatttcctacattgtggaacaactgaaacatcaaaaatatgaccgcctgcacattgtaatgggcatggtgaatgataaagacatcagcggagtgcttagcatgatgcccaaagatgccatctattattttacccgtgccgatgtaaaacgcgccctgccggaaaatgagttgcaagcgttagcacaacaagtcggtttgcaaggtcagagttaccccaatgttaaagcagcagttgaagcagcaaaacaacattccagtgaaaaagattttatttttgtcggcggaagcagctttatcgtagctgatttattaaaatttcacgtttagcaagttcacttttccacaaaaagtttgggaataccgaagaaaatctttttatttgcaatagttttgtacttactataaaaagattttcaataatatgataaacacatcaacttccgatgagaatttgtgcggtctgaaacggaccgactttcaaaaaacagtagatgggaaacaaacagaccttttcatactaaagaatgaaaatggagttgaaatagctgtcactaattacggtggtgctgtcttagctataatggctcccgataaaaacggcaaatttgctaatgtcatccaaggacatgatagtatagaccatgtaatcaacagtcatgaaccttttttgagcacgttaataggacgctacggtaatcgtatcgcaaacggaaaatttcttttagatgggcaggaatactcactgacaatcaataacggaccaaactcactacacggtggaccaaccggtttccacgcacgtgtttgggatgccgaacaagtaactccgcaaagtttgaagctacattatttatcggctgatggcgaagaaggctttcccggaaatttggatgtaacagtagtttatacactgagtaatcaaaatgaattcatcataacctactcagcagtaacagataaaacaacattagtcaatctcactcaccacggttttttcagtctttcaggtattgccaatcctacagcaagcgttgaaaacaacatcgtaactattaatgcagacttttacactccaatggataatgtatctatccccaccggcgagatagccaaagtagaaggtacaccgatggattttcgtactcctcatgctgtgggtagccgcatcaatgacaaatttgaacaactagagtttggtgccggctatgatcattgctatgtactcaataaacgcgaacaaggaacccttagctttgctgctaaatgtgttgaacctgaaagcggacgcagcatggaggtttacaccactgaaccgggtgtccaagtatatacagccaattggcacaatggctttgaaggcgctcacggtgccactttccctgccagaagcgctatctgctttgaagcacaacatttccctgatactccgaataaaggtcatttcccttcttgtgtattaaaaccggaagaggtataccaacagataaccatctacaaattcggcgtagaaaaataagcaaaacaattttaaaataaacataaagaacgatttaacaatggctcaaaaaacaaaacaatggggtgctatcatcatcatgattgccctttttgcaatgattgccttcgtgaccaacctgtgtacacccatggcaacaattatcaaaaaccaaggaccaatttcaaatgtgcttgcacagattggtaactatggtaacttcatcgcttacctcgtaatgggtattcccgccggtatgcttatctctaagtatggctataaaaaaaccgcccttatcggtcttgtcgtaggtagtgtgggtatccttatccagtggatcagcggtctgatggatgtagataataatcttggtcttgtatttgctgtttacctgattggtgcttttatcgccggtctgtgtatgtgtatccttaactgcgtggttaaccccatgctgaaccttctcggaggtggtggtaacagcggtaaccagctaattcagattggcggtgtgttcaactctaccgcagctgtagcttgttatattctgatgggagctctcatcggtgatgctgcaaaagccaaaatttccgatgcaacacctgccttgatgattgcacttgctatcttcgttgtggctttcatcgtaatttcattcactaaaattgaagaacctaaacaagctcctgtacagctagaccttatcaaaggtgctatgagttaccgtcattttgcattgggtactttgggtattttcgtatatatgggtatcgaagtaggtgtacctaacttcgtacaacagtacctcatcagtgactacggactccccgccagcacagtaggtatgattgtagccgtttattggtttatgatgctgattggtcgtttcgtaggtgccagtattggtgaaaaagtatcgagccgcaccatgattaccgttgtatcatcagctactatcatcctcgttttgtttggtatgtttgcacctaccatcacggtagcttttccgggtgtgaattggggtacactcgaaattatttgggaagaaattcctttgggcatcttctcattcctactggtaggtctttgtacttcagtaatgtggggagctattttcaatatggcagttgaaggtcttggcaaatatacagccatcgcttccggtatttttatgacaatggtattcggttgcgctgtaatgatgtttatccaagctacagttgccgacctcgtaggctacattcagagtttctggtgtgtagtagcttgcgctgtctacctgctgttctacgcccttatcggcagcaaggttacaagaagagaagcagaataataataaatgcgatatattaacctttaaattatagaattatcatggacatagaatatgtaagaagtcgcttcatcaaacattttgatggcacaacaggttcagtatatgcttcacccggtcgtatcaacctcattggtgagcacaccgattataacggtggtttcgtatttccgggtgctgtagataaaggtataattgctgaaatcaaacctaacggaacagataaagtacgcgcttactctatcgacctgaaagactatgtagaattcggtttgaacgaagaagatgctccaaaagccagctgggcaagatacatcttcggagtttgccgtgagatgattaagcgcggtgtaaacgtaaaaggctttgatactgcatttgcaggtgatgtgcctttgggtgccggtatgtcttcatcggctgcactggaaagcacatatgcttatgctatcaacgatttgtttggcgacaacaagatagataaattcgaattagctaaaataggtcaggcaactgaacacaattattgtggcgtaaactgcggtatcatggaccagtttgcttctgtattcggtaaagcaggtagcttaatccgtttggattgccgttcattggaataccaatatttcccattcaaaccggaagggtatcgtttagtattggtagactccgtagttaagcacgagttggcatcatctgcatacaacaagcgtcgtcagagctgcgaagctgctgttgccgctattcaaaagaaacatccacatgtagagtttttacgtgattgtacaatggaaatgttgcaggaagctaaagctgacatcagcgaagaagattacatgcgcgcagaatatgtcatcgaagaaatccaacgtgtacttgatgtttgtgatgcattggaaagaggtgattatgaaactgtcggccagaaaatgtatgaaacacacaatggcatgagcaaattatatgaagttagctgcgaagaacttgactttttaaatgatatcgcattcgattgtggcgttaccggctcacgtgttatgggcggtggcttcggcggatgtactatcaacttagtgaagaatgaactttatgaaacattcatcactactgcaaaagaaagattcaaagaaaaatttggtcgcagtccgaaagtttacgatgtagttatcagcgacggttctcgtaaattgatctaaactcacagatatgtgaacttaacacaaaagtcaaaataaacttaatcagccgccattgaccaatcaaaaatcaatggcggcttttttccaaaacaaaactatattatgaaaaccttatgcacattattattggctttgggaaccatatgttccatacaagcccaagaacgtaaagtcaaccagcctccgtttattgttcgcaacacatccacagtggagatcaaccaaatcacactttccgacaccgctaccgttttggatatcaaagcatattatcgcccacacaattggattagaatcagcggagaaagctatctgttagctgataacggtaaaaaatatcccatccgttcgggcagtggcatcacccttgacaaagaattttggatgcccgacagcggtgaggctactttcagtctgatatttcctaccctgccggctaccgtaaaaacgatagactttatagaaagtgactgcgaagactgcttcaaaatatggggaatttctttaaatgggaaattacccgaattagtgttaccggaagaggtaaaacaaaaaacaaatgctgtagaaatattaccggctcctcaattgacaatgggaaaagctacactgagtggaaaacttttggactataaacataactatcaactcaacctaaatgcctacctttgtgagttattgaccggtaatgaaaacgaaattcccatagaaatcaaagaagacggcagcttctgcacagcaatcgacctctctgctccgaccagccttgatttagtgatgggaagagagaaaatcagtacattgtttatgactcccggagaagacaccaaaataatcattaatttacgggaaatcagccgttcacaaagcaaattattgaaacagaacaaaccggaaggagagaaactatatttctcaggcacaatggcgcaactcaacaaaaccctgaacagcaaatgggcaaccgaatgggaaggaaaagattttctaaaagaaatatataatatgtcggcagaagaatataaagcctattgcctgaacaaataccaaaacagaaattcaatcatacaaaatgccaaagaactggataatgcatcccgccaattattgctgatagacaataaatttcaatgtaccgcagcactcaacagtatcaactcaaatctgatgaatgcatatatatattatagcggactacccgaaagagaagcattcaaaagctataaagcccccgacctgcccaccaactattatgactatataagaaccataggagcactgaacagcaatgaaatgctttactgcaacggctattccagaatgctaaaatatttaggctatgaaatacgtgtccctttggacggcaatatgaaagacatattcagctatattatttcgtcagaccggacttcagccgaagatgcagcagtcatcaaagcatataaagacagtattgatgcaggaaaaagcgccaaagcattagccggaaagatgcaagacttgagaaagaaatatgacccgctgttcatggaatacagcaagaaagtacgagaagccggcatgaaagtagtaaccaactatatgggtgctgataaaggccttttctttgatatacgcaaagctatgaaatatgccgaaaaaatcaccgacttctgtccgttgactgaaaccgattttcaggaaattcgcctgatggaaaacccttactatctggaaaaactgacttcgatgaataataagctgatagaaacgattgaagccaataaaaagaaaacgggcttcaccatcaacgaaaccggcgaagtagcaaatgaagatttattcgcttccatcatttccaaattcagaggaaaagtcatgctggtagatttttgggcaacttggtgcggcccctgccaaaaagcaatgaaagatatgaaaccaatgaaagaagaattggcagacaaggacatagtatatttattcattgccggtgagaactcaccaaaagaaacatgggagaacatgatttcagacatccatggagaacattatcgcctcaccaatgcacaatgggcttacatcaacaaacaattcagcattcagggagtgcccacttatatgattattgacaaagatggaagcatcaaaaataagtttaccggcttcccgggagtagatacggtaaaaaaacaattgctggaacttttataaaggaaacaaaccataaaccatacaagtttgttaaaccgaaatatgaaaatatattctatagaatattcttcatagagttaggaatgacattatcaaagatttaattatctttgcaccataaataacattttacgctatgaatgataagaaactaatgaatcgcgcagccgataatatccgtattttagccgcagcgatggtagagaaagccaactccggtcaccccggcggtgccatgggtggcgctgatttcataaacgtactcttttcagagttcttagtatatgacccggaaaatccgtgttgggaaggtcgtgaccgcttcttccttgacccgggccacatgtcaccgatgctttactccgtattagctatgagtggcaagttcactatagatgaactaaaagaattccgccaatggggaagccccactccaggacatcccgaagtgaatattatgcgtggtattgagaatacatccggtcctttgggacaaggacatacatttgcggtaggtgcagccatcgcagccaagttcttgaaagcccgtttgggagacgtgatgaatcagactatatatgcttacatctccgatggtggcatccaggaagaaatttctcagggagcaggtcgtttggcaggtcacttaggcttggacaacctcattatgttctacgattcaaacgatattcagctttctactgaaacggatgctgttaccagcgaagatgttgctaaaaaatatgaagcatggcactggaaagtaatgaccattgacggcaatgaccctgatgctatccgtgctgcattgactgaagccaaagctgtaaccggacaaccaacgttgattatcggtaaaactgttatgggtaaaggtgcacgtaaagcggataactcaagctatgaacgcaactgcggtactcacggtgctcctttgggtggtgaggcatatatcaataccatcaaaaatttgggtggcgaccttgaaaatccattccagatttttactgaagtaaaagagctctatgccaaacgcaaagaagaattgaagaaaattgttgccgaacgatatgcatacaaggccgaatggacaaaagcaaatcccgaattggcagctaaaatggatttctggttctccggaaaaattccccaaatcgattggaatgctatcgaacagaaagccaatgccgctacccgcgccgcatcagctactgttctcggagtattggctaccgaagtagaaaatatgattgtttcttctgccgacttatccaactctgacaaaacagacggatttctaaagaaaacccatgcattcacttacggtgacttcagcggtgctttcttacaagcaggcgtatccgagctaaccatggcatgctgctgtttgggtatggttctgcatggtggtatcatcgccgcatgtgctactttctttgtcttctcagactacatgaaaccggctattcgtatggcagctttaatggaactccccattaaattcatctggtcacacgatgctttccgcgtaggtgaagacggacctacccacgaaccggtagaacaggaagcacaaatccgcctaatggaaaaattgaagaaccacaaaggacataactccatgttggtactccgtccggctgatgtagaagaaacaaccgttgcatggaaactggctatggaaaatacctctactccaacagcattgatcttctcacgtcagaacatcaacaacctgcccacaggcaacaactacagtcaagtagaaaaaggtgcttacattgttgccggttcagatactgaccccgatgtaattcttgtagcatccggttccgaagtatctactttggtggcaggtgctgaactactacgcaaagacggtgtcaaagtacgcattgtctcagtgccctcagaaggtctgttccgcaatcagagcaaagaatatcaaaacagcgtaatccctgccgatgccaaagtattcggtctgacggccggtctgcctgtcaatctccaaggtttggttggtgcaaatggtaaagtatggggattagaatcattcggattctctgctccttataaagtattggatgaaaaactgggcttcacggcacagaatgtgtataaccaggtaaaagaaatgctggcatgaaaaaaataggtttggcatccgaccacgccggatttgaattgaaagaatatgtaaaaacttggctgaaggccaagaactatccgtttgaagactttggtacatacagcacagacagttgtgactaccctgattttgcacacccgctggcactggcagtcgaagccggagaatgttatccgggtattgctatctgtggtagtggtgaaggtatcagcatgacattgaacaagcatcaaggtattcgtgccgcattgtgctggatgcccgagattgctcatcttgcacgccaacacaatgatgccaatgttctggtaatgccgggacgtttcatcgacaatgaaatggcagacaaaatcatgaacgaattcttctcaaccgatttcgaaggcggacgccatcaaaaacgtatagagaagatacctgtgaagtaaatttcactctataataataaaagtaaaaaaagagaggctttatagcttctctttttttttatttctatctttgcttactattaaaaacaattaatattattactatgaagaagtttctactttcagtactcatctgtctgcctttattagccaaggcacaaaccgatgagaaatatttggcgggagctattcccgttgttgatggaaaagtttcttttactacagaaatgcaagttcctgccctctcacaagaacaattgtatgatgcattgcttgactgggccaatacatacttcaagcccgaaggcaaacttaatgcccgggttctttatactaataaagaagagggtacgatagcagccggtggagaagaatatctggtattcacctcttcagcattgtcattagacagaacacgcatttattaccagctccttatgacctgcaaaccgggcaaatgcgatttggaaatgacacgtattcgctattggtacgatgaagcccgtgacggcggtgaaaaatatgttgccgaagaatggattactgacgatatggcacttaacaagtcaaaaaccaaactggcacccatctgcggtaaattcagaagaaaaacaattgacctgaaagatgaactgttcaaatctatccagtcatcattaggtaacagaatgattgctttgggattgcaaccggctcctgttactccgactccggctgtaactgtggctactccgggcgtaaccgtaacacaatccaacactgccaatatacagcccacggcaccggtagcccccacagcacccatcgcacctgttgcacctgttgctcctactgcaccaacgacccaaaacattgatgcacaaatacaagccgctgtccgtatgaccatcaccgcaggcaacgacgaacaatttgaaatcggcaaagaatgttggggcggatttggaaagctattcggcaaagacgtagcattctgtctcatcgacacgcaaaaaacaatgggaaatatgcttttgtcacaaagcgacagctatacagtttctttctatatgcaaggaaacaacaagccatccgtagtggtcaaatgcaaaaaactgatgcaacagaatatcaccggtgaagaagcgaaaaaaatgaatccgaacaacgatggacagaaaacatataatatgtatgtaggtgaaatcataaaataaagtttaccgaaataaaaacagtcggatatgtcatgtccgaccgattcatcgtcccacgactctgagagactcctcttcatagccgtgggacaattgttttctttaagaataaataacagaaccggagatcaatggtttcatttgaaactatttctatcataatcaaatcattaggaaaaacaaaataacatatccacccgtttcacggacataaagttttaaatgaatttagcagaaagttcgttttttctactctaaacttcctgttaattacaaataaagagtatctttgtatgcaacaagattattaccataagcaatggcaaagcaattatcagacataaagaaacttatagaacgaggagaaacagatacagcgattaacgcgctaactaatttcatcggaaaccatcagggttccaaagatgaagcctattatttgctgggcaatgcctatcgcaaaaaaggtgattggcaacaagctctgaataactatctggaagccatcgaacgaaaccctgaaagtccggcagtccaggcacacaccatgctgatggatattcttaatttctataataaagacatgtataatcaataataactaaccctatggcaaaaattaaaggtgcaattgtagtcgacacagaacgttgcaaaggctgcaatctctgcgtagtggcatgtccgctacatgtaatatcgctcaccgccaaagaagtgaataaaaaaggatatacgtttgcccaacaagtattggaagatacttgcaacggctgtgcgtcttgtgctacagtgtgtcccgacggatgcatcagtgtatataaagtaaaacaacaataaaataaagaaacatatggcagaagaagtcgttttaatgaagggaaatgaagccatagcccatgccgccatccgcttcggagtggacggctatttcggctatcccatcaccccccaatcggaaatattggaaactcttgccgacgaaaaaccttgggaaactaccggtatggtagtgcttcaggccgaaagcgaagtagcagctatcaatatggtatacggaggtgcagccagcggaaaaatggtaatgacctcttcttcaagccccggtgtgagcttgaaacaagaaggcatttcgtacattgcaggagccgaactcccttgtttaattgtgaatgtcatgcgtggaggtcccggcttgggaaccatccagcccagccaggcagactacttccagacagtaaaaggaggaggacacggtgactatcgcctgatagctctcgcaccggcatcagtacaggaaatggctgatttcgtaggtctggccttcgatttggcattcaaataccgcaaccctgccatcattttggcagatggtgttatcggacaaatgatggaaaaagtggtattacccgaacagcgtccgcgcctcaccaacgaagaagttatggcacgttgcccatgggcaaccttcggcaagctcaaacaccgaggtcccaacattgtaacttcactggaattggatcctgccgaaatggaaaaacgcaatatccatctccaacaaaaatatgctgaaatagaagaaaaagaagtacgctatgaagaaattcattgcgatgatgccgagtatctgattgtggcttttggctcatgtgcccgcattgctcaaaaagcaatggaggaagcacgcgcagaaggtatcaaagtaggtttgctccgtcctattacattgtggccgttcccatctaaagcaatcgccgaacgcagccgccaagtaaaaggtatcctcaccgtggaactgaatgccggacaaatggtggaagatgttcgtctggcagtagaatgtaaagtgcccgtcgaatacttcggacgcttgggaggtatcgttcccgacccggatgaagtagttactgcgctcaaagaaaaaattattaaataataaacgtatgaacacgaatctgattagaaacatattgaatatcatattcatggtattggcactggcagctgttcttacttacttctttgtcagtgactttaaagtattcatttatgtttgtgccgcagctatctttaccaagctgatagagttctttttacggttcatgtgttaagcgataggaggagaaaatatgacaagagaagaaatcataaaacccgaaaacctggtttataaaaaaccaacgctaatgaacgacaatccgatgcactactgtcccggatgcagccacggtgtggttcataagctgatagccgaagtaatcgaagaaatgggcatggaggacaagaccgtcggcatatcaccggtaggatgtgccgtatttgcatataactatctggacattgactggcaggaagctgctcacggacgtgcacctgccgttgctactgccgtgaagcgtttatggcccgaccgtctggtattcacttatcagggtgacggcgacctggcatgtatcggtacagccgaaaccatccacgcgctaaacagaggcgaaaacattaccattatctttatcaataacgctatttacggtatgaccggcggtcaaatggctccgaccacactaatcggcatgaaaaccgcaacctgtccttacggtcgcgacgtaaccatccacggttatccgttgaaaatgaccgaaatagccgccacactggagggtacagcatacgtcacccgtcaggctgttcatacagttgccgctatccgcaaggcaaagaaagccatccgcaaagctttcgagaactcgatgaacggaaaaggttccaatctggtagaaatcgtttccacctgtaactcaggctggaagatgacaccacaagcatccaatgactggatggtggaacacatgttccccttctatccgttgggcgatttgaaagataaagaataaaaaaacaaaagtgatgaaacaggaaataattatagcaggatttggcggtcagggcgtattgtcaatgggtaagatattggcttactcaggactgatggaaaacaaggaggtaacctggatgccggcatacggtcccgaacaacgaggaggaaccgccaacgttacagttatcgtcagcgatgaacgcatctcctctcccattctcagccaatatgatacagccatcatactgaatcagccttcattggctaagtttgaaaacaaagtaaaaccgggaggtattctgatttacgacggatatggtattatcgagccaccaacccgtaaagacattcagatttaccgcatcgacgctatggatgcagccaatgaacgcggcattgccaaaacattcaatatgattgttttgggaggattattgaaactgcgtccggtggtagctattgaaagtgtactgaaagcgttacgcaagacattgcccgaacgccaccaccaccttatccccgtaaacgaagaagcaattcacatcggaatggagattattaagcctcagtaagttaaaataactctaaacgaataataaaaggaagaactttccacagtggaaaagcgcttccttttatttttatattgtatctttgcgggcgttatgaaaagaatattctcactcattctattaatgtttctgtgcagccaagtgatgttgcaggcacaaaacacactgaataataacttcggttcttctgccagcggattaagcatggggcagcgtgaccgtaatggtaaccctatagatacaactgccgtgatcgatgcaaacacaattcccatcgggctttattcatggaaaatagacagccggttcggtaatgtgaccttcgtaccggtagatacccttacacacgctttccagaacacaaacgacaccggaggcatgaccggacaatataactacttgggcaacttaggctctccccgcctgtcgcgtctttttttcgaccgtcgggatgccagtcagttcttttttaccgatccatacgaccttaccgtactccgcccggaagatatcatatttaccaatacgctttctccctttaccaacctgagctattataaaactttcgatagccgtaacggtgaagagcgtttcaaatcctactttgccatcaatgccaacaagcgattcggtgtcggtttttatattgattatctctacggacgcggtctctatgccagccaatccacagcattcttcaacggaggattgtttgccagctatcggggagacaaatacaacatgcactttatattcaacaatgacaacctgaaaatggctgaaaacggcggtattgccgacgaccgttacatcaccaatcctttggacatggcagaaggaaaaaaggaatacaaatcgtacgacatccccaccaacttgaacaaagtatggaatcataataccagctatcacgtatttatgacccagcgttacaaccttggttttcacaaagaaaaaacagacagcgtaactaaagattctgtaagaattatccaagaattcgttcctgttaccagcttcatccataccttgcaagtcgacctgaacggacgcaaatacatctcttatgatgacgaacagaatcagaaatattttgagcacaattacttgggcaacgactctattgataaaacccgacgctcttccatcaaaaataccatcggcatatcactgcacgaaggatttaacaaatgggctaaggcaggtctcaccgcttttatgagttatgaataccgcaactttacattgacagatacaacagatgttcccaaagaacgccgtttgggacattataaagaaagcgtgctgtccattggaggcgagttatccaaacgtcaaggtaagctgctacactataacatcttaggagaactggctattgcaggtgaggatgccggacaattcaatattgaaggcaatggagatttaaatatacctctatttggcgataccattcggttggaagccaatgcatttatcaaaaaccagaatccggtcttctatttcagacacttccattctaagcattattggtggaacaatgatgacttgtccaaaatcatgcgtacccgactggaaggcaagctaagtttcgataaatggggaacaactttgcgtgccggtgtagaaaatatcaagaactacacctaccttgccaataccagtgtccccgtaaaagacaatgaaggcaagattctttcttttaagaataatgccaccgtagagcaatacaccggaaatattcaagtattaagtgccgttctgcagcaaaaattaaaattcggtatccttcatctggacggtgaagtagcttatcagaaatcgagcaaacaagatatactacctttgccggagctatccatgtatggcaatctatatatcaaaacaggacttgccaagaaagtgctccaactggaactgggagccgatgtgcgttatttcacgaagtattatgcgccggactattctcctgccatcggtcaattctataatcagaatcccgaagacaaaattgaaatcggttcttatcccattgttaatgtatatgccaatctacatttgaagcgtacccgtttctttgtgatgatgtatcatatcaatcaaggttcgggaagttcaagatacttcctcgcacctcattatcctatcaacccgagaaccattaagttcggactttcatggaatttctttgattaacggcagtgatgaagagatatttgaaatatatcataatgggaattgtggctgttaccctctatactctcttctttcccggaaaagacaaagaaaagggtaaaccccgagactatcagactatcgttgaatcgggaatcctgcgagctgtgacagaatataattccatcagttattttgccgatggggatactgtgagcggttttcattatgaattattgaatgcgtttgcccgcagtaaaggactgacacccgaaattattccggaaatgagttttgaaaaaagacaggaaggcatattaaccggaaaatacgacatattggcaaacagcaccatagtaaccagcgaatcgaaagactcatttctgttcacccaccccatccttctcaacaagcaagtgttggtgcagcgcaagcccgaactggaaaatgacagtatgtatattcacagccaattagaactggcacgcaaaacccttcacgtagtcaagggatcaccggtcctgctccgcatccataatttgagcaacgaaatcggagacactatttacattcaagaagtagaaaaatatggtcctgagcaactgctggcaatggtggctcacggagatatagactacacggtatgtgatgaaagcatcgcccaagcttccatcaatgattttccgcaactggatataaagacagccatcagttttacccagttttattcatggggagtaagcaaacattctcccatcttgctggacagtctgaatgcatggctcgacacctataccctaactcccgaattcagagaactacaaaagaaatactataataagtgattttttatacggtttaaattgcaaaatcttaatatatttgcaatctgaattgttgtcatttcaggagaaatgacgaaaatattatagtaatgaacaaactgaaaacagttaaatggggttttatcggttgcggtgaagtaaccgagaaaaagagtggacccgccttcgccatgattgaaggctctcaagtagtggctgtgatgagccgcaacaaagaaaaagcagaatcatacgccaaaagacacaatatcccacgttggtataccgacgtacaacaactcattggtgatgaagacgtaaatgctgtctacatcgctacgcccccctcttcccatgccacctttgccatcatggcaatgaaagccggaaaacctgtctatattgagaaaccaatggcagccagctatgaagattgcgcccgcatcaaccgcatctcgcaggaaacaggagttccgtgttttgtagcttactatcgccgctaccttccttattttcagaaagtgcgtcaaatggtagagaacggagaaatcggcaacgtaatcaatatacaaattcgttttgcccaaccaccacgtaacctcgattataacagtacaaaccttccttggcgcgtacaggcggacattgcgggaggcggttatttttacgaccttgcccctcatcaattggatttattacaagatatgttcggctgcatacttgaagcagaaggatataaaagtaaccgaggtggtctttatcaggcagaagacaccatcagtgcctgtttcaaatttgattccggtctgcccggttccggctcatggtgctttgtggcacatgaatctgccaaagaagaccgcatcgaaatcattggtgacaaaggaatgatttgtttctctgtcttcacttacgaacctattgccctccacacagaaagaggccgtgaagaattcctgcccgaaaatccccctcatgtacaactgcctctcatcaaggctgtggtagaacatctgcaaggaaaagcaatctgtacctgtgacggaatcagtgccactcccacaaactgggtaatggatcgtattttaaataaactctaacatcacatttatgacgaacgcccggaaaatctgtttgctactcagcttctttctttatatcctgaatgcttccgcacaagaagagataaagaaggatacaacagcgcaaaacagtaaaggcgttcttgtcaatctgacagatggtattgccactacagtgcgtcacacggggcggaaaatcagaaaggtaggaaaagagttcaatgctgtcgacaccactttcatctcccccaacctttataatctggcgtttatgctggaacacagcagttggtatgaatattaccgattgggaagcaacagcaacaacggtgaacaaagcataagtttctcaccgaatgccaacttcaaattgggagtttattttggttggcgctggatatttttgggatactcttttgatgtaaaagacatattcggcggacataaaaataaagccaagaaaacagaaatggcattaaacctctacagttccaaattcggagtagacctgtattggagaaaaacgggaagcgatttcaagatacgctcgtacaatggcttccaattaaataccccgaccaaaaatatggacttcaacggctttcaaagtaaaatcaaggggttgaacgcttactggatattcaattacaaacgattttcctaccctgccgcttacagccaatctacaaaccaaaggaaaagtgccggttctttaatggcaggattctcttactcacagcataatatttcttttgattatgataaattaccgaccgagatgcgtaatcagttacacaatgctttacttttcaagaaagtgaaatattcggattacagcctttgtctgggctacggctataactgggtctttgccaagaactgggtatccaatctttcactccttcccgccattgcctataagaaatcaaagataaacgatactccccaaccccatacccattggataaaagatatcaatttcgatttaattacccgtgcctccatagtctataacaacagcaaatacttcgcaggtgccgcactggtcatgcacacctacgattatcggaaagaagatttttcactgactaacactttcggaacactacgtgtatatgtcggactcaacttctggaaaaagaaagaataccgtcataaataatgacatgttaataatcctcttttaatcaaatagcaaagaaacaatcatatatccccttgcgttacagaatctttctcaagcaatcccctcaatgcaaactgcacaggaatcaatcttattatataaagcaataatgcaaaaacaacaaaagaattagacagcttttccctttaaccacaacatcctacaaaaaaaatgtatcaagagcaagcttcgctcctgatacattcgcattaaatttaactatattagactcacaataaatccattaaaaacgtgctcctacagtgaacaacaactgatgacgtgagttatccacctgtgcggctttcagctccacatcatcaaaaggataaaacttagacttatacatatcatatttataagctaaatcggcatatatcacgcttccgcgataacctaaaccgaaagtaaacgtattctttgactccgtattgttataatcggtatgtgtgctatacaaagccagtgcgttataagaatccttagcaaaagctgccgatgtgtagttatatccggcacgaatgctaaactcgggaacaatacgcgtttccatacctacacgcagattgtgaacacctttcagataatcgtccacacttgactggtcgcccagcggataaccatccacatcctccaatttactggaagaataatcctgatattcatattctgctccgatagctaccaaacctccgacagtagtacctgcgctgacattaaacttccacggtgtagtcagattataatcataagtgagataatcataatcacgtccaatcaagaaatcaccaagattctgattgtacgcctctccataataatcaatatttgaagataaattggcattatagctctctctcaaatcataccatgtgggagtatgtacggcaaagcccaaacggaaaggcgaactttcgaaaggccggacaatcacacccagtttcaaatcaataccggttccgtccaaagtataataattatccaaggtataaccaccgttttctttaccgaaatcatcattcaaatcttccgtataagaagagaaacgattatagctgacatcatatactcccagagtagctcccaagtacactctatcttcgatattgaaagatacattgaaatcatattgactgataccgccggtctccttgctgaagaaattattgctataacaattccaacccattactctatcctgtccggtcggccagtccaccacaccggtctgggcacccaagactcccagcaccggcaacttattccaatattttgcataaggattgtccacacggataatcttatcctgaaacgattcaggtccggtaacccctactccttccattcctatgtccatcagttccgccaattgcatactctgcgagagaccgttatccaatattcctcccatcgagaacaaacgattgaaattcttgctcttatgataattgaacccaaaattcacaaaacgcagagaagtattattgccaatcttattgctatatacaaaaccgatttggtcgaaagaagcgcgtgtccggtcttccttcatcgatgtaccataaaaattactcttcgctgccgtattattaaaaccgaaagacaatgcaacatcattgctgcgatagatgccgataccggcagggttcgtgcccatcacagacatatcgccgcccaaagcgcccattgcaccacccatacccacaaaacgagctgttccgttcaaatcattaccaagcaaccgctcggcatcgtatgcattttgtgcacctgccgttgccattgccagcaacgcacaagcggttaatattactttatttttcatataccaagtctatttaattctatcatctgtctagtttaatctctaactcttatcttctgcgagagcctccgccacttgaacgtgaaccgccgccaccggagcttcgtgaaacactgcttccaccgcttgaatagctgctgcgtgaagatgacgaagagctgttgctacggtatgacgagttacttctggaggttgatatattattccgagaagatgaattctgccgtgagtaagaatccctccgtgaataagaattaccgcgagaagaactgctgttactgttactgcgatatgctccgcgacctaccgtaccgtcagaatttctccgataagaagacgaaccagaaacactgctgcgagtgctgcttggcctgttgtaagaagaacctcttcctgcctcgggacgagtgtaaacattctcattacgtaaacctgccgactgaccgactgatatgttttctccggtacgagagcgataagtcgttcttcccggacgaaccgaattcgaactgtttgaaccggaaactactcttcccgaactggaacctctacgagcagccgaacgataactacttgaactggtgcgtccgccttcactgcgtcctacataggaactgctgttagtacggccatagttatttacgtaattattacggttcgggcgtgatgagttataattgttgttatatctgccggcatgaatgcccggacggtgagcacttgaaccataccatccatgtccgccgccccaataaccgccgccccagccatagccgggataatgatggtgatgatgccaagcatggtgtccccaatagccgccaccccagtaaccgccataccaataattgggataccaactgctataataccatggtgaagtccatccccagctgaagctccatccgggtccgtaaagatagttaaagcgccaatcccaccataatctatttgtataagtggggaaaacgtatgcatacaatccgtcatcatacacattccaatcccaagagggaagtccgtaaaccacatcccaatacaacgggctgctcacagggatagcatatcggggatttctgaagcgaacgatacgcatagcgtattcataatcatcttgagaaccttcgaaaccatttacccattcacctctctcattcaaaggtttttcctcgatatataaagtatcattctccatcgagaacgtattatcccgtgaagtataacgacggttatactcatccacatcacgcatattgccttttacatccttcacaacaaccgtagaaccgggagctgcatagacagtggtattgttctgcttctgcggaactgctacctttacctcctgcttaacctcttccttcttttcggctttctttttcgggatgaaataaaggtcgtcttctacgctttgtgccactgccaggaaaggcaagcacaccatcataagcgaagtcaatacaatctttttcatactcgtcacttgtttatttgttattttatctaccttttccggtacaaagataatcagaggttttactccataacaaagaaaatccctattagttggtagggatttccctattttacctttgtcagcagaacatggaatcgtttcttaaaaaaccgattaaatacttataatataatgaatatacaaagaatcagtcattcacaacataatgtccattcacaggcttataaaccggttgtttgggaagtcctgcattttccaactttccctcctcgcacaagcgatgtaaatggcggttggccgtggtttgtgtcataccacaaagaagttggaaactcttccgcagcacaaaatcatgggtcacgaaatactccgtcagcagtgcatctatttccccaaccgtcagtctggccgaatgaaaagggaacttggtgcgttgcacctttatcctccccacctcatccaacaaagcttggtcgggtcggtagacaatccccttcagttttaccttcgtattcttgtacttcgtcttttccgtcaccggctcggtgctcaccaggttgggacgaaaaaacccgataccgtccaaatgcacctgcttgccgtctgccaattcctcgcccatggcgtgtgacagcgcatcaagcacggctatcacgtccgtctccgtcagcgtacaacgtttctgaatacgggcacggagttgggccgtgctcatcttcccattcagccggagacgcggatgcaacgcattctcttctccctgttgttcagagctttggggattctcataccaatcaaatagtattgccatactgttcttcttttattagttaaagtcaattattccttaaccacgaaggtggttaactttcaccacggacgtgactaactttaaccacccttgtggtcagacttaaccaccttcgtggttaagcatttgcaaacatacaaagatacgcaaagaaaagacggaaaacaacaaattgactcgaagatattcttcaataaaccggatattccccccaaaaccaatatcggaggaatctgtatcatggaacaaagtttacctgttgatatccgaccggaatgaagaagataaatagatgccgaacagtataaggagaaaagcaattaacacctattctactcttattctcattttttctccctatctttgccactaccctttttaagggtatataaacttaaaacaaacaaccacatgaaagcagtgaaattattttatcaggaaagatgtccgttttgcaaaaaggcattgcgttacatcgaagagctgaaagaagagtaccctgaattccaaccgatagaaatagaaatgatagaggaaacacaacatcctgatatagccgaccaatacgactattactatgtcccgactttctatgtggatggtgtgaaagtacacgaagccggaattttcaaaaatgaaatggaagcattactccgtaaagtaatcgaataaacaaagacatatgaaatatttagaagtaacctttaccactcacccctgcaatgaaacagtaaatgatgtagtatctgcactggcaggagatatcggatttgagagttttgtggaatgtgaaggcggtatacaagcctacatccaacaagccttgttcaataaagaagtactggatgaaatgatttcggaatttcccatccctaacgcaaaagtagaatataccgtaaaagaggccgaagataaaaactggaatgaagaatgggaaaagaatttcttccaacctatcgttatcggtgaccgttgttgcattcacagtacttttcacaaggatactccgaaaacagagtacgaaatattgattaaccctcaaatggctttcggaacaggacatcacgaaacgacaagttccatcatcagcgaactgctgaacgccgatttaaaagacaaatctgtactggatatgggatgcggtacctctatcctcgctatcctggcatccatgcgcggagccaatcccgttaccgccatcgacattgacgactggtgtgtaaacaattccaaagacaatattattctgaatcagattaataatatcacggtagaattgggagatgcctccttattaaaaggacgcaagccctttgatgtcattatcgccaatatcaaccgcaatatattattggcggatatgcctcaatatgcagcttgtatgcatgccggttccgagctttacatgagcggattctatgtacaggatattcctgtcatccgggagaaagcggaaaacctgggaatgaaatttattcattaccgggaaaagaataattgggcggctgtgaaattcatcatgctataaaagtcagcacataccgataaaattaaaaagccgactgaatttctcatcattcagccggctttcttattaatataattaaccctattatataaaacgtttataggattttaataaccgggattttggtcatcagccaaaagcggattcaagtcgattgcagtttgaggaataggtctcaagtgcatacggggattccaactcatagtgataatattatcaccatcaggagctgcaatttctacattgttgatatgtttattccaatattcatcactgtaacgatacatatcgtcactgcggaacccttctgccgccaactcaatacgacgttcgtttgcaatcagctccaacccttcttccttgcttaagctggtcggaacatcaggcataccacaacgatcacgcaattcattaagagctgcctgtgtctgagaatcaaatccggcagtatgcgtatgcgcttcggcatatatcaacaatatttctgcataccgaatgcagggatagtctcctgtagcttgtcccgactgctttttttatttgtttttccatgctctgtactttatgtacattactcgttcggacgctctaaatcaacagtaatgggttgattattagccatttgttttcattagtgcaatattaaccaacccatactcttattaagataatattttatatgctttcttcaaatagaactgttaatttttgactttagcccgatgtataggttcttctattgtttccaacaattttttgccagtctttacaggcgccttgattaattccggcaagttataggtatatgtaaaggtatcataaaaatcgggctccttctgaggtaataggaaaggcttactaaaatgtcctgtctcgggatcaaaatgcgcaaaaaacggacgagcccacaacccatccagacgtttgctgctgaagaccagccatcttcctgttgaagaccaggtatgaaaactgtccacattgtcactgtttatttccgcgatatttcgtatattacctgtagccaaattaagcagatataaatcactttcaggatgccagatggagaaattgccgtaatcagactgagtaaataaaaggaacctgccatccggtgaaattctcggaaaagagacagtcttacgaagggctgatgctttatagacacattccaatgtatgcagtttggaatgttctgcgtcaaaatgtatacgatataaatcataccggatactgtccaaagacattccttgacgatatccttcagcacgacagaaataaatctgttttccatcaggactccatgttggaaaagtttccatatattgttcaccataaactaacgaatcagtaaatgtttcgtgagtctgtacatcataaatcattaaatcggcagccaaatcagatacttctatgggcttttgtcctgaggaatggaagaactgctgtatctcattggcagaaaatgcaatatatctgccggaaggatgccaggcaggataagtggctccatgcctgtattcttcaggcttagggtcgactttttccatctcaccattaagggaaattaaagtgcccccctgtttaccacgcacatgaaccatcatcgtatcgggtgaatttcggttaaacgtatgacagttaatgcattgcttcccaaaatttctattttcagcgataggagtctgctcatacgttgtcaggtcacgttgataaattcccatttcattccaaagttcatatccgggataaagcaggcggtacgctaaaaaaggatctatcgcatgaacggatatactatcctgaatatcagaataacgtacccatttgccatgctgcttaatagtaattctgacatatatttttttgccggcagctttctccaacagtaccttccactcgctttccggtatacggactattggttcgtcatcctgaataagaatgtcataattttcctctccgcatcctaattctgtctggaaagtctccccttcctcctgaattctaaaattaggaggtgcaatattgatagggaaagtcacatccgtataatccggataaattaacggtaatcggtcactcatactttctgcctgatgatattgcgtacatcctgacaaaaaaataattaatgtatagtaaagcagattttgtattttcatataatttcccattaattagctatcaccttattaccataaggactgatataattcaaataaaaccaatacgtatttccgaactccttttgcaaagtgcctaactgtttgctctgtacaagactataatatcgtttaaaccgttcttccgttgccggacttatttttattcctacctttgaaaactcttcttcgccaacacctaatttataaatataaagagcttcttcataaatacgaggaagttttgtataagaaaaagatgacatgaatttcaagttattcacaaaacgaaccacatggttactcagtaataagttactcattaaatactcaaaagccattttgttggtgctgtcattctcacataaatattgcaattcaggccctatattcaagacattggcaaaccgtgccggagtatccacctttccatccaatgcatttcttagtccgggaactttgccttcatttacaattttttcaagtagcaaagctttctctcgatagaaaagagactgttttagcttattaataaagcgttgtgccactaacgggcggtggtttacaatgttatattgtgccaaatttataaggtgaggtgctgtttctccccatactaccattgactcaaactcccagcgttgtgcctcattgatatacccaagttcttcataaagaatatgtccgtattcactctcacgactgtcactgttccacgggaagtaaagtcccttgactccctgtttttgtggataatccaataaatgataaggaagctgtcctgtatgataaagtgccaaatgatgaaaataagaaatgagctgattataacgtccggtatctaaatatttttttgtatactccagcacacttctccagtctttgctttttacaaactgttcggcttttaacattatacgctcattcctattgtagttataaaaaaaatagtgaaaaccatatcctgtatatcctagtaaaaaaagagaagttaataaaatacgtatttttttatttgatatgccaggcagacgaaagaggggaaatacgtttcggtaacgttgaataaacaaaagaagcaaatagagcatcaacaggcatagcagacttcctggcaatatagaaagagaatgattcgcttccattgtatagaaaaaaagaataagggaaggaataatggacaattgcaacagatcattctttccggttattatttttataatgctatttgtcaaccaatagactgatgccaacaagaatgccaaaatagtacttcctaaaataggataatagaaaaattgaataataaagttagtgatatagtttagccaaccctcagattgaacacattgcagaaaataagatttagaaaaaaggaaaagatgatgttgttcgtgatagtaaagcacatgcgacaacactccttggtaacatatataataaaggataaacaaagctccaaatagggtatagaccagtcgtttcatcttatatatttatttaataaagtaagtgaggacacttactataagacaatgccctcacttaaattattgcttgtagatattataatgttattaatatcccgggttctgagtcagtttaggattcaaatcgatttctgtctgaggaacagggagtaagtagttatgatcttcataatgactacccgccaattttatattttcaccttcataaagaatataatccacaattgccggtttgccatctactactccttctacaggtttcatcttcaatcccaagaacggtgcattcaaaacttctttggcaatgccccaacgacgaatatcccacatacgtttaccgccttcgagtgcaaactctacacgccattcgttttgaatacgtttacgaagttcatcttgagtagcacaatatgtcggtttgcttgggtctgtattttgtaaatcaggcatacctacacgtctacgaacttgattaacagcatcaaatgattctgcgctcaacggatgaagctcattcatcgcttctgcataagtcagcagaacttcggcataacgaataaccacccagtctttacccatattccaaccttcgctttgaggatcaatacttgggtctaaccatttttgctgataatatccggttgcagtagcatcaccgtgctgttcaataccggtttttccacttgatttcagcggtttgactttaattgtaacaccatacatttcttctccgtcatgaagtacattgacttccaaacgagggtcgcgatttttaaacggatccttttcattataaattgtagatttactgataggagcaccgtctttatcttcgaatgcgtcaaccaaactctgagtaggattcatacctccccaacctaaagtagggaaacattcccaaccaatcaagtagtgagttttatcagggtagttgaattgtacatacaagatattttcatcacatccatctgatttttcccaaaacaactcctgatatttaccggtatttccggcatcataaagttcatatttacctaaatccattacagccttagaagcatctgctgcaacttgccagttattatagtacaaagcagctctagctttcatagccaaggcagctcctttggtaacacgaggagtatttgcggcatcccattcttcaggcaaatattcaattgccttgtcaaagtccgccataacctttgcatacacttcttcgcgtggagtacgagtgatatcttctacatccgttaagttcaatggtttatcaatataaggaacatcaccaaaagaacggattaaattgaagtatacaaatgcacggaagaaataagcctgtccttcaatttttttacgcgattcgtcactcatttcgatatcttttactttttccaataccaagttacattgacgaatcggagtataactacccgcccagctttggtccatcggatcgtaaataccttttgatatgttaccggcagcccatttaatgccatgaactgcattatctgaattgatatcttcgtcttgatcccatgtaggcaggcagccataaatatcagttacggccatcatcgcatcattctctgttttccagaaactgctatcagatagctcatccaatggataacggtctaagaaatcactacatgaagaagtgaatcctgcaaataataaggccgttgctatatgtaaaaattttgttttcatgttatttatactgttttatttgaaatattagaatgaaagttttactccgacagacagttttttaacgttactgtaagaccatcctcgttcattgctttcttccgggtcgataccaccgtccaaacctgtaaaagtaaataagttttcaccggttaagaatacctttgcattagcgataccggctttagttaaccatgcttgaggtaatgtatagcctaaagtaaggtttttcaaacgaacgtatgatgcatcttgaagccagaaagaagatgttacaaagtttgtttgactagaacgtgtaacacgaggataagaagcattgtgattatccggagtccaacgatccaaatgtcttttcaaagcagttgcaccattataaaatgcataagcagcttcagcggtgtagtatccgtctacatcaaatgctccttggaataaagcagaaagatcaaaattcttataacctacactcagattcaaacctccggtccaacttgggaaattcttacctataacagtacggtctttttctgtaattttcttatcaccatccaaatctttgtacttgatatcacctaatttttcctgaccggcagccaaacgtttcggacagttaagaaggtcttcttctgtattaaagaagccgtcggctacataaccgtagtaagaaccgataggatatccttccaaattccaaatcttgtcgttgcttgtcggaccttctgtacctgccatatccgtaatctcattctttacataagatacattcaatgatacagaatagttccagtccttattaatttgcttgttatggttaatcaagaaatcaaaaccggtattctgcacactaccaatattctgtgccggagcattcataccgataactccctgaataggaagatacagcaacatatcattggttttcttcttataaacagataattcaaaattaatcatgttgtttaagaaaccggcttccaaacctaattcatagttagtaaccgttgcccatttcaaattattgttcacataacgagcttcatatatagctgagtacaaagtattgttgaataaatatttagtagcattgtcagctatattatatgtatatgttggtactgccggataaatatcatcggatttcaattcctcattaccggttttaccccaaccaagacgtaacttcaaattgctcagccagtctacattgtctttaataaatgcttcttcagaaattctccatcctgcagagaatgcggggaatactccccaacgattatctttcgggaaacgtgaagaggcatcactacgtaaattagcttcaaacagatacttacctgcataatcatattggatacgtccgaaataagacaaacgagccatttcataacctccgtctttatttttttgtgaagactggtctaatgtattcagagattcaggcaactcatcactaccgccaccttgacgagtagcttctgtatacttatagatatgttcataagattcaaaacctgctaatgcactgatattatgcttgccaaaactcttgttgaagttaatcaagacttgtcctgtgtaatagttgtggttataatatttatcatagccttcacgcaaac

SEQ ID NO: 6823 - DNA, 1419 bp, Unknown
  gut microbiota DNA sequence
aaatctgtatagtagcatgacccgtaagatttatttcctgctgtgtattacgtctgaaaccagacttgtctccttgtatggcaaccgggttatctacaccggaataagtataagaaccatcttcgttataaactttattagtcggcttttcgcgagtcacgccttgataaacagacacaaagccattccatgcatcattagagacacctctataaccggatgcattgatacctacctttatatatttattgatttccgaattcaaattcatacgggcattgaatcgagaataatcattatcggcagtcaaaccatcctgataaatataacctaatgaagcattgtacgttgttttttcagtaccaccgctgatagaaacattatgcattgtttctatagcactctttttaatagcagcttcataccagtctgtgctgggtaatgctccggtacgatagtcttctatttcttccggagagaacatcaatgtagcattaggattctcatttaaagttgcttcattatataaaacagcatattcataagcattcactaattcacgttttgctaccggagaagaccaagatacattaccggaataagttacgcgtgtcttttctccttttttaccctgtttcgtagtaatcaagattacaccgttagcagcctgtacaccatagatagcagcagaagcagcatctttcaaaactgtaaatgtttcaatatcatttgggtcaattgtattcatgctacccggtactccatctacaataaccaatggactggctgcattgatagagttcttaccacgaatagtaatatcagcagcttgactacccggagcacctgaactctgaatagctgttacaccaggcatttgtcctgctatagctgcagaaacacttgacacgggacggctttccaatgcttttgcatttacagttgcaactgctcctgttaaattagctttcttttgtacaccataacctactacgacaacttcttccaatgtttgactgtcctctttcaggattacattaagtggttgaccgttgaattttacttcctgggtaacataacctacataggaaataacaagaatacttccttcggaaactccactcaaggtaaaatcaccatcgataccggtaattgtaccattggttgtaccttttactactacggacgcaccgatgactgtttcacccatagcatcctttacaactcctttacaggtttcggtctgttgctcaatagcatttgaacttgctattgcaggagctgaaacagcattcatgcttcctgtagatgcagccataagaaatagcagcatactgaccgacttgactctctttaacataaagtattaatttaaagataataaataagttactatcaacgtagttcttctagaactat

SEQ ID NO: 6824 - DNA, 1582 bp, Unknown
  gut microbiota DNA sequence
tgctcagagcaaccattttctgatccgtttcatggcttcttcgcaatccgcccgctctccgaaagcggtcaagcggatatatccttcaccactggggccgaagcctactcccggcgtgcccactacattggcttcatacagcatctgttcaaagaatttccacgagtttacctcacccggtgtcttcacccacaggtagggggcgttctctccgccgaaaactttgagtcctgtactttccaacgcttctttcatgatgcgggcgttagccatataatactgtatgatggctttcacttgctttttgccctcgggggtatagatcgcttcggcaccacgctgggtgatataggatgtgccgttgaacttggtgcactggcggcggttccacatccggttcagcggaatgcgctctccttccagcgtggcggctgtgagttctttcggtacgacggtgtatccgcaacgcaccccggtgaatccggccgtcttcgagaaactgcgaaattctatcgctactttcttcgctccttttatctcataaatggagtgaggaatgtccgggtcttgtatgtaggcctcgtaggcagcatcgtaaaggatgagggtatcattttccaatgcatagttcacccattttttcagttcggccttgctaatgaccgtccccgtagggttattgggatagcagaggtataggatatctatcctgcggtcgggaatttcgggcacgaaattattctcgctcaggcaaggcaagtataccacgttgctccatcgcccgtcttccagtatcccggcacggccgcacattacgttcgaatcgatgtatacggggtagatggggtctgtcacgccgatgctgttgtcgtggcgaaggatgtctccgatatttcccgtatcgctcttggcgccgtcactgataaagacttcgccgggttccagatagacgccgcgcggagcgtaatcgttcctgatgacggcatctatcaggaaatcataaccttgttcgggaccgtaaccgtggaatgtctctttgtttgccagctcgtctactgccttatgcatggcttcgatggaagcttgaggcagcgggcgggttacatctccgatacccaggcggataaggtccgttttgggatgagagactttgaatgcatttacctttttggcaatgtccgaaaacaagtaattgtttggtagttttaaaaaatgttcgtttactagtgccatcgttgttattgtttttatcgttgttttaagtttttcaaaatcattatcacatctctatttcgccttcgaaaacctttccggccggaccggtcatgtatacatgtccgtctttctcgtcccagtggatgtggagatcgcctccgtccatccttacccacgattttcgtccggctttatggttcagtacggccgccacggcggtggcgcaagcccctgttccacaagccattgtgatgcctgaacctctttcccacactctcatccgtaaggattggtccggcaatatttctacaaattccacattggtccgctcaggaaaaagcggatgattttccagtttcggaccaac

SEQ ID NO: 6825 - DNA, 1453 bp, Unknown
  gut microbiota DNA sequence
aatttaaaagttgatattctgttaatagttctcttccatgtgttttttccaaagaatgttcagctcttcataaatgatagtttcctttgtttttccacctcttgtgcctttagccttttctatattttccgcattttcacgttgaacattagctagaaagtggctcatatctttagtgaatgtacttttttcgctatcatccgtatcttcatacttgccaataatccagtcaataagtgtacggctcttcaagaactccgcactgaatgattttctggcggcttcaacaagtgttctccctctattgatggtgtttgattttctaagcacttcatcaatattgccgttgatagccctgacaagaactgccttgcttatcttactgccaaatgtagcccacttggaagccgcatccagagaatagcccatacaagtcaattcagacacaaagtccaatgtcggcaattcttctccaaccatcatttttactccctttacataatccgcacctttccacggagtagtggcaatgttgatttctgccaatgtcttttcaatgctaacagacggattcaaagaatacatgaaatagaactctctttcgtactgcttttccggctcaatctttttattctcttccagaagtcttaaatgggcactgtaacggtggttggcatccaatagaacaatatagttatttccatccttgatttcttcaccagtagtaaaatcaaccactttcaaaccgtctttaattgcagtggaagcgtccacaatgattgcaggaactagctgaccgttttccctcattgatttcattttagccttgactgccttttcattcaaatctctgttacctgccaatcttgctacttttacaccgttgttagttaattcagttaatgtcataatttcttttttcataatttattaccgttgccctacggacttatattggcttctggcacgccgttattatttttttgatgatgcaaaggtagagtggaaattcccctagacaaagcattttgcctaatgcccatgtgtgtagaaaacataccctttccagtacgcaaaaaaaatgcgtaccaaaaaggaaaatcctttcagtacgcatttctgctatggttttatgtatgttctttaagaaactacgttgtagttattagctatgacagacggaaatttctcgttcttgtatcttctaaggagattggatagcattctgttcttgttaccctccgaatcgtattcttcattatatctcttgccatcataacccactgtatagataagccttgaaacaagcatcatcttgtctttagatacctttacctttttattgggtatggtggtagcctttcttctctcaatgaagaaaagaaacatatccgtaaacttccacttcttataagatatgtcaagacagaacttgtctttgaagttcatttgt

SEQ ID NO: 6826 - DNA, 221 bp, Unknown
  gut microbiota DNA sequence
tcctgaaaccgtgcgcctacaagcggtcggagcagcgtaagctgtgacggcgtgccttttgcataatgaacctacgagttaccgttgccggcaaggttaagggtcatgaggcctgtagccgaagcgaaagcgagtctgaacagggcgtatagtcggtagtggtagacgcgaaaccaagtgatctacccttgagcaggttgaagtccgggtaacaccggatg

SEQ ID NO: 6827 - DNA, 17807 bp, Unknown
  gut microbiota DNA sequence
ggatggagaacggttgctcttaaaagagtataccggttgtgtcctgctggaaatcaatcatttgaaaggattggaagaggcacgtgaactgcgtgcccaaatagctgcctatccccaaacattgtgggcttttgtgggggcaagcgggcgaagtgtgaaatttgtagttccttatacccgtcccgatggaactctgccgcaaacggaaacggaagcggcgttgtttcatgcgcatgcttttcgtcatgccatcaagacttacgaacccagattgtcttatcccatcgaactgaaggaacctcatctcacccaaagttgccgcctgagttatgaccctgaaacgtattataactctcaggcacttgccattcatcttgaacaacctacccaaatgccggtggaaacgggatatcaagagaattttcataaattgacccctgcggagagtgtcggaaaatcttggtatgagaagcaacgttacgtttctgttcagtttgagctcgctttggggcgtgcgatagagaagtatggaaacattgatttgaaactggatttcaaaccgttgcttcatttgctgggagaaggctgtttctatgccggcatttccgaagaggatgccgtgaagtggacgatgctgtattgggataccgtcttgtcggaagttgaaataagggagactttgcatcatacgtatcagttgaagacaggattcaatgaaaaggcattgtgtaagcccgaacaattacaggcgttgaaagtgaatgagtttatgaaccgtcgttatgagtttcggagaaatgtgatgacgggagtagtggaacatcgtgaacagggaacattctgttttcagttcagacctgttaccgatttggtttacaacagtatagcactgaatgctcagcttgaaggattgcaattgtgggatagggatgtgcgtcgttatatcaactccgatagagtgaagaacttttcaccgatagatgattttctgcaaaatcttccccattgggacgggcatgactatatccgtgagttggcagggcgtgtgaaatgtgacaatccgcattggcaggacttgttttaccggtggtttttgggaatggtggcgtattggcaggagcgcgacacgaaacatgccaacagcacctcaccattgctggtgggcccgcaaggtattgataaatctactttttgcacagagattcttcctccggaactgcatctctattatacggatgatttggatttcagcgaaaaacgccatgccatgctctatctgaatcgttttgcgttgattaatctggatgagttcgaccaaatcagtgtccgtcatcagggattcctgaagcatttgttgcagaagccttcggtcaatgtgcgccgtcccaacagtgcttatatagagaaagtgcgtcgctatgcttcgttcattgccaccagcaatcacgaagatttgttgaatgatcctagtggcagtcgtcgttttatctgtgtgcatgtttcggaaatagataattcgcagccgatagattatcggcaactttatgctcaggcagtagccgcgttggatagtggggagcgttattggtttactcgcgaagagggtgtgctacagacggaaagtaatcgtgaatttcagcaacagcctcttcaggaacagttgtattaccaatattttcgtggcgccgatgatgagtcggaaggagaatggatgttggcagtggagatttttcagttcttgcagaagaaaagcggcatcaaattgccatcgggtaaaatgaatttgttcggacgttttctgagtaagttgggcattttgactcatcgcactaagaatggtgtatattataaagtggtggaacgtacaaagagtgacatattttgaaaaaaaagtgagagtaatgctctttttctaacgatagcataaacaaattggttgaggaacatagcctgttgatagaagaaaaatgaatacctttgcatttgaatataataagaatagaatttatggaaacaggattgacttatacttcgaccgtcacagtgtcggaagaaaacatagctgccacaatgggcagcggagatctggaggtttttgctacgccggctatggtagcattgatggaaaatgcggcaatgaatgccgtagtaggagaattacctgaaggtgccactactgtaggtgcgatgatgaacacgactcatatcaagccttcggccatgggagatacggtttcggcaactgccgtattgaaggaagtggaaggcagaaaactgacctttgaagtgcatgccaaggacagtaaaggggtgattggcgagggaatgcatgtgcgctatattgtagatagggagaagtttatgagcaaactttcctgaaactttctgtggctctgaatatcggtgaagaatctgtaaacgtccaaatgtatgtttacagattctttacatatctatgatatggtgagtgctgtctgttctctgtggattcggttaataattggtttcatggacaatgttgccttttatgattgtatcattacattcctgtattttgattaatttctcaatgccggcgttgtttggagtaaggaataagttgttggtgatatgtagtccgtccaccgatttggcatgaatggcatcggttccttttaattgaaagcggttgttgtcaatatgaatgtttcgatgtacatagccttcattgcgattgttttcgggggcgatgaaaataacgggtgtaccgcattcgataaaatgattgtcccggatagttatatcgcgtaccatgcccgattcaaaccaactgcgtgcatcgtttgctatcaggatgccactcatctgcattcggaagaaagtgttcttctctatcagaactttacgtcgggtagttactaagagtcctcgtgacggaatgcgggagaagaaattgtttcggactatgacttccggagtataagtgacattttctacaaccagattgggaatggttttgagattctgtggaatcgttcggttcaaagtaacaattatttcgcgttcatttttcatttcagctttctttactttggcagtagccagtggcaataaggtgttggggtggataaattctatttcatttccctgaaagaaggattggaaaccataagtctgggggtgcatatatttgagcacaatcttgtcgggggctgggaactcagttatcctcaggtgggtgccgtgtatattgatagggtcgtcatgcgctcccgagaagcgggagttctcaatcaatatcttgcctttgcagccggacatctgtataaaatcggcaaatccggcacaagtgcgtccgctcccgaattccggctcaaaagtaagatgtctgtaagttagattttcggacacctgtcccactagtccgaagttgcccaaaaaggcgaaatggatattctccagagtgacgtctttgctgtattggataagcccgcagacttcatcacgaatggcatcacgcatttggaataccattccgactttggcttgtggaggctgattatatatgaaacgaagaagattgggctccagttcgatggctttttgcaggtcggagaggggagaccagcttcgccaggtaatatcatcttgtgcattatatatttgggcgatgccttttgacaatttccagtgatggccgataaatgaaaattgaccgttttctatcacatacttggattgcggatgaatacggacattcatgtgtttttcacctacttcggttacggtcagttcgggcacagtagggtcggctgcggtgatggtcatgtttttcagttggatattcttacattggtctatggcaaagccggttatttctccgtgggtgatgatacgggcaccttttccatcaatggtcaggttttggaggtttttgagccaaagtccgatgtgtttggtctggttcgggttctcttgttctgaggtagtgttggatatgtgataaagttgatgtgatgaactttcacgatagatatgataatcagcattttgaagttcaatgattaccggtctcccattatagctttttaccttttctatcgctgtttgtattttgtttgtcatgtctcctctttcgggagccagacgaatgacattctgtgccggcagagtgagtgtggcagcgcagaatgttactaatatgagaaatgtttttttcatgactatctggatttatacttttctaggtttactttggggcacggttacttttttcggaaactctttccttgtgattacccatgccttcttcccctttttgggggaagaaggtatggaataagtacatggctctgctgtgcagagtgctttgataatgtacatcattttgtttttatcggttgaaacggaagcggtattcttgtttcacttttatagcatcgagtgtaggtgtaacacacttctcgggatttacattcttttcaaagtaaatgttggcatcagccgatttcagcccgtctatccgtaataccaacggattagtttctatcgttcctttcagccggctcagactgagaatccagtcagtaccgtcgtagaatgaatctgcaactaaatttccgttcagataggcattggctttgtcgcctttgtagttgatgtacattcgggtctcttcctcgccggcagtcggtgccggtgcattaacttcgtagagcgcaagatgttcttcgggggcgaaggaatgcggtgtctctttgtgcttcactacaatgaccggctgtttgtcggaggctccggtccaagttccgtcagtgtgccatacaaaacgttgtccgttggtcatcagtatttctatttctgcgactatcggctggggagtgctatccggaaagcggaaagtaatggtgttctctccgttctgaatcagtttgcagacatctgcacgacggtaatctcccaatgttgtggaggaaacttctttgccgttcagcaggcatatcggattgctttctgaagcatagcgtatccatgcctgctctacgccggcaaatgaatgtattgcaaaattccgttttacttctttttcttctccggcaggacggatccattgaccgtatcccattgggcgaagcgggcggatggatgcctgaaggtcgtggacgggttgacggaagagcttttgcataaaccggccgttgcgatacatttggatttcggcattgggattattgtctatcagtgtaatgccttcttcatcataaattaaggatgaggcggtgagtgcaacaaactctttgcctctgattgttcctttccatagttggtcggattcttcttcggtcagtgtaaccagacgaactttggcaccgtctttctgtgtgatttcgatgctgcaatccgttcccggaacaagctggttgatgaagtagccgtttttgtcggctttgcacactccgttgttcacctttatatcttgtatgtttttattttccagcagatattctccacctatttggtcatcttcaaaaaagaagaaggtgcgggtattcccttctttcagagaacagatgggctgtactgttgcatatttcaattgtacaccgcccatattctgattgaatggccataagaagtaggtgccgtccttgacggttattttatggttgggaatgcggagcgtttcgtcttttaacttaactttgaactgtacattcttatagtcctttttactgtttcgatacagatagttggagcaaaacagataaccggagttgttatgcagacggactgcccattgcaggttgttacggttttggttgctggtgggcagataggcagcagccggagccagcgcagtaccgaaatcgttcatgaaataattgtatttttttgtttcctgcatgacagttcccaaggttccgaattcgcgaataggggcttgataatcataattgattctgggaccggaagattggaaagttcttttttcccctacagggtttgagccacccacatacatataatatcccatcagattggcaccgcatcccaaacgcaagttgatcatttctcctgccaattcttccggtacgacagcgcgacggtggcggaacgtggtacttcccactcctatttcgcaggtgaagaatggagaatcattgttttctccgtttaatgattccacatcaccttctattttaatgatgtctgttccgatattgtcggacaaacggttgtatgtgaaaaactcaaagttcgaggtcggcatttcttcttttccgcttgtcacccacggtgcctcaatgtagaatcctgcgtatggaacgatttctcctttgggatattcgctgtccatccagtgagtcatggagtagaggggaacatcaaaaccgatttccacagccatttttttcaagttcatcagatgagagataatcatgccttggctaacatattcgttttccagctgaatggccatgacgggacctccgtctttatacagaagtcctttcacttgcttgtaaatagcttcgtaccaatgacgtacatagttcagataaagtggatcgttggagcgtgttctgaaattagggttgcctataatccagtccggcagtccgccattctttatttcggcattacagtaaggccctatacgcagatgcactttcagtcctacttctttgcagagttggataaaacgtcgtaggttgagatgctcttgccaggatagttctccttccatctcctcatgcaatgaccacaggcaataagttgctacaatatttatgcccgatgccttcatcttcaataaggcatctttccaatagttaggatgcattcggctgtaatggaattcacccataacaggaagttgtggaattccaccttcatccatatacagattattaacacggatttcttttccttttggtcctgtatttcccatcttcagatattcgatggaaggaggagtgactctgctcaaattaatgttatattgcgcagaaagcgtagctgcactgaaagccaatgcagtaaatacaattgcttttttcatgatagatatgtaatttataaaaagtcgttttgaaaaacaggtcgttctgaacaccaaatgaatgaatattatgagtgttcaagaacaacctgttacagatgtttcctgataagaatctttttatgcttattaattttttaatacctgtttataacaacaagtttaaaagatattcaaaaaaatgcttttgtcattttttaaaatcaataatttgaattgtccaattggcaatgtcaccgtttccggctttcacttcgtatacaaactctctgtctgaaaagtcactgggaaaagttcccataaccggtgcgttgcctacaggagaaatacgtgaagcggtagatgcatctacattaatagccaatgtactgagggatacttgacttctgatatcagacgtaaatgtcttggtagcttctggtacagtaatagtacaagatatttttttattttccttgtctatacttttgtctacgttcatttcaattatacgcattctttgctcggattcattccaccatctgtattcaaaacgaacattggtaatatcgtttagattataagtctccagttcgtctaaaccggattttaaacaggaagtgttaagtatgacaagtattgctaatactaaaatctgatatattcttttcatattcttaattatttaatatggattacttattatttaccagccttcattttgatcaagagccggattgtttactctttcgccttcgggcacagggaaaagatatcttttcttggtgaatatacgttcgttttcagaagtccggaaaggtagggggatgatttcgaaactctttccgtcttcggatatgctgatggagtgatgggtcttgttaagctcttctaccgtagtttttccatcggcttttccccatctcaataggctccagtatcggtctccttcatgaaccaattctacgcgacgctcacgtttgtagactttccaggcttcatctaggctgagagatgttgataaagcaggtaatccaccgtgagtagtacgtgttttgttgatgtattcaatagctgtttgaatatttccttggcgcagcattacttctgcatagtttagataagcacgtcccaaacgcatgatgacataatggtagtaagtagggtcggaataccaaaccttcttatctgtataaactcctttacggtacagatatccggttaaggcgcttccccagtcaccgcctacacggctattccagtgcaggtttcctttgtcgcgcatagtgacgatgctgttgaaatatttggaagaatcctgtacaatggtggcatagaaacgtttgtcgcggttcttataaatggcatttgaaacatatccgccgttggttatataattttgataataagaggtcttatcccaatctttggcttgcccgtcttcgtctataacttcgtaggcgtctattaaatcgcaagagggaaatgtgcttggccatccttcaaagttatcaactaacggcggatttgcaaattctttgattttatcattgttgacgttcgggaccaatccctgtatccatgtatttgagaattgggtatttgtttcgtgtttccattgtgccaatatgatttctttagaccccatggcataatcgaattcattgaacatcttttcataattggcatccaactcatattggtttaatgagaaaagatcttcacttgctttctttgctatagaataatactcttcttggccattttctatataagcggctccttgtaaggctatttctgcaatcaaagcataaacggctccttgagtaagtatgccttgctgactgccgtgggtaacaggaagatcggcaatggattcctttaaatcattcagtatgaaatcgtaggtctctttgatggtattggtacgtggaagttccatattatcattttctcctatgactttgtctacaatcatcaacttaccgaacagacgtgcacgtgtgtaataaataatacctcgcaatgctttggcttgtgcggtcaggtattttcggtcttgttcaatgaagctggtgttttcctccatcttctgaagcattaagttgcatttgcgaatttgactatagacattttgattccatccggcatcatagtaattgtctatttgttctttgtttacattggatgtaccggggatatcctgtattatatcgttgtccgaccaatgatcataggatattagtttgtcggttgcatcattcagtgttggatataagaaagcttgtgctaattctgaacttccccatatatcattttctgaaaatttatctcgtggtcctttatccaagatgtcattacatcctgtacaccctattaagagggttattgctgctaattttatagttgttgttttcataataattaaaatcctaaagttacacctaaagagtaaatgcgtgatgtgggatatcctccgtttgtattggttgtttcaggatcccaatagtctgatacaccagaaatggtaaataggttgctaccggttagactcacttgacaagtgctcaaccattttgcacttttcaaaagtttatgtttaaagtcgtatgtcaaagatagattctttaaacgtaggaatgctgcgtttctaagatagaaagttgattctatacggttgttttcaccatttacacctgctaccatagaaattcgtggaaaagtggcgttacgattgtcttctctccaataatccagttggaatttattttttacatattcaccttgcgcttttctggcatttactccaaacatcatgtggcgttttccggttccatagaacaaaccggagagcgtgaaacctttatatgcgaataagaaatctactccataagtaaaatggggatcgataggcataccatagcgtaccttatcttcactgttaattttaccgtctccgtttatatcttgatagacaatgtctcccagctttgtttcggtggattccgggcgacggggtactcctagtacttgttcgatagactgatataatccgttgtccaacagatatagtcctagataatctgattggtgtgtgttacgttggtatgggttttttaattgtgataatccttctcccctgttggtaacccataagtttctataagaaatcatattagcaccaatttcgtaatcaatgtcggaacctattttatccgaccatctgagtgacagttcaaaaccttcgcgtctatgttcgttatcagatttgatttgtggtagtttcgttcccaatggggtaatgtaacggtctgcgggacttgtcaaacctcctttggttacatagaagaaatagtcggcagaaccttttaacttattatctaaaaaactaccgtcaataccaatgtttaatgaacggcgagtataccaactcagaagatcgggagaaaccaatgctccttcgttgaaaccggaaataaggttaccaccaatgcaaactgcattttctaccatattatacgtagaaaggtagccgaatctatttacatttgtttctgtgcctgttgttccgtaagaggcacggagttttaataaattgatattcttcagatttaggtttttaaagaatggctcttctgtaatatcccatgcggcggcaactgaggggaaaaatccccaacgatgtcctggagcaaaattatcagaaccgtcgtaacggaaacttccttcaatgtagtaacgattagcgtagtcatattttaaacgtcctacaaatcccaagcgtccaccttcttctgcattaccggtattagtcataccaatgctggagccggcaaacaattgatccactgtagtggaaaggtaatctttacggtaagcttcaaagttaaatccttcgttttcggctgctgtaaatacggctttcgcgtcaatggtatgtttttcagcaaaagtatgtacgtatgctgcgcttagttcaaagttataggctgaaccgaaataagctttttctgttagggtaggctttgcaacttgcactactgtaccgtccatattgtattgaggtgcacgagcgtgtaatccttttatatgagatgcattcaaacggtagttgaccatggttccgaaagataatccttttatccaaggaacttcccaatctgcaataaattgtgtattgacaaacataccatcatctttatcatagccggagtccttgtgcatttccattaaagggtgatctgagatggaacttaatgttccgtcaggattataagctaggtctaaaggacttttggcatttaggtgatcccaaatactattggcggaaaatgccggatattttttcttttctagcgaaccgttgacattcaagcctactcttaaacctatttcttcaaaagtggtattgacattactgcgtaaattatatcgggaatagtttaaagcgtcagatttatagaggctgccttgctcaaatatacccaatgatatgtaataatttagatttttctgattgccgtttattgaaagtgaatgacgatattctggtgcaaagtttttcaatgcaatattgtaccaatccgtattggggtatttataagggtctgattggtttcggattatttccatttcctcttggctgtatgccgaatattctcctgaaccatcgtataatccggcctgattttgtacacttgcatacgtataggcgtctattttatcgggcatataagttggttggctgtattgagcattgaaactatatacaattgaggttttacctttgcgtccttctttggtcttaatctgtacaataccgtcggctgcacgtgaaccgtaaacggccaaagaagcggcatctttcaagatagacatactctcaatatcgttgggattcaatgtcttgaaatcccattcgctggctactactccatcgataacataggtgggtgtgctaccgccacggatagaaatctttggagtactgcctggttctccaccttgattttgtacaatgacaccggcagcacgtccttgcaaggtagcagtgaggttggcatcaggtaaaccttgtagtttctcaccttttatggctgttacagcagaaactatctttttggtagatgttgtaccatagccaataacaataacttcatcaagcatttctgtattttcgcggagctttattttaaccgtctcagagtcatttatacggacttcctgcgtcttatagccgatataggagatagctaacatggagccttcgggaacatctaaggtgaatttcccatcaatatctgtaatggttcctatacttgttcctttgacttgaactgtacctccgatgatggcttccccgttcttgtctgtgataatacctgttacttttttaggtttaccggtagttggagatgccttttctttgggatagataatgatgtggttggattcaaaacggaaagtgagtccggttccatttaaagtttctctcaatacatcttgaatattgccatcagaaatgttaactttttctcgaatgacattagacacttttttattattatagtcaaccgatagttttgtctgtttttcaatttgtttgaaaacttcttgtatggtgattgactttttaggaagttggataacttggttttgtgcgtgtcctgctcccgctataaatatgaatgatgaaaatgccagtattttagcactttttataggccataaaatggtctttgtattaaataaaatcataactttgtgtattagatttatctgtttgttaattaaagagctttgcgattctttttttgtattacatttgtaatttatgcagaaagtctatgtgttatttcgaatgtcgggaagctgttgtggaaggcgctttccgatattcttttttattgggtgtcacctcctttcgtattggattgcagaagaatggtacggccatttatggcgtagcctatgtcaccggccaggaatgtcagtacgcgcatcatatcttctatgctttcatctgctttaaatttgatggtatatgtatcttccagatttatttggctgtcatacctgaagaatacgttgcatcttctttctatcgtctttagaataacggataatggttgctcgacaaaatagagttctccgtttgtccaggctgtaaaatcttctgattcaactttgtataattcgaatttatcattctgattgtgatatactagtctttcgtcgggtttcataataattccttctttttcagggtaactggaacgatatactttaacacttccttcctctagggtagtcgttatattttcatcttcaggataagcctctacgttaaaagttgttcctaatacttttatattgagaggaccagtgcttatgagaaacggcataccctcatttcgacttactttaaaataagcctctcccgacaaatgcactttacgattattaccgtagaatttttttggatagatgaacaaactgcctgaattgatagttacatttgttccatcagataacgtaatggtttgttgttctccttttggtacaaaacattctatcatatccgaactttctgccactttgttttccatgattccccaaactaccagtccggttattaaaggtaataaaaggatagctgcatatttagttgcaacttgaaaccattggatatgttttgttcgtaatttgtttatattgagtttctcttttacattttgtaaggctctttttgctgactcatctgaaacttctgtgccattcgtgtcattccatagacgaaacatggcttcttctttttcagaagtatcttgcggtccgatcaaccagcgtaatacgatatcacgttgggaagccggtaatgttctatcggctagtttacggatgatttgatatatcagttgttttttcatttcttccagtcttttaataataagactcagttatgaaaaatatacgtaacatgcttcgtgtattttacattttttatgatttaaaaaaggaaaagggaaagttctagggtaataaatttagaacagcattaatgcggaagtgatttttcgtaatgtggctagtgctatagatatgtgagtttctacggtacgtttgctaatcttcagtcgctgactgatttcttcattacttattccttgtttacggctcatatagaaaatttgttttctttgtgtgggcatattatcaatggcgcgatttattaatgattcaagttcgtggctataaacaatttcttctacttgttcaagagagggggtctctcgcacactgtctattccgactgtgtgggtatttatttttttatctaaaaaggtatataaaacgtgtttggctgtttggtatatatatgcattgatattttgtacgtgggataattgggctctggcagtccataatttaataaaagtatcttgtgctaagtcttcagcttcttcctcgttatccagtatactataaataaaagttcttactttaggataataaagtaagaataaacagtcaaaagcctgcgtattgcctttgcttaaagctattagatctatggttgattctttcataattcggaaatataattccaatttgtttatcacaaagttattgaattatgttgtttgacaaaagaatcttgccttttttaatgagtttgtaacgaataaatatattcatataactttttatagaacggatacttagtcaatgtggaagtgtctcccaatataataagtttcatgcgtgcacgtgtaattgctgcattcattcgtcgtaagtcattgagaaaacaaatttgtctctcttcatttgcacgtactaaactgatgaggatgacgtcttgttcttgtcctacatcaatctgttcctccagaaaacagtctttatctattttatcgatatagttggtaagttgagaaatggagagtgccgtctcctttttattgatacggcgaagctttcacccacaagctcttcgttgtattatccattctatcgatgtgtcatagtccaatatactctgatattttacttcgggagctgatttcagttcaccttggtagaactattctgaagagaaacgtataatttcgttattcgttctatattgtacctttaacaaggatacggtatcggacttgttgtctgcatcttctgcatcagtgtccggtctaatgtctgtgtggcttcatccatatacagattattaacacggatttcttttccttttggtcctgtatttcccatcttcagatattcgatggaaggaggagtgactctgctcaaattaatgttatattgcgcagaaagcgtagctgcactgaaagccaatgcagtaaatataattgcttttttcatgatacatatgtaatttataaacatcagtagttggaaatcaactctgattcatggtttaaaatactataattcagttaattaattattcttattgtttcccaattatgattcccaaggagaaaaagtaaaaactaatcgaatttaagctgtatccatccggctatgtcaccatcttcagcgatatatgaatctagataccttgtcctgttggaatcgtaattgaggtaaaattcattgcctgcatcggaataattggctactaaaaaagatgtggcatcgggcaaaacccaggctctgagatgttgcttcccgtttgattcgattgttactgcatttccattctcattgatcagcttgccgattatgatattttgctttgtcgatctgaaatcatttgagccgtatttatttccgtctttattaaaaccgtgtacaggtatcgttctttggcggagataatcggattgagtttctggataaaaggcttttgccgttccttcggtgcgaccgatatggtcatccggatagacactccataatgattttcgtttccaatacaacgtattatagatgtcaggaaggtggaaacctataccgatttggcgaatactgttaccaatcttgaatatattcagaatataatcgattcttagcctgttgttattgtcgaaagaataaacgagctcaatcggattttcttcatattttccacggacagtgatggaaacacccttatcagtctgttcgatggactccgattcaaatctccaatcctttaaaggttctgaggtaaaaccgaggaattttccggtctgttcctgcggaatataatcaatgacttcgtattctttcagatggggtattgcatacaccattgccggtccggtaatgatgtgttctccatttttcattattgaaaccaatgttcccgttttacgagagaactcatatcggatattttttgaaatgatttgataggatgtatcggaagaaagaacctgtactttcccttttgtcaatccggggatagcataataaggggaatagactttagggattttccatgtcgataagtcaaaacctcttcgatcccttatgacgagggttagtgtatccccttttacaatgtgaggtatacgaagtgttccctgccttccgggaagaatgtcagttgtcacaactccttgctgtttcatgtctttccagataatatccgtctgatttgtatttaatgtattatatctgttatctaatgtaatcaatgtctcgttgccggatatttcaaaatgtttactggtgacaatgataggagagtagctcattttcatatgccagaattccggtttttctctcctgaatccatcgacaactccccaaggaccgtatccgcaaggagcattttctttggggtagaatatctcatcggtacatccccagatacctagtccggtgatggaaggtgactcctggataaaatcgacaaaatatttaagatagtctccccacatatctcttagtcccggatctgttatgttctcggaagtattgtagcaattcagatggagggcttccccgaatatgatcgggcggaagtaattctcgaaagccattagtcctttccaacccggataatgcttagttccgatatctgttgcttttatgattccgtgagtttccgaatgggagaatttgaccggaatgccggatgccagttctttagccagtagcaggttgttgtaaaatttaggtttccattcgctttcatttcctaaagaccaaagtagaatgcaagggtgcgtccgatccctgactaccattgacttgaaaccgtaaaagatttggctgatcctgtcatacgaatcttttccggactcccagcagactggtgcttcatcttctacaaagataccgtatcggtcacataagtccaacatataactatccggaggataatgcgaagtacggatataattacaattggcattccgtaactgttcgatatcacggcgtaaggaaaccgtgtctttaatggcacgtccttcataagcggaaatatcgtgacgagaaacacctcttaatttaacagggagattatttacgtaaagaatattctctttgatttctattttcctgaatccgaaatttctttgtatgatctctactttttcattattctcaaagagagagacttcaacagtatataaaaaaggagtttctgcatgccatagtttaggggcatcgataacgatgtttttcaactgcttaaacgtcgttttttgccgatagatctcttttgcctctttggataatccttcgatacctctttccctgatgatgatttcgattttgggatttttctgtctgccggatattgagaggtgagtatttaatatgccttgctttaaat

SEQ ID NO: 6828 - DNA, 1404 bp, Unknown
  gut microbiota DNA sequence
catcagataattgcgcttcgcaatataaatcgttgatatacgtttgtgggattgcaatcaattcaacatttcgtaatattcctccgacttggtgcttggcataatgggatatttttgatattccgctggctaacgattcgctacgtacatagaccgtcagccggtttttaccggaaagtaagaaaggggttaactctttttcaaattgcgtcatcgaacctgtatgttcccctatatatttcccattgaggtatatccggcattcgctttcaacagctccgaaacggatcagtgtcttttgctttttccaatcggcggggagttcgaactctttgtaatatccggcccattttccgggttcaatcaggtatgattccatataccattccgatggaacgctgattggttcccatttgaaattcggtttgctcacgttgcccggaatgttttccacgttacaggcaaataaccaatcgccgttcaatgagtgtatgggttggtttactccttttacgtaggagggtgatggtgtgtgtgccaccgaatgctttcggtttaagccggcatataacgttttgactgtttcgaaggtgtagaccttgtctgtctgtgcccatccgccggcagagcttaggctgaatgccagcaggagtaaccatttttgaagatatcttttctgaacaatcatatattttttgtataaaaattccttgtttatgcgaatcagtggttgaaaattaatgctggtttatggtttaaaatgtcataattttgattgacttattgttttttattttgttgaaaataagtaaatcagaataatgattacctttgttcttaataatcaaagtatcttgtgtaactctttgtttttttcctaataaaagggtatcaaaactaaaatggcctatcaaattgtcaattgttggggtaggggggcctgcccgaagcaacggtcacgaccttggagggggaatacacaaaacaaactgttttcgggcgagtaaacctcgcccttattgacaaaataacagcattatcaacggtttgacacaattctccaaaggctatagtcttagtctcaccacaccttttatggagtcacctttgcgtaaaggcctgtatcctttctgtgcatgggacactaaataagtatcacgacctgcattattataatcagctaccaaaaagcgtatattgttgccatctatccaggcacggaaatgttgcgtgccgtccgatagtaccgatattctttcttttccgtttccacttaatacggcagtatatatattctctttggttgaacggaaaatattggagccgttggctgtctggtcgaaagaccatgccgttgtcggttctttagaaggtcctgccagaccggatacaggcaatgtttca

SEQ ID NO: 6829 - DNA, 3539 bp, Unknown
  gut microbiota DNA sequence
tgctgttccttccaaagcgccgatatgatctttcgggtaggcattccaatatcctttacgtttccattccaattggttatagaaatggggaacggtaaatacaagtccggtttgccggggagaaatatcttgcaataaagtaaaattgtatgatacagtgatttctccatcagggtaaaaacgatagctgaacttgccttctgcttctttgtaacttcccaggatattgacttcaatgacttctttcattgcaatacattctactgattgcgccacccagttttgacagaccggattgaatggcgcaaaagtctggtttttgcctgtcatctgtatgccttcaccttcaccgttcaaggggagtaccatcagtgagggagattggttcaacacacttttaccttggtgtgcagcagtcaggagtccgttgcgtttgctaatctcaaactggtattttcctgcatttatccggataaggtctttcgattcttggcaagtgagtttgcctgccgggtgtttcggggattgtgattcattgttctcgggtaagatacggaaacaataacggtcaatttcaaagccgcggactcctgtgacggtcaggttcagcatctcggtatggcgtaatgattccggcaaggttatttccagttcgcctgccgaacggggtgcgatgtcaccggtgatattaccttcttgtccaccggcttcccaggttatacggcattctgccaagttactgaaaaggtggcggttttcaacttggaaccgtatctttccttcatggtccatatttcctttcagggagattttaacgggactatatgcctttttcatcccccaatattcgggtttttcgcggcgccagccgtctatggttccccaagtgccgtaacctactgctttttcgcccggcagaaagaaagtgtcgtcaatccctacccagatggcacctcctaaaacaccttgactgtggtacatatcattccacatggcgtctaataattttccccacatattgcgcaaaccgggatctgcggcaagttccaggcggttgtatgcgttcaggtgacagaattcgtcaaaagttaccgggcgtttatagtggcggtatttgtcgggaccttccgggccggggtaatgatggttagttatttcaagcgttccttcgtcggcatccggtccccactggctgaaaatgcgaggacgggtaggatccagctgtttgactgtttccgatgcttgtttgaagtattccttgaatttcagtgattcgtttcccattgaccacatcaggatggaagggtggctacggttcaggtttaccatttcgacatgctggttgaccagcacgtcatagtgcttgtcggcgggtacatccgcttggtgcgcccaacagaagggagcttctacttcgacaaacatacccagttcgtcacaggcttccagcagtgcttcatcgggtggatagtgggaagtgcggatatagttcacattgcctcgacggaatagttcgacatctttgcgccatatatcattgttaagcgaacgtccgcgtaagggcataacttcgtgccggcagactccacggagctttatgggatggttgttgacaaagatttggttgcctcggacttctatttgtcggaatcctatgcggcgggttgtggcggataggattttttgcttgttttttaattggcacgtcaggctgtacagatatgggtgttcgctatcccattttaccggcttggtaacgggaagggatatactgatggtttctgtttttccattgatgattgtcggtaccggagaggaggcggatggcaaggggataatctttccggcggcatctttcaggataaagtttacagtcagcccatctgctttttcctttgattcattggcaatggtgatttccgctttaagtatggcatcggtataagtggaatcgaatgatgtagtggcatggaacatggaaaaatttacttcgggcaaggcaaacaagtaaatgtcgcgtgtgattccgcccaatggatggactgcgtagttggaggcattggaagttgcatcggctatgctttccgaggtaacggaaagggctatttggtttgtttttccataagttaccaaatcggtgacatccagctcgaatgctgtgaatccgcctaaatgggaaccggcttcttttccgttgacaaacactttgcaatcactgtacacagcattgcaacgtaacttgatacgttgacctttccatgaggcaggtagggcgaaattccggacatatccggcggcttccccttttttaacttcgaatccttgcatcacccattcgccgggcacttggattgtattccagtttttcacgtcttccgttccattgaatccgcttttgagtgacggatggaaataccattccccgtttagtgaaattttttgcccttgtatggtggcaggcagtggggagaggcgggggactattgtttctgttgctttcccggataatattaacaggaagagcagaccaagtgtaactaaaacttttttaagcatgattttctttgttttgatgatatgcaaaaataggtaatacatagggaaaaaagaaagggaacagatggggaagtgggtgcaaaaaggcggttatcggaagaaaaaatgtacaaaacggaaatacacatttcattctgttgaaaatatgtgcatggttatccgaaaaaaaaatagcaaagacccgtttagggggctccctgcaagtatccgttattttaggattatataattttcttcataaagctcatttcggatcagccctgttgtatccgaaatcattctgtggggtgtaacggttgtagttgtcgtagcggatgagggggagattgccctgttaagcgatcagactactgcggcttatgttttcaagcactactttttattgagtcttgcttttaattgatttataaaaataattccggcgtgagggcgtctgaaaagggcatcttcaaaaaatagccgcatagacaaaaaggagatgtcacgaccttgggagtaatacacagagcaagtcttttcaggcgggcaaacctcacccctactagcaaagcaacagcattattaacattttgatataatcccaaacagtcaaaagcctgcgtattgcctttgctttaagctattagatctatggttgattctttcgtaattcggaaatataattccaatttgtttatcacaaagtcattgaatcatgttgtttgacaaaagaatcttgccttttttaatgagtttgtaacgaataaatatattcatataacttcttatagaacggatgcttagtcagcgtagaggcatctcccaatataataagtttcatgcgtgcacgtgtaattgctacattcattcgtcgcaagtcatttagaaaaccaatttgtccctcttcatttgcacgtactaaactgatgaggataacgtctcgttcctgtccctgaaaaccatctaccgtattgatggtgataaggtgtcggtaaggcttgaag

SEQ ID NO: 6830 - DNA, 15675 bp, Unknown
  gut microbiota DNA sequence
taattgtttagtctattcgagaccgactaatactcttcttcgttaaagaagaaatcttctttgctcggataatccggccaaatatcctctatactttcatagatttcgccttcatcctccatctcctgcaagttttcgattacttccaacggagcacccgaacgcattgcatagtcaatcaactcatcctttgtagcaggccagggagcatcttccaacttcgaggccaattctaatgtccagtacatagttatcttatttttaaagtaaatacttttctttctgtctctatttagccgcaaaagtataataaattatttcatttgcaacttttatcccaaaaaatttcttccttttttgcaagatagttcaacttccgtgccaaaatgaacagataatccgacaatctattgacaaaagctgtaacacgagcctctatctcacattctcccgccaatgccaatatacgacgctcagccctccgacacaccgtacggcatatatgacaaacagcagccccacgcgctcctcccggcagaataaaggcatgaagaggagtaagtgcattgtctatttcatcgatagcttgttccaacaatgtaatatctttgtcatttatacggctctccatgcgcaattcagtctggctctgatcggttgccaaataggaaccaacggaaaataacttattctgtacatgggccaccaaccttttatcggcctcttctgtcaaatatgtttgcaaaagacccagataggaattcaattcatcgactgttccataagcttccaagcgtatgtgagtcttaggcacacgaactcctcctaccaatgaggtggtgcccttatcgcctgtcttcgtgtatatcatactttttttcatggtcatatttataaaaagttgactatataatgctgtttataacgattcttattaaaaaataccagaccaatatcatataaatcaaaagtaataccgactcgttcgtcagcaaccacctctttccaccatttgcgcttctcttgtgattcgtaaattcctccgatgataaaccaactgtcgggctgcacataagacaacgcctcttcaaacacctcttgatagaaaggagtatgtgcaatgtgcagacaatcgacgcttttcagttcttccaactttttggtcagttgcagcaacgttttatcccggtctcttcccttcagcgtaacagagtccatagtgcggcttgccgcacgcatataactgatggatgctccattaccaatccccacttctatcaatgatttcggtctgaaataattaaccaatctgaacagcaaacggttcactttgcgccgatagtgaggcagataatttgaaaagccccttttcttcaatgtccggtatgcatagtaaggagatctctcataaataatggaagttatcaaaaaaaaatcggacggggagtgcacgccgtaaccacaacgatgacggaagcgtttacaccatatccatagtctgcaaagaaaaaacatattatttctaggttgttaagttacacaaagataaaagattgaagaacaatatcgaaataaaacgctacttttgttgcctattagcttattttatcagaaaagaattatgaaacacactatctctctttttatatggacagtatgtattctgctactgccattagagttcatccatgcagaaaacaatcctaccgagctgctaaaaaagatccaaagtcttccgggaattaccgacattaagccgctcgaaagcaatgcatatcccgaaaaatatgttttgttcatcgagcaattgctcgatcctaaacacccggaagccggtagtttcaaacaacgaatcatcttaggtcatattggttttgaccgtcctactatcttggtaaccgaaggatatgccgccacttatgcgttagcaccacgatatcaggaagagctctccaaacgattaaacgccaatctggtatttgtggaataccgttattttgatgcatccatgcctgacccttgcaactgggattacctgactgtggaaaactccctgtatgacttacatcacgtcaccaccacctttaagcaactttatcctcaaaaatggatttcgacaggaatcagtaaaggagggcaaaccaccatgttctatcgtgcctacttccctgacgatgttgatttctccgttccttatgtagctcccctcaacaaatcactggaagacgggcgccatgaacctttcattgccgaaacagtctccacagcccaaaatcgggaaaaagtaaaagaattccaattggaagtattaaaaagaaaggctgagttactgcctatgttcgagagatattgtttaaacaaaggatatactttccgtgtacccattacagaaatctatgatttcaatgtgctggaatattccttcgcattatggcaatggggcacttccgtcactaagataccttcacccaaagccgacaatcaaactatctttaaccacttcatcgctatctgtgagcctgattatttttcggagcaatccccctatccttcttttaatgtacaagcagccaaggaattagggtattatggatatgacaccaagccttttgaaaaatatcttactatcaaaagtagcaaaaactatatgtaccgggttatgcttccggccgatttgcagcacctcagttttgatgatacgctctataagaaaacggtgaaattcttgaaggaaaacgacccgaaaatgatttatatctatggaggagatgatccatggactgcatcgggcgtcacctggctggaagaaaaagaaaatatcaaggtatatacattacccggtggcagtcaccgcacacgtatcggcagcttcgataaaaaaacacaagaagagatcatgacactcataaaccggtggttaaaagagtagactttcttcatcgccggctcccggcaaatataacaataccaaagaatcccattttaccgtcttcttgcatagagacagcaaaatgggattcacttcatattattaacactctaaagtataaaagaaggcactttcattacaacggcatattgccatgctttttgggaggattactttggtttttgttgtgacacatatccaaagcctgagccagtttatatcttgtatcgcgcggcataattacttcatcaatcaaaccgcgttcggctgcacggtaagggttggagaacttattctcatactcctttattatctcctgcttctcttcgggagtcgatttacgatacaggatgtttactgcaccctcggcacccatcactgcaatttccgcctgtggataagccagattcacatcagcacctgtcggcttgctggacatgacgatataggctccaccgtatgccttacgggtaatcagggttactttgggaactgtggcctcggcgtatgcatacacgattttcgcaccgtggcgaataatgccgttgtgctcctgcaccgtaccgggaagaaaaccgggaacatcctcaaaagtaatcaaaggaatattgaaacagtcgcagaaacggatgaagcgagcagccttgtcactggcgtcgatatcgagcacaccggcaaggtaagcgggctggttggcaacgatacccaccgaacgacctcccaaacgaccgaatcccactaccacgttcttggcaaaatgaggcattacttcgaaaaagtactggttgtccagcaccggttcgataatatctttgatgtcgtaaggcatattggggtcttcgggaataacggtctgaagtgcttctacctggcgatgaatatcatccgtacagggggcaaggggagcatcctccatattgttggaaggcaagaagctcaacaactcgcgaatactcatcagagcttcctcttcattattacacataaagtgagtgacaccactcttggaactgtgagtataagcgccacccagttcttcttttcctacctcttcattggtcaccgtctttaccacatcgggaccggtaataaacatgtggctttgctctttcaccataaagataaagtcggtcagtgccggagagtagcaggcaccacccgcacaaggacccaagatggcagaaatctgaggaataacacccgaagcgatggtgttctgatagaagatagacgcataaccggcaagactgttcacaccttcctgaatacgggcaccgcccgaatcgttcagtgcaataacaggcgcaccgttcttcagggcaagttcctgcaccttgacaatcttggctgcattggtttcactcagcgaaccaccgtgtgcggtgaagtcgtaagcatacacaaaaaccaggcggccgtctatctttccgtaacctgtcaccattccatctccggcaatctgttttttatccataccgaaattggtgcaacggtggttcaccaacttatccaattcattgaacgtgcctttgtcaaggagcatttcaatacgttcgcgggcagtcatcttgccctgtgcatgctgcttctctatcttgtccacaccgccacccagcgatgcctttttgtccagttcctcaaaccggctgtatatttcttctcttgtcatggttctttcagtcttcttttatgatatccaatattatcaactcctgattggcattgacggcatcgccctcctgcaccagaatatcctttacgacacaatccgaacttactttgtagttgctctgcatcttcatggcttccagcactaccacgatgtctcccgcactaaggcggtctcccttttgaacggggattttaacgaccttacccggcatgggtgcaataatccgatcgtcttgtttctcttctccacccttcttcatgcgcaagtacttggtctgcgtatccacaatatctacgtgataagagcgataaaacatattcacgtcataactcttaccaccttcaccgcgaatcaactcggcattaaacgaattgccatcgtgaagaatggagcaacttccgttctcagccatcacaatatccacatcgtatggttttccatcgataaggaactgtaccttattaccctctttgctcaccaaagttacatcggcgatgcggtctcctatatgtatttccatatttcttttccgtttgtttagatgcgtaatactcccttctgcaaaccgaactcacgccaacggctgatgggacgaccgtcgggcaactgtgaactcttgttttcttccagattcatcagataatcgatgtaagaggcaatcatggcaatattctcgatttcttcgttgttgccattactgcgcaacagcatacgggaattcttctcgataaacaacgtattatattcgccttttacaaagtcgggcgtatgcatgatacgtttcaaataactgagattagtcttcagtccggtaattttatattcataaagcactcggcgcatacgctcgatggcatattgacgggtggtggcccacacaatcaacttaccgatcatgggatcgtaataaataggtatctcatacccttcgtacacatagctgtctatacggacaccgataccgtttggttcagtaagctgcttgataatacccggcgaaggcatgaaattgttttccgtgtcctcggcacagatacggcattcgatggcgtggccgcgctgaaacagctcttcctgtctgagatgcaacacctcatcattggcaatacggatttgttcctttaccaagtccacaccaactacctcctccgtaataggatgttccacctgaaggcgggtattcatttcaaggaaatagaagttacggttcttgtccaccagaaactcaatggttcctgcacccgaatagttcactgccttggctgcggcaactgccttttctcccatctccttacgaagttcgggagtaagaaacggtgaaggactttcttccactattttctggttacgacgctgaacagaacattcgcggtcgaacagatgaactacattgccatgattatcacccagaatttgaaattcgatatggtgaggttcttccacaaacttctccagataaacagtatcatctccaaaagacgacatggattccgaacgggcagtattataagcttccactacctcattttcattatgaataagacgcataccctttccgccaccgcccattgaagccttcaacatcacaggataaccaatctcattgcaaatgcggactgcttcctcagcactctgtaacggctgttccgttccgggaacgactggtacaccggctgcaatcatacgtttacgggcagcaatcttatcgcccatcgcctccattgtctcggcagccggaccgataaaaataataccttcttccttacaacggcgggcaaagtctgcattctcggataagaagccatagccgggatgaatggcatcggcatgatgctgcttggcagctttgataatattatctatattcagataactatccttggaagcggcagggcctatcagacaggcttcatctgcatacattacgtgccgcgctgtgcggtcggcttccgaaaaaacagccacagtgcgaatgcccatttccttacaggaacgcattacacgtacggctatctcgccacgattggcgattagaaccttttgtatcataatccttctttttacctaaaacggtcgcaaagttagcttttttttgcacaaaaactaaaaaagtgtgcttaaatattgcgccaatacacgcgcatgattctgctcctgattcttcgaagcataaaggagtgtaaccttttcataaggttttatcctatcaatgaacgttttaacagcatgtgagcgttccagttccttttggtacatatcagcaaaggctccccatcttttttcgacatcagcatgaaaccatttacgcaaatcattggaaggagtcagttcttttgcccaataatcgtatttcagatactcccgtttcatgcctctgggccaaagacggtcgaccaatacccgataaccgtcattggacgaaggagtctcatatacccttttaatattaatttgagtcatagtcagtttttttaggtttaatggctataaccctttttggatagaaatgttcactgattataagataagttcataatcgctgacatcaagccaacgcccgaacttcagtccaacctccttaaaatgagatactttttgaaatcccagcttagtatgtaaagaaatactgtcttcattcggttccgtcagacaagctatcagtgcatggtaaccctccctccggcattcttctatcaaacgcatcatgagttgggttcccatacctttccccacacaatcgggaagaaggtaaacagttgtctccagcgtatgtccgtaggccacacgctgtttccagggatgagcataacaataccccacaacttttccgtctgattcacaaacaaaataaggataatgagccgaaatcccggctatccgaccacgcatatcctcttcgcgcacaggctcaatatcaaatgtaaccacactatgtattacatactcattataaatagccgcaatcgctttagcatcttgtaattctacccttctaatcataacggtatttatttaaaaacacaggcaagatataaaaaaaaagctatctttgcaaacagaaaacaatattaagaatgaagattctctggatagacctcaactgttcgtatgctcactcttcactggcactccctgccttgcatgcacaaatggcttcggacacctctgtggaatgggatatagtatccgctaccatcaatgaaaatgtagggatgattgtcgatgaaatctatcgccgccggcccgacatacttgcagccaccgcctggctgttcaatcacgaacaactgatgcatatcacttcccgcgtaaaggcattactgccggatgcctgtctcattttgggcggtcccgagtttttgggagataatgaagagtttctgcgtaagaatccttttgtcgactgtgtattcagaggagagggagaagaagcgtttccgcaatggctggcatgccggaaacagcctgagaagtggaacaccattccggggctctgctatctgaccgccgaaaaagaatataaagacaacggtttagcccgcgtactgaacttttccggcctcgttcctcccgaagaaagccgtttctttaattggagcaaaccttttgtccagttggagaccacacgcggttgcttcaatacttgcgccttttgcgtaagcggaggagaaaaaccggtgcgcacactgtccatcgaaagcatacgccacagactgcaaatcattcacagccacggcatcaagaatgtacgtgtgctcgaccgcaccttcaactataatccgcgccgcgccaaagaacttctccgactttttctggagttctcacccgacatctgcttccatctggaaattcatcccgccctgttgtctgaagagctaaaaaaagaattgcgacaattaccggcaggactccttcatctggaagccggtattcaaagtctgcgtgaacccgttttagagaaaagccaaagaataggcaaactctccgatgcattggaaggattgaaattcctgtgctcactatccaatatggaaacccatgccgacctgattgccggactcccgctttatcgcttggatgaaatatttgaagacatatatacccttgcggggtaccgcgccggagaaatccaattggaatctcttaagctattgcccggaacagagatgcgccaccgggcagacgaattaggtatccgctactctccccttccgccttatgaagtattgcaaaccggagaaatcagtgtaggcgaactgcaaacagcacgcagactgtcccgcttgctcgatgccttctataatactcccgcgtggcaggaactgacacgggaactcatactgaacgacaggcgttttctatatagatttctggcttatctgacagaagccaatctcatcgaccaacccatgagtctggagagacgcggattagttctatatgaatattgcaaacaatattatcccgactatcggacacaagcctccatagcatggatagaagcaggcatgtcactcaagaaacttccggcagaacacgtgaaaaccaagcggcaaattccacccgaacattgggaagtgatctatggcaactataaacccgaactacgcctctgcttcctgcctgtaagcaccgacacggaacatggttattggttcggtttcgaatcggagatacaaaaaatagcaccggtcttcaaagcgcggacctaaagcaggctacaccttattatatatagacataaaaccgacttatttatgactcaaatcatcgaaatactggaatacaagccggaatatctggaagccacccggaaattcctgactcaactgactacccgacccatacaacttacagaagaagccttcaggtatacactcgcgtcagcgaacagccatctcttcttcctgctggatgacaaagcggtggcaggaatgctgactgtcggaatctatcattcccccaccggcggaaaagcatggatagaagatgtggtgatagacgaagcttatcgcggaaaaggactcagtaagatgttggtgcgccacgccatcgatttcgtgaaatcgcaaggcatccccgcgctgatgctgacctccaaccctaaacggacagccgccaacaagctgtatcagacaatgggatttgaacagaaagagaccaatgtatacagaatgaattgctaatcttaacacgatataaaccaagaaagcatgagaatcagaaaaacaaccctcaatgacctggagccggtaatggccatgtatgactatgcacgcaagtttatgcaagagcacggcaatcccaaccaatggataaacggctatccctctgaggaatacatccgccgcgaaatagccgacggacacagctacatatgcgagaatgagcagggagagacggtaggaaccttctgtttcattgtcggagaagaccctacctatgcggttatcgataatggcaaatggctgaatgatgccccatacggtgtgattcaccgcatggcctccaacgggaaagagaaaggaattgcagaccaatgcatccgatggtgctttgagcagcatcacaacatacgcgtagacacacatcatgacaactatgtaatgcaaaacatcttgaagaaaaacggtttcgaggaatgcggaattatctatacacacaacggcagtccacgtatcgcataccaaaaaaacgtataaaaaaacaataaaacacacatttaatactatgaaaacattttatattatatacttgctacttgcctgccaaagtatcatcaccggtctttcagcacaaacagtcagtgggaaattagtagatgaaaaaaacgaaccgatgccatacgccaatgtagtactgctatcactccccgactctgcctttgtcagcggaacaataagcggagacgacggaacattcagcctgagtgcaacagcacaacctcagatagtacgcatttcctctatcggatacaccaccatatacagaccggtgaatcctgccgacatggggattgtccgactgacagcagacacacaccaactgggtgaagtaaccgtaaaagccgacttacccaaaatgcgtctgaaaggcgatgcgatggtgactacagttgcgggcagcgtattggaaaagtccggtacaggcaacgacctgctcgacaagataccgggtatctcggctgaagaaggagcagtgaatgtattcggaagaggaacagcggaagtctacatcaacggaagaaaagtgagaagcagctcggagctggaacaactctcttcggacaacgtaaagagcgtggaagtggtacgcaacccgggagcacgctacgacgcttccgtaaaagccgttgtccgtatcctcaccaaaaaggcacaaggcgaaggattcggtttcgacaaccggctcgtgactcgcaaccgccgcacgtatggctggaccatctatgaccagttcaacttcaactaccggaaaaacggtttcgacctttccggcactttattcggcggcaaattgcgaggcgggaacaaccaacagattgtcattgacacctatttggacaagttatggcaacaaaagatggatgccacatacgccaagacaaaacgcagcaacatagaaggcacgctcgccatgagctatcagttcaatgaaaaacattcgatgggaatacgctacaacatagaccgttacatgtctacccatgaagactggcggtatctcacacaagtgttgtgcgacaaccaaccttacgagaacagctccagccaaatgattatccacaacccttccaccactcacaacctgaactattactacaacggacaggcaggcaactggaatatcgacttcaacgccgacggcctatggagccctaccaaagagatacaaaacacaacggaaatcattaacgaacacaatgaaaaccatatcaataccctgaacgaaaacaacaacacgctttatgctgccaagttggtactctcacatcctctgtggcaagggaacttatcgttcggaggtgaatactctcataccaagcgcaccaacctttatctcaatccggaaggtatccttgccaatgacgacagcgagataaaggaaggagccgcctccatgtttgcagactacacccgttccttcggcaacgtaagcatacaggcaggcatccgatacgaacacgtaggcttcgactattacgagaaaggcaaacacatagatgtacaaagccgtaagttcgataacattttcccttcgctgaacatcaacttccccatcggaaagacacaagtgcagctcagttatgcaggagacatcacccgcccttcttatgacaacctgcggaatagtacttattatgccaaccgctatacttatcagacaggaaaccctttcctgactccgaccatgacgcaaaacatattactggctgcctcttaccaatggctgaatgtctccgtgggatacagccgcgtgaaagacgacatgatacagatatcagaaaactattcggaagagaatcccaccatctcgttgatgaaagtggtaaacaccgaatcctacgaccgcatgacggcatcactgacagtggcgcccaccatcgggctgtggaaaccgcagttcacggcagagctctacaagcagtggttctccatcgaaacccacaacggcataaagtcactgaacaaccctgtcggtacatttgtctggcgcaacaacctctcactgcctgccggtatactgcttgatataaacgccgtttacaccacctgcggccacaaccagaacatatacctgcaaaaagatgcgtgcaatgtgtcgctggctctatacaaagcattcttcaataaccggctgagcatgcaactgcaagccaataaccttttggaaaccgacgatgcggacatattgatatacagcggaatacgcactatgagcgattatataacccagttccgacaggtaactctcaccttgcgctacaaattcaacgccgcaaagaacaagtataaagggacaggagccggacaaagccaaaagaaccgtatataaacgacggacatggctcctttcggaaagcaataacattatcggtgtgactgatataagacaaagaaaggaaatgctccctttcaccaatccgataaacagcgggaaccctgttaccaatgcaaacatttgaatattgtttatataattgattatgaaacattttctatccatattatttatattttctctcaatcttgtcagcccacttttagcgcaagacaagagttcggtagatatgtctgctttattagagaataaaatatggaaagtgcaattaccccaagacaaacaatatgcaatagaaatggaatttcgtagtgccgaatggaaacaaagttttctatatgataaaaaacaaaccccaatatgctattcctattctttgcatgaggatacaatcaaagtttttgaatcgggaaaagattatatcatacaggaactgacagatagtacgctggttctccaatatctgccggagattttgacaatcgaagttgcacctgtcagatgtacaacagataacagtattcaaggacaaaggcagaacgaagaacgcctggatagtatttggcgtaaagaggacatttggaacaagggtgttgctaaaataaccggagagcctattaaggatttatccacgatagaacctccccgatgggcaatatggaattacgatttggaaaagtattttgtttctcgaatgaaataccccaaaaagttgctggaaaagaacgtggcaggctattccgttgtaatgttctctcttgatactttaggattgcctcgtggaataaatatcctgacgtctattcataaagattttgataaagaggtaatcagactgacccaagagcttccgcactgcctgccttgcagggacaagaacggcaaacggatggaatgcttttatacagtgtatgtaccatttttaccgcaacattacaaagacagggtaaaaacggatagtgttagagaagaagaactgaaacagtgtcttgtagaatgggaaagcgggtcttacttccaaaaaggaaatccgtatgcaattaccaactacatcaatgaacacttgagatacaatcctaaaatgttgggcaacaaaaatcaaatcagaggaatttacacgatacagattgattcctacggagaagtgtcagaagctaaaaccatgagaagttgcggaatcccggaatgggataatcaagtattgcaaatcataaaaagcatgccacgatggaccccggcaatcaattattggaaaggtgaatattgcaactccgtttggactgtacctgttttattcaagaatgatagtccgacaactcctatcaaccctcacaccgatgtttcagttatcggttatagcacttgtgatacccctgtcttgatgcgatacgatgccacactgaccgcccataccacagaaccttatttggaggtgggtgttccggtctgttatctgaatgaacagggtgacaccattgtgccatacggcaagtacagatactgtcagacagatactatcaaaaaactaggttttgtttatgagcacaagccaaaggacgctcgaataatctgcatcaataatgcgggcaaagaacttttctatgtattcaaatatgataatggtcccgactacatacaagaagggcttttccgtataatgaacgaggatggattggtaggttttgccgattcattgggtaatgtggtcataaagcctcaatttaaatttgcttacccattcgagcacagcaaagcaaaggttactttctccggtgagaacaaagtaattcccgattccaaaggcgaaaagcattaccgggataactctgattggtattatataaataagaatggtaaaataattaacaagtagatatgtatgaaaaatctgatttacttatctgtccttttgtctgtttggtcgctgaagctgaatgcacaggacattgattttccccttttacagtcggaaatagagaagtacgaaagtcgtgtacatatccaaaggcttcccaatgtttacgttacgcatccggacgcttacaaaattcgaacccaacaacccgtttacccgtcctcaaccaaacgaattacgttggatgtaatcaatgtagatgctcctaccgccgaacccgaattacattggatgaagtacaggaaaggcggtgagtggaaagagtttcctttcattgacaatcttgcctttgctggcgtgggcagagatttgtctaaaggcgatacgttgcccgaacacattcacatgtccgagtttaaatatccgttgaaaccgaacaagtaccaagttcacttttacgtgttctccaatatctacacgtattgcaacctgacagacatggggattcagcccgtgaaagggacagagatgcagggagcttttagttttagggtattggaatccgataacgattctatccgcatacagtttgaaaaccataccaatctttcggtacaaccgctgtttcttccgagcataggaacggatgaattgtatatggtacatccgcttacccgctccggttcgagagatgaatctgattacatgaggagttgcgcacgtttggaagcaggagaagcaatgttgttttccatacctgtatcatggaatgtcagtcgtattaccgaccctaattacaaacaacgattcagttccgggaaattatctcccggcaaatacaagataggattacaattggaaatatacatgaatacagagtttgaagtaaaataatctccctatgaaagctggaaatatggatcaagtcaaaaagtgtgtgggcataatattttgaaaaaaatcgggttacttattattcttggagatttaaatatcatatcacaaacaaagggaagaataagccgtttcccaaggtcggccaaggtcttttgaacggaagattattacagtctgcggcaatagactgtacagtccactatagcagactgtacggtccactatagcagactgtacggtccactatagcagactgtacgg

SEQ ID NO: 6831 - DNA, 588 bp, Unknown
  gut microbiota DNA sequence
atccgacggacagacgggcataaccgaaaggacgaaaacgcttggttcggctaatgaaatggcttaggaagctcaaaaacacatacagggattggaaaccggagtagacaacatcaggggacagatgtttgattcatatgttaaattcttcatattcaggctggctatgctatacgcttaaaagaaagcttgccaaccgggaaaatccgctgagccagcaaaggtatatgcatgaagggaattgacaaaacttaatcccccaagaattacaactgagccatacagacaattaaccagaatcgcataatcgctgataaagagaaactaaaacagcataagcataacgcaaaggctcggcaatacagaagttcacgcctaataaatcaaggtgtttgtcctcaatgcggaggacatctcattttgaggaaaggcaagtacggcactttctatggatgttcaaactttcccacatgcaagtttaccataaactcataaatagcaatccttgttttatatagtatcagaacataaaactaaaccctttctttcgtgatacattgaatcgttcaatttctatagaaagtgatt

SEQ ID NO: 6832 - DNA, 859 bp, Unknown
  gut microbiota DNA sequence
ataatatattaatattagtttttgaatttgtttctgccggagaaactgcgggagaaaccgccggagaaaccggagcagaaatagaattcgtcgattgatgatgccataagggagtgaagaatgcgagaatctcagttcggttttcattccataccagttcgaatgatttgcattttttgatgtattccaatatgtccgaagtatgtatggtttttagtgccagacaaatttgatagaggttgttgatggggtatactccatcttcattcatgaaatggggcatacccagatagagatccagtaatttcagacaggcagagtcgctgactccccatgccttccattggtgaatcattttctgtatttcacggatggatacgttttgtttcagtgcttttatagccataagagatattgttttaagttaattcttgcgaagttaggaaagaataagttggtattacttcccgctagggagaagtaaagacacgtttgttgtatataattaacaattaataaaagaaagtaagatgaagaacagacagttcgatacagagaagttggcagcaagcatcaaagtgcttgttaaagctgccggattgcgtaattcagaggtttgtaaagacgttcgtatgagtccctcttgttactacaggactcttaaaggtaaactgatgatttgagtttttatgctgttattattcattttctgattatcaactgccgtgattgcggtgtggagactcagatggaagcggtgaaacgtgaatggtggaatgtggtaatggagaatgaatgggagttaaaaacggtagataaaaagaaagataaattggaagaaatataacctgttttttaa

SEQ ID NO: 6833 - DNA, 344 bp, Unknown
  gut microbiota DNA sequence
ggctggaggggaagggccggaagcggcagcaggcccgccgaggggttctactatggtgcggccaccgtggacggcctgttcaacatgagcagcctgttctgcggaagcaatcccgaacgtttcttcaatgcacgccttatcgcgggggtaggttacaaccggacctttgacgagggtgcaagcagcttcatggcaagactgggtcttcaggcaagcttccgcctgaacaaagccttcgatttcaatgttgaagccctggcaaacggtgtttccgaccgctggaaccgccgggacgaccacagcttcgattcctattacaacgtgctggtgggcatcacctacaa

SEQ ID NO: 6834 - DNA, 730 bp, Unknown
  gut microbiota DNA sequence
agaataaagtgaaacgagaatatatttttgcggctccaaatatgccatatgcttatttcgctttattccagtcgttgaatgggtatatgatttttgatcctttgacaaataaggaggatgtgaagtgtttcgctgcggtggctacgagtctgaataatgcttatccacatgccgaccgttcacgcaacttgtacaatatggttataaaaggaatgaagaatacccgtactccccgtcagcagaccatggaaattcctgaagataaaatcaaggaagccagcattattgatattcagctgaaagacttgaaaggcaatacacgcagtctgaccgatttgaagggtaaagtggtgctgatcgattttactgtatataacaatgcaatgtctgctgcacataatttggcgttacgtgaactttataataagtatgcttctcaagggttcgagatttaccagatttcactggatggtgatgaacacttttggaaaacatctgcagataatctgccttgggtctgtgtacgtgacgctaatggcgcttattcttcatacatttcattatataatgtaactaatctgccttcggtatttttggtaaatcgtaataatgaattaagtgcccgtggtgagaatattaaagatttggatgaagccattaaaaaactcttgtaaaaagctaattatgagttgaatttgtttaaacatgttacatagcatccttataaact

SEQ ID NO: 6835 - DNA, 739 bp, Unknown
  gut microbiota DNA sequence
atctgtaccgaatgtttaggaaacccatttgtaaccttcgtccgtcagttcaaaatattcgtccattcccggtttcacaaaaaacatgatttcaaaggcttcgttgcttctaccttcgggtatcgtcatgttgatttctccattgcgggctgttcctcttcccgtattgaaacctaagtcttcgtccgcataggcgtaatggaattccacatccggaaatatctcggaaagtttttggataagcagtggcactccattccatgccgtatcgaaccaaagtatgttcggctcttcaaagtcttggtgataggcattccattttgtaccccatgtggcggtagaccactcgtaccaagtgggataaccgtactttttccgattttccaaatacgatgctccaagttgcagcgcttcttttctgtccttttccgccaatccttctatccattgaatggttctcaaagcatcatcgtccaataaaaaatagaatggcttcaactgcattgcttcaaggtatttcatacccaaatctccactgctgcttttttctatcaacagttcttcaggcataggaatgatgttgttgaagtcgatgtaacaaggcgtattgtcatcatcggttttaccttttaagaaattcattactttttgtactgtttcccggtctgcgtttatttctaaacggtttgtcacatgattaggcataatcttagttttttgaaattgttaatacttattt

SEQ ID NO: 6836 - DNA, 746 bp, Unknown
  gut microbiota DNA sequence
ccgattgacaaatacctatgagagtgtatcgggcgcggctaagcaatataaagcgcaaggcatcgggtctatggtagttgcggaggaaaattatggagaaggttccagtcgtgaacatgctgctatggagcctcgttttctgaatgtaaaggttattctggcgaagagttttgcccgcatccatgaaacgaatctgaagaagcagggaatgttggcggtgacttttatagacaaagcggactatgacaagattcaagaacatgatttgattaccgtcagcggattggcggactttgctcccggaagaaatctgactgtgactttacaccatgaagatggcactcaggatggttttgaagtacagcatacttataatgaacagcagataggttggttccgtgccggctctgctttaaatgcaagataaaagatgaaaaagacagtaccttatattacaggagacggagtgggagcagaaattactcccgctatgcaagccatagtgaatgcggccgtgaagaaggcgtatggcaatgaacatgaaatagaatggatggaagtactggcaggtgaacgtgctttcaacgaaacaggttcctggttgccggatgagacgatggaggctttcaagaaatatggtgtgggtataaaaggtccgttgactactccggtaggaggtggtatccgttccttgaatgtggctttgcgccagacgctggatctgtatgtgtgtctgcgccccgtac

SEQ ID NO: 6837 - DNA, 242 bp, Unknown
  gut microbiota DNA sequence
actcaggtttcctgatcaacgctaatcggatcagggtcagtcgggtcctaaggctcagccgaacggcgaggccgatggcagaaccggttaatattccggtactaccctttggggtgacgtggagacgcagttgtgacaatgccgccagctgacggaatagctggttaaagggtgtagaagttgattgtggcaggcaaatccaccacaagattcgaacctgacagtatggagcgtccttccgg

SEQ ID NO: 6838 - DNA, 895 bp, Unknown
  gut microbiota DNA sequence
aaaagactttgatgtttccaaaaaagatcgagaggttttccaaaaagatggtgatgtttcttaaaaacatcaccatcttttttaaaaagcccggtatgtttttatgtaagggaagatggaaccaccctcaccaagtcggtcattccttcttttccgttcattcttacattttatccaaaacatgcggataatcagtctgttaagaatgacaggacatcccctcatcctcctttcattcgtgcttcccgagtcctttcacaagcagccttcagcaattcccttgtgtactttctacacctctttttagactaccgtaaatgaaagcgttatcgaaacagttcaaaatccggaagaagttttacaaatgaaaggaggctgaaagggggatgaaacgatgtcccttcacaaccgaaacccccatcggcaggacgtttcagcagtagatgaaaggaggaaggaagaaacaggtttccgcttgtagggcgaaaaaacgcagttatttttatggattcagtcattgcacgacaagccatttcaggtatttcacggttactgcttattttcctccccctcttgcggtggattcaaagaaacagtaggcagcaatagcagatagagccccaaagttctttgaactcaacataccgtcgatgcacgataagaacgatgcatttgtcggatgaaccatacccttctacgtgcgcatacatgcgcgcccgcaatataattatgtgtattccatttccttcctgttctgttgttttcaaaaagtctttgttctgtgttgttgtaaatcagcgtgttacaaacaagtttcaaaaaagtgtaagaaaaatcagatgatatgtttggcagttaggttgaaaccgcctacctttgcatccgcaatcgagag

SEQ ID NO: 6839 - DNA, 989 bp, Unknown
  gut microbiota DNA sequence
ctgtttaatctcgccgtccaccgtgatacggcacatcagaggcaggttgccgttcggcttctcgctgcctttcttcacgtaaaataataccttgaatgtactacgcataactcactccttttttggttacaaaattagttattagtgagttaccgacagctatgtaaatcgatgcaaaacgcagaaacagaaccgtttagcaagaaatctgcacccgttacgggagtaacgaggtggtaactgaacttctgcaccgtttggcttcgaggtggtatttcgttggctctgtcccatagaaaaacaaagcgtaacgaacgctctatcagctaattcgctacgctctgcccaaatttactttttcgctatgtgtttattttattttcagacgactccatatcgaccttaccattttgcgtacagtttttcaagaacagaagcacccttcccacccggcaacattaacgatttccgatatacctccggggagcgagaccgcagatttacctcaagttccggcttccgcagccaaaacaaagaagcaacataccttattaattatagaagaccatctggagatacgcctttacctgaagctgatattcagcaacgaatacaacctactaatggccgaaaatggtgaagagggttttaaaaaagcatgtgaaggagtacccgacttaattattaccgatatcatcatgccggtaatggacggtttcaaatgctgccaattgataaaagaaaacctcaccacctgccacatccccgtcattctgctgactgccctcacctcagaaacagatataatgaaaggcattgaactgggggccgatgattatatccagaaacctttcaaccccaacatcctgcgcactaaagtagggacatttattaaatattacaaaatcagccaactaattcatacacaaagtattgcgagttagttggcttttttgtatctttaggtattcccccgaaaataaggtttg

SEQ ID NO: 6840 - DNA, 1454 bp, Unknown
  gut microbiota DNA sequence
ctcccaagaattcacaaatcatgttgtaagcatcttccgagaagagcgcaacaaggttcatcgccatgtgaaacgtcagaaacaggacaagggcgatacctgtgacactcatcaccactttccttccaatagatgaattacttaaccacataaatgattgaatttaaattatttaattgttagaactaaaaattccgttaaaagctgtgtattcacgatgcaaaagtaaaggaattctagcgataatacaaggaattatggaaattattctttaatcagcctaggaacaaagagaagaaaacataatttcctatctttgcggcagcaaactataaaatatacaatgaaaaaaagtatctttctgcttctaagcttatgcctcagcatgcaactatctgcgcaaaactgggacatcaacacggtgaagaccatcaacaaatgggatgtacacggcctcagccgtggattgtcagcaagcggcgttatcctgcctgtaggagtgcccgccgccatgggaatttatgcattgataaaaaaagaccagccgttactgaaagatgccatttatatcggtacaagcgtgattgaagcagtaggcatcacctacgcagccaagcacatcataggacgcgaccgcccttttgtaaagtaccccgataagattcatgtttacggagcaccggatgcagacagcccgtcattcccatcaggtcacacagctgccgccttttccctggcaacatctctttcaatcacttatcccaaatggtatgtcatcgctccttcggcagtgtgggcttgcggagtagggtttgcccggataaaccaaggagtacattatccaagcgatgtagtggcaggagctgccatcggagtgggatgcgcttttgcaaatatttatatcaaccgctggctgaataagatattattcaaaaagaaataaaacctgagaaacaatcatttcattataaaaacatttactatatcaaggtcactcggcaattctataacctcctgtggtttaccccattcggaaaagaaatgtgtcaaaacgtggataatgctgtcgcttagctcgtaggggcgaggttcgctcgcccgaaaacagtttactttgtgtcttcgggcaggcaaaccatgcccttctataagtttgtcattctgcgcaccacaagaatctcagaatgacaaacttaccatattaatacagcccgactactgtttctttttcaacaatccttcaaaatccggttgttccaacagttccaaagccttcctgatgctttcgttagcatcattaataacgtgataatattcattcatatcccataaatcacgagctatcaacgctttcatctgcaatttcagcaaaggcagggctttttgatattcttcctcattatattccacgcccatctcttttcctgtcgctaccaattgccgaagcatatccg

SEQ ID NO: 6841 - DNA, 344 bp, Unknown
  gut microbiota DNA sequence
ttgtaggtgatgcccaccagcacgttgtaataggaatcgaagctgtggtcgtcccggcggttccagcggtcggaaacaccgtttgccagggcttcaacattgaaatcgaacgctttgttcaggcggaagcttgcctgaagacccagtcttgccatgaagctgctcgccccctcgtcaaaagtccggttgtaacctacccccgcgataaggcgtgcattgaagaaacgttcggggttgcttccgcagaacaggctgctcatgttgaacaggccgtccacggtggccgcaccatagtagaacccctcggcgggcctgctgccgcttccggcccttcccctccagcc

SEQ ID NO: 6842 - DNA, 15507 bp, Unknown
  gut microbiota DNA sequence
aagatgtccgaataacgtaatgtattgattctgctcgtcatttctttatttaattataactactatttcttttacaaagagaattcttttctaaagaaatcattttgttgtatcgctcaaaattatatcttgcccctaaactcttttttccgtcagattaataggtttttacggtatgattaagtacttttgtactgaatactaagacagactccgccaacagactgtacagtccgttacagtagaccgtacagtccattaccgcagactatacaatccattgcagcagattataaaagcccataggaagaaagcccttagccttcaggaagaaatgacttaattctcttatcaaaaagcattaacatgacagcaaagtatgatttcaaaacgtcacccgacatacagggggacaaggagcaggctactctgtatccgcaacttgtagtatcgggcacgaaagacctgacagatttggctaaggagatagcccgacgttccaccatcaaggaaggaacggttatgggactgttctgtgacctggaaaacattatcgccaattatctggcagacggttataacgtaaaattgggagagctgggcactttgtccgccaccctgacctgtcgcaaagtggcggacaaacgcgagatacgcgccgcatcggtacactttgacaacgtgaaattcaaacctacccggcaattccgcaaggagatacgtgccaaaggtgaattggaacgcgcagaatatggcttccgggtttcttcctcccaatattcggaagaagaacgctttgcattactgacggtctatctgaaggaacattccgtcattaactgcaaagagtattgcaaacttacgggactgctgaagacaaaagcgggcatggaactgcgccggtgggacaacgaaaaaaagatagtaagagagggacggacccctcacgtgatatacagggcggtgccggaggcttaattcaatgcttgttcgcattccgccggaaagagtgcaagttatcatgagtttctctttccgcacgtttgattcttatgaaaacaagaggctgctcccaaagatatattgcgttatctttttgaacagcctcttgcaagaaggttattcgcccctcttatttggttggctttttataccattcttgatgtgaatttctatcttcaccccacgcaccaaaaccttcatatttctcattaatcatctggcgttctgccggatatgcccaatctgtaggaatacataaagcaaaaggtacaccgcccagttgaaactcagggtcgtcttgtgagatataaactcttagattcgggttattcttttcatgaatataaaaggctatgtctccaagacttgttatatttttgatagtttgcttgggcatatctgccagcgtagaaggaccgggatttactatggtaccggccgatacacctaaagcttcgtgcacactgctccataaaatattgtcccgaccgttaaccttatagccggcagatagttctttggttgctccggcagctgccaatgcgattgtgacctgtccattgtttacagccgtcactttcaacacgacatcattaaaatcatagtcaccggtcgtagtagtaatatcctcaaagacataagtaaagatagccagaggcggagttgtcgaaggttcctctttatcataatcgggattacaaccctgcgcatggtctccgacagttgcattcaccaataatacatgaccggaggcagcccaagagtcaaaaaagtcatttccacatgtcacataagtaactccgctcattgtaagttctcctttatcatcatacaaggctttgttaacacacagcagcaaaggcttatccttatcctgtacgcctgcatcactgttcagccgaacactcttctcaaattccagactttgggtcttaaagatacttttaccggccatatttaaaattgcattttccaattcagcctttcccccacaatgaatgaatccgctattattaaagattacatccttaccatcagagccctctaacttaaaatcttcaccaagatgtaaattgcaattattctgtaaccggtagcccgaacttactttaaatccatcacaagcataataaccatcatttacccaggtagcacttgatttgttctcattggcaccatcagtgctgttactatctatcgatgtttcataagatacacactgtccactttctccattatagaattcccctgcactcaactcaaaatcagcttctatatatattattccataattaacaagttcggcttctttattctgcatgtaaaaatcatctccattaatagtaactgttccttcattgtaaatagaacctttcaaagtaaaatctttatcgtcctttccgattccgttaatacgtaacgtcccccctttacatacaacgattgttccttggtcaatcttatcaacattgagagtcaaggtaataccggacttaatgtacagtttagtatcttccgagaaatttatcttatctatttttagactttctgaaatgtagtaagttccctccttcacatgtccggtaatgtctttctcggccaattcttcagcatcattcggacaaacaaaaccgggagccggcaaattatcaatcgtaatattagcagcccgttcagaaaccgcacgctgagttgcagaacgtccgaaagcagcaacaaacttatcatctttaagggcagcaacagtcacttcgcaatccttagttcccacttggcgcatcacgtatgcatattccatggccgacggtgcatcaaacttcaaggtggcagtagttccatctttcacatctgccacagcaagcacatgcgcatcattctctaccttaaaaggattgtctgtcaatactttgacagtataaacagccccggttcccgcatttatcgttatatccagagtacgtacagccatcatattccaatcctgatcagggtcaatatcctttatcggaaaattttcttttgcttcttctttcactcgccctgaatcgaacaaatctttacggtctgtgcacgaagcaaatgcaactagtaccatccatagaattaatagtttcttcatatcataataagtgttagcgtaaacaaaagtaaatctctaccaagggtttgacaacctcttttctccgatgaaaccggtaacttatgataaattacttatcagcataagggtattcaccattggctgtatcccatttttctttaaactcaggcatgtgttcttcataccaccttgtataaattgtatggttctgtgcccagtttgcaaagtaacgataaagagcggttatctgattacgctctctcggaaatacccaatctccgggaatgcaaagtccataaggaggataagtagaagcgggagttacttgggacgcaacatgtattgttatattgttcgcattatcggcctcatatatataaaagtctccattgtctttcaatgtaccggttatagtgatttccttttctacagaagtaccgttaggaccactaccggtatttatcaacgtaccgggatcacagttcatagccgcatgaacctctccaaataaatctgattgagaatttgacccgttcgatgtatccgtaaatcccaccttcaaattcttagcagcaccggcggcaaacaaagtcacagttgcctttccggattcatcggggactgtaacttttaacaccacatcattaaagtcaaagtcaccggcttcacgggtcatgtcttcaaaaacgtatgtatacacttgaggaatatctgtggcatccgagttcgttccgccaccgttcgtcgtataatcatagccacatccgaccggttctcctaatcgtacttgttctacttttacaagctgtgcaccatccgaaaaatttgtatcaccggtataccctttcaatgcgacctctaactcaccggaataagtaatactctcatcgggagttttaatacaaaccccacttacccaaaacagggccttttcatctgaaccgactccggtcacatcaacctttccattctggtattccacgttgtcttttacatggaatacactcttggaacctaacctcaaaggtatattcccatttgttttcagcgtatttgtttcaaaagaagagccaccatcttgttcaaatgcaaagccctccccattttggaaataagtagaactaaggatttccatcctgcaccggttataaatataagaactacgggtatctaaagaattagctttgacagttccttcttcatttattaatttagagcttccggtcatggtcacatcctgcaatgaagcagattgaagatttacaaaagttgcctttccggacatggcgaatgttgtcttcccggttatttcaaaactaccgtcattatatatatatccacccgaagagttagatgcccccgcaacagtaattttccccttattgtataaagaacaattaatgcttattctattaagcttcatcgttgaattttgcgcgatatagaaaaccgtattagggttaaatgtttcagcagcagtggcatccaaagtgctaccctccaataagtaaaccactaatccgtcaggataagcacctgttattgtaacatttcctttaatatatagcgtatagttgccataacgtagttcataagagccgtcattcatataatatccaccacgcatttcagcccattgtatcggatactgttcagcatctgcaggcacctctttcaagaaattcttctcatcaggcaccttgtaatcccaactgcttcttgccatagcgcttctctttcctgcctcacttccttgctcttcccaagaaaccgaaggacgaccgaccttcatatctgccacctttacccagccattgtacattttatcttcaaaaagtacataaacagattcaatggctttgggtacatcaaaagtaaataatactgtttctccgtctcttacccccgttttcttagccaacaaccgagcattgccttcagagttcaaaggattatccgtatatactttcacagtataaacctcgcctgtcttttgattgatagaaacagacaacgttcctaccgcagccatattccaatcctgactcgggtcaatgtctttcaccggaaaattctcttttgcttcttcatcgatatgatgggggtcaaagaagtcttctttcttcgtacaagagaacaagacagagatacacaataataaaaagatgcttttcttcataataagcttgtttcaagttaatcacattttatacaaagatatgaaatataaaaatgattaagcaaagaaaaagccttcaaattagttcataagcatctagttttcaaatatttattctcgcttgaataatatacctatacttttgattaatttaccgatatctatactttggccgttttacttttatagataagatatcctcccaataatatcaaaggtacactcaaccattgtccgatattcagggtcatattcgtttcttccaccacttgcggattcttcataaactccaatgcgaaacgcgagccaaagaaaatgagcaggctcactccggtaatcaatcccacacgattctgcaaatggtatttatgatacatcacccatgcagttacgcccgccaccaaacaatagagcatttcataaatctgggtagggtgacaaggtaaaccttcatataactgatgccattcacgcgaacgcacaaactcaaagccccacggtaaggtagtgggataaccataaatctcggaattcatcaagttgccgaaacggatacagaagcacaccaccgcaactgccggaatcatccggtcaaacaaccaccagacactcttcttcgtcactttcttagaataccagacaagggcgagaataatggcaaagactcctccgtgacttgccagtccgcctttccaaatctttaatatctcagccggatgcaccgaataataatcccattcatagaataagcaatgtcccaaccgggcccctatcaccgtactgacaatgcaataaacaaaaagcttgtctacccagtcttcaggatatttttcttttttgaaaaggcgaccgaccatctcataagccaagataaatcccagtccccacatcaaaccataccaacgcacttcccaactgccaaccttaaaccatacgggatctacatcccacagaatactagctatcattgttttatttctttgtttatttatataagcacaaaggaaataaaaaaatcccttccccgaaataaatcagagaagagatttccctattccttatatattatgatattttacaccaaatgtgcaatcaattcctcgcggtctccatacatcaaatcgataaccggaacttcaatcattgtatagcatcccggttgctgtttcattgtagcgcgtgctacacataccaacacctgagctgtcagagccggattattaatcttcatatcaaactcaaacaactgattgtgagtcttgcccgacactcctttacgaaccagattaacaccatgtcccacatcattcaagtcgtctacacaaggcacctgaataacatgtgtctcatcattgacaaaataaggatcgttcttaacagccgcttcaacagtcttgaaatccgctccttcttccagttccacataaaccatacgacggtgaatacctgtacctacaggaatagtcatagacagagcatctttcacccctgcaatagcacgaacggctacagagtgtcccatgctgcgacccggaccaaagttggtataagtaatgcctttcggagcaattgcttccaagagggtacgtactaccgagtcacttcccggatcccatcctgccgaaataatggcaacagcattgcctgctttggccgattcgtccagcgaacggcgcagtgcggtaatctgtgtatggatatcaaaactatctaccgtattaatgcccatagccagaatttctttcgcatatttttctacactgcgagtcggagtagccaaaatagcaacatctacatcattcagttcctttatatctttaacaacagcgtatggttccaattctgccggtttgttttcggctccattacggcgaacaatacctgcgatttcaaaatcgggagctgcttccagagcttccactacatacttaccaatgttaccgtatccaacgacggctgctctaattttattcatctttattggttttagtttactattatcttttatttagctgcaaaaataaacattttgcctcattcttttgttcttccaaacctaatattttaaaaatattcttgcctaacttgtaatttgaaagatagatatcctatttttgcaaagaactgtaaattacaaactagaagaatcatgatagaatatattaaaggagacattgcagagattactccggcaatggcggtgatagattgcaacggggtgggctatggaatcaatatctcgctgaacacttactcggccattcaaaatcaaacacgtaccaaactctatatttatgaagccatccgtgaagacgcatacgtgctctacggattctctaccaagcaggaaagagaactgtttttactgttaatctcggtatcgggtattggaggaaataccgcaagaatgattttatcggccctttctccttccgaattatgcggggtaatcagttcgggaaacgacaaactgctgaaaacagttaagggtatcggactgaaaacagcccaacgcatcattgtcgatttaaaagacaagatagcctcttccggcatggaaacggtcaacagtgaaatgtttgcaagcgctgccaactcggaaattcacgatgaagctgtagctgcactgactatgctgggatttgcacaggctgcttcacaaaaggtagtggcagccatattgaaagaagaaccaagcgcccctgttgaaaaagtcattaagctggctctgaaaagattataaaaagagaagtgtggcaaagcattttgttgtagtggcattccacgtgttagctgctacaacaaaatgctttaatatctatttatcttcttccggtttgtcttcctgcatcttacgggtaacaaattctattttcagcatagcttcctttttatctttccgaatctgctccatacccgataagatacgcgccaacccggtcaactcggcaattgctttacggtcattgggatgcataactgttctataagtcttatcccctataaattgaagttggatattcttatctttattggcaacaatgaacccgataacgccaccgtcatcgcccattttataatcagctttctcaatggcacgccccaaatccgtcgtctcataactgtctttggacgcgggagtttcggcaaaagtatcgcccacactgactttcactgctgcatgatgaagctttccaccggcacaataaatagaggtaatagacatctcgccctgctcattcacttgtccgcgaagaaaagaacgaccgatattcttttccactgtctgcgtaggatagaaataattacctacttcctgataggctgtatctttttccaatacaaaattgcctttgattgaatccaactgagcctgcttcacctgcatcatactgtccaaataaaccaaactcttctgctgttccttcaagtcaacttgttgcatcaacctaattccctgcttcctggcctcaaaagcctttggatataaaatacggatactatctatctgcaacttggcttcattaaagttctcttgcttcaatgccgtttccgctttttgcaaatgcagttgagccttcttttcgccgccatcgtcacaagccgccagtaataaggcaaataatgccactaatcctatctttttcatgtatttaaacgttttatatgaggacaaaaatacaattaaattgctttacttctcctattcacaagcaaaaaaacataaaacccagttattctttaaatatataagcgataacaatgaagagaaataacctgcacacaaacaaaggagtgcttaaaaaaatatttatttctacaaacattcgtttatatatttggctcatacctccattattaataacttagtttccgatattcctttgtctatacttattatttaaatttacgggtatataccaacaaaagaatatgataggttctttctgtttctatatatcaaacaaacattttaatttaaccattatgaaaaaaatatttttatcgcttgcttttctttttggtatcggaatgtctgttatggccgataatactatgcaaattaaaaatgatactattgccgttgaagacggatttaaaacaatagacttgaaagaagtccctcaatccatcaaagacgctatagctaaaaaagcccctggttccaccctcaaaagcgcttctctttctctaaagcaagaaggtgtaaaatcgtacagagtagtgtatgtaaccaaagaaggagtagaaaatagtattctcataaatctgaaaacagcccctaaaaaacaatagtctattcaatgatatcaaaggaatatttgttaatatcaaaaaaggtcactgtgtagcacaatgaccttttttagtctcactaacagttcttcagcagttcattttctcattgtcattccgcttttgccaagcatgctccctcaacaatcaaacggttcttttccaatgttcccataccccaatacttattttgacatcctctttatcctttcaataggtatctatggaaacgtttggtatagtgctgcaaaaaatgtaattttgcatctcattaagatgagtatggaattgaaagaacattttaatagcaaaatatttgccctaatttccgagacagctgatgaattgggattggaatgttatgtggtaggtggctatgtacgagatatatttttaaatcgcccttctaaagatatagacgtagtagtggtgggcagtggcatagaaatagctcaagctttcggcaaaaaactgggacgtggtgcgcatgtctctgttttcaagaatttcggaacagcacaagtgaagttcaaagacacggaagtggagtttgtcggtgccagaaaagagtcgtatagccacgacagccgcaagccgatagtggaagacggaacactggaagacgaccaaaaccgacgtgatttcaccatcaatgcaatggcggtatgcctcaacaaaaaacgtttcggcgaactggtagacccattcggcgggatggatgatttgaaagagcgtacaatccgtacaccacttgacccggacatcaccttcagcgatgacccacttcgcatgatgaggtgtatccgttttgccacccaactcaatttttatattgatgacgaaacgtttgaggcgctgtcgcgtaacaaagaacgtatccatatcatttcaaaagaacgcattgctgacgaactgaacaagatactgcttgcccccatcccctctaaaggtttcatagagctagaccgttgcggattattgccactcatattccctgagttttcggcattgcaaggagtagatgtcaaaaacggccgcgcgcacaaagacaatttctatcatacactggaagtggtggataatatatccaaacataccgacaatttatggctgcgctgggctaccctgctgcacgatatcggcaaacccaagaccaagcgatgggaaccccgcatcggatggactttccataatcataacttcatcggcgaaaagatgattcctgatattttccgcaaaatgaaattgccgatgaacgagaagatgaaatatgtacagaaactggtcggcctgcacatgcgtcccatcgtaattgccgatgatgtggtaaccgactcggccgtacgccgtctgctgttcgaagccggagatgacattgatgatcttatgatgctctgcgaagcggatatcacctcaaaaaatgaagcgcgaaagcagaaattcctggataacttcaaactggtacgtcagaaactgaaagatctggaagagaaagaccgcatacggaattttcagccaccggtagacggagaagaaatcatgcgtgtatttgatatgaagccttgccgtgaaatcggtagcctgaaaagcgccatcaaagacgctattctagacggggtaatcccaaacgagcacgatgccgcttttgaatacatgctgaaaaaagcaaaacaaatgaaattaacacccaaaaacctataaacaaattggcaatacactacacaaaaggggaagaatgggcaaacgccctgtcacacggcattggtatattaataggtatcattggcggagggtatttgctacatattgccatgaaaagtggagatgtgtgggcagtgagaggaatgtggctctacctgttcggtatgcttgcctcatatattacttccacttggtaccattccagccggccggacacctggcacagggaagtattgcgcaaattcgaccatgccgccatctatctgcacattgcaggcagttattctcccatcatgctggtcagcctacgcgaagcgggttattggggttggggaatattcagttttgtatggctgtgtgcattcatcggaaccactctctgcttttgcagactgaaagaacacagttatctggaaacaatctgttacatagcgatgggatgcagcatctttgttgccttcaaacctttatgcaatcatgtaccttccttatttatctattggctcattgccgaaggtgtctcatacatcaccggcgccgtattttactccttccataaattaccctatatgcattctgttttccacctctttgtattaggtgggacaatctgccacatgatagcattgtggtacattttataacatccctatcatcaacaagttatccgttttggaaaacttatttttattttttaatagagaagttttccgaaatgttatatctttgcagctgttcaatgaaggtgaagttaaccgttctaaaaagggaatgctgtgaaaatcggcgacagtacccgctgctgtaattctcgaagagccgaaacaagatgccactgcaaatcattgtgggaaggcgtttccggggagagataagtcagaaaacctgcctcatagaacaaacaagttctttaactcaaaacatttaaattttcaaacaatgaattacgctgagatttgtatcatcaaaagagatgggaagcgggaagacttctctatcagtaaaattaaaaatgcaatcggtaaagcattccatgcaaccggaataaacaatgaagagaaacttattgctgatatcaccatgcgggtaatcagtaattttacctcgtctaccatcagtgttgaagagattcaggacctggtggaaaatgagttgatgaaggtgcgtcctgaagttgctaaaaaatatatcatttaccgtgagtggagaaatacggaacgtgaccgtaaaactcaaatgaaacatataatggacggtattgtagctattgataaaaacgatgtcaatctcagcaatgccaatatgtccagtcatactcctgcaggacagatgatgacctttgcatcggaagtaaccaaagattatacatataagtatttattgcctaaaaaatttgccgaagcgcaccaattgggagacatacacattcatgatttggattactatccgaccaagaccaccacttgcatccaatatgatttggacgacttgttcgaacgcggattccgcaccaaaaacggaagtattcgcactccccaatccattcaaagctatgcaacattagccactatcatattccaaaccaaccaaaacgaacagcatggaggacaggctataccggctttcgatttttttatggcaaaaggtgtacgtaagactcatctaaaacatctgcaaaccttgacggatttttaccgtgaagtagaggggaaagagcccaacgaagatgcgctaaaaaaaatagaagaaaaagcattggccatgactcgcaaagatactcatcaagcaatggaaggttttattcataacttgaatacaatgcactctcgtggcggaaatcaagtagtattcagttctattaattatggaacagatacttcggcagaagggcgcatggtaatagaagaactgctgaaagctacaattgaaggtcttggcagccgtggagaagtaccggtattccccatccagatttttaagattaaagacggcgtctcttattcggaggaagattataaaaaagcaatggctaactttgatgatgccgtggccggcaaaatccaattcaaggcgcctaacttcgacttatttctaaaagcttgccgtactacagcaaaagcgctcttcccgaactttatgtttttggatgccccctataatcagaatgagaaatggaatgccaatgatccgaaacgctatcgttatgagctcgcaaccatgggatgtcgtacacgtgtatatgaaaatgtagccggagagaaaacatctttggggcgtggcaatctgtcgtttaccactatgaatatgccccggttggctatcgaagcacgcattaaagcagaaagcatggaagaatccggaaagaaagaagccatcgaacgtacagctaaagagctgtttatacaaagcgtgcaccaaacggccgagcttatcgccgagcaactctacagccgttatcaataccagcgtaccgccttggcacgccagtttccatttatgatgggcaacgatgtgtggaaaggaggaggaaaactcgctcccaacgaccaggtgggagatgtattacgacaaggaacactaggcattggatttatcggcgggcacaatgctatgatggcactttacggtgaaagccacggacacagccggaaagcatgggacacattatatgaggcagtgttggaaatgaacaaagtagccgatgattataaagcaaaatatcaactgaacttttccgttcttgcaactccggcagaaggactttccggtcgctttacccgtatggaccgacgaaaatatggtactattccgggcgtaacagacaatgattattacgtaaactctttccatgtagatgtaaaagagtcgattaccattgttgataaaatcaagcgggaagctccgttccatgccatcacacgtggtggccatatcacttatgtagaattggatggagaagcacagaaaaatatcaaagccattgccaagatagtaaaagtgatgcatgatgaaggaataggctacggttcgatcaaccatccggtggatacttgccataactgtggctataaaggagtaatttatgacaaatgcccggtttgccaaagtgaaaacattctgcgtatgcgccgcattaccggatatctgaccggtgatctcagcacttggaactcagctaaacgcgccgaagaacgtgaccgcgtgaaacacggataacccccgatatgaacttgttatttacttatcccgaaaccatagttgatggtgaaggcatccgctactctatttatctggccggatgccaccaccattgtgccggttgccagaacccggaatcgtggtctccgcaagcaggtactccactgactcaggaaaaaatagaagcaatcatcagcgagattaaagccaatccgttattagacggtgttactttttcaggaggcgatcctctctatttcccaaaagagtttcgtgctctgtctcaacaaataaaaaaagctaccggattaaacatttggtgctacacaggctacacaattgaacaaataaaagcctcgcctttgttaaaatcggcaatagacttcattgatgttttggtagacgggcgttttgaacaggatttatactctccctatctggaattcaggggcagcagcaaccaacgtatcatccgcatacgataatacaaaagaaatctaaatgacccattttcttgatttatatcatgaaaacgggtcatttcatgtttttcagcatatatacgcttgctattttcaagaaaagccgtacctttgcaatgtggttgtgaaactactaattaagttaataataatttttttaaggtattaagtaataaggtaaaattagaaaaggtattagatttaggtaagtaaaaaagagattgttttcaacaaggacaacaagcaaggtattagagattaatttaaggtttgaaagaattgcaagttttcaggaatttagttttataggtattaaaaaagttgttttttaagtagaagaacagagggataacaacaacgacgacgagaaagatgaaaagaaccccatattttatgaggggggttcttcaaggcgtgggcgggttcgaaataaagaactatcgctctttttttattttatgcccctttattttatctgcttttccatatcactatcatcatatgaggtcacttattattcttggggatttaaatatcatatcacaaac

SEQ ID NO: 6843 - DNA, 11239 bp, Unknown
  gut microbiota DNA sequence
ttatacagtccgctgccggagactgtagtaatccgacggacagacgggcataatcgaaaggacgaaaacgcttggtccgactaatgaaacgacgtaggaagcccaaaaacgcatgaggggattgaagaccggaggagacaacatcaggggacagatgtttgattgatatattaaattcccaagaaataaccgacccatcatatggtcattaccaggataaaaaattcccccggctgccaggttaaccccggcaaccagaggatatataaaaaagcctttgccctatttaaaacacgaaacgcattatgtcattgaagttagcccaaataagtaatgcaaataacaagaacatacctaccatttgtgcatattccataaacttatcactcggcttgcgacgtgctactatttcataaagcaagaacaagacatgcccaccgtccaaagccggaataggaagaatgttcataaacgccagaatgatggataggaaagctgtcatttcccaaaaacgatgccaatcccatacctttgggaaaatacttccaatggttccgaaaccacccacactcttcgctccttctttagtgaacacatatttcatatcgttcacatagcctttcaacgtattcacacccagtttaactcccgccgggaaagactcaaagaaattaaaatggcgggtagtgactttataatcaagcatagaagttgctcttaccataaacaaagagtcagtacgaactgcaacagtatcgcgcatcccttggtgcgaataaaccaatgaaaactcggcatattccgctccgttggtttcagcatccgaacggaagccctccaatttttcagtaaattcattccagctaccgacaggcatattattaacagctaaaatgctgtcccctttctgcactccggctatcgccaacggaccgccggcaatcacagaatccaccacattcggccgcaagatatcaagaaacatcggttcttctttagcgatatccaaaagactgatttcaggcatatagatttctgtttcctttccgtcacgaagcacagtaaccgtacgtgcttcagccacattacgcagcatatccatgccaaaacgttccaaaggctgttcatcagcacgaagtagaatatccccatcccggaaaccgatttcctgagcacgttcgttaaacttcataccataagtcatatcctgtaatgagatataagagtccccccaatggaatagaatcatagaataaataaagatagccaacaagaagttcatcaacactcctccaatcataataagcaaacgttgccatgccggtttggaacggaactcccacggctgtgccggttgcttcatctgttcggtatccatggactcatctatcatacctgaaattttcacatagccacccaaaggcacccatccgaccccatattcagtatcactgttcttaggcttaaacttaaacaaagagaaccacgggtcaaagaatatgtagaacttctctactcttactttaaaaaggcgcgaaaaaagaaaatgtcccccctcatggataatgaccagtaatgacaaactcattatcagttggagagcacgaatcaaaaatgtttccatctagttattattgttttattatttactatttataatcagttcttctgctatgcagcgtgcctctgcatcggttgccacatagtcctcataagaaggttccttgatataagccactcttcccattgtcttctcaatgacatcactcatgcccaagaaagaaatattatctttcaagaatgcagccaccaccacttcatttgccgcattaacgatgcaaggcatatttcctgcctgatgcaaagcttcatacgccaaggccaaattgcggaaacgcttggtatcaggctgctcaaaggtcaagtcggtcactttggcaaagtccagacgttcaaaagaagacttcacacgctcaggatatgaaaaggcatactgaatgggcaggcgcatatcgggcatacccaattgggctttcaccgcgccgtcttcaaactgtaccatagagtgaatgaccgactgtggatgaaccactacctctatttgttccggtcttaccccaaagagccatttagcttcaatcacttcaaaacctttgttcatcatcgaagctgaatcaatggtaattttcgcccccatctcccaattaggatgcctcaaagcctgtgccttagtcacctgttgcaactgctccatcgtataagtacggaatggccctccggaagcagtcaatatcactttttctacaggagtattcatttccagacactggaaaatggccgaatgttccgaatcgacaggaagaatcggtgtcctgtattgattggccaacgcatttatcaattcaccggccactaccaaagtttccttattggccaaagcaatggtctttcccgctttaatagcattcatggtaggacgcaatccggcataccctaccatcgaggctaaaacgatatcaatgggttgcgattccactatctggcagagtgcatctgcaccggcatataccttaataggcaaatcgctcaatgcctctttcagttggagatacttttcttcattggctatcactaccgcctcaggcaaaaacttacgagcttgttcaataagcaaatctacccggttattggctgtcaatgcgtatgcttcgtataaatcgggatgttcctctatcacctgcaaagcctgcgtaccgatagatcccgtcgagcctaatatagctatttgttttttcataatttgttaaaatacaatgtatttcgaagggttgatggcacgccctttattccacaattcgaaatgaagatgagaaccggttgttttttcgcccgtattgccaaccaacgcaatggcttcaccacctttcaccgtatctccctctttcttcagtaacgaaccgcaatgtttatacacggatacaaaatcttgcccgtgctgtatctgtatcacataccccgtctctgccgtataagttgagagaatcactgttccatccaatgtagcaagtatactttcattaggattggcagctatatctaccccataatgtttgttatcgggatcaaagttagaagacatcataccgcgcgtgggacgatagaatatcaagcccgaagctgtgggagtattattgacagcagtcaaattataacgttccgattcttcatattgcttacggaattcttcttccttacgagtacgttccatcaatgaatccgaacggatagccgtcagtgaatcaatggactgcaccgtatccacctgtatctttccactaaagatatcttggatattcataatatacaacttttgccgttccaacattttctgtaaagaatcggcacgcagggcattgcttactatttgggcacgcacttcactgttcatatatccgggcagataattgcgcagcggcgtgaaagcaataataatagcggcaaccaaaaaaataaccgtcacggcagaaagcaaccacgacaaaccgttcagcttggaaacgtggatacccaccacttcctccaacgtattttcattggtaacagtcagtttatacttaaacttaatattatgccaaaatgcttttcttctctttttcttcattactgcacgctcgtaccttaatataatatatattataaaagtccatcgggtacatccaccgtcaggagtcttttcttcttatccagcttgcaaataaattcttcgtgggcaggaagcaaaagttcttctccgtccttctctatcgcaaaaagcacattcattgtactgtcatccactgccacaatctcacctaaatcaccatgacgaacatctttcaccttaaaccctataaaaaagttccaagtaggaatatcttctgtctcatcatcctgctctacatatttctttggaaaataaacttccacattcgtaaacatacgagctttttctgccgtatccactccctccagcttcaccaaagcagtagtgtcggaacgaaaacgatattcttcaataaaaaacggaacgaaaataccatccagcagacataccaagtattcacaatccacacgatcgaaaatatcatccgtaaaggtaaaagagacctctccctttactccgtgaggcttattgaagatacctatcttaaaaatttcgtctttcttaatcataaccttaaattcttgtaatccgtgctcccagggcattcaatcgctgttctatattctgatacccccggtctatctgctcgatattgtgaatgcggctgatgccgtcggcactcattgccgcaataagtaacgcgatgccggcacggatatcgggtgaagtcatgttcccgccacgcaactgaaaactgcggtcgtgaccgataaccactgcacggtgagggtcgcacaatataatctgagcacccatatctatcagtttatctacaaaaaacaatcgactttcaaacatcttctgatgaataagcacactacctttggcctgcgtagccaccaccagcatcacactcaacaagtcaggcgtcaatccgggccaggtggcatcggcaatggtcatgatggaaccatcgataaacgactctatctgataatgttcctgctcgggaataaataaatcatcaccacgctgctctaccttaatgcccaaacgacggaaactttcgggaatgatacccagattttcatgagatacattcttgatggtaagctcactgcctgtcatggccgccataccaataaaactgcccacctcaatcatatcaggcaataccgtatgactgcacccgtgcaatgattccactccctcgatggtgagcaaattagaagcaatgcccgttatctttgcccccatgcagttcagcatacggcaaagttgttgcacataaggctcgcaagcagcattataaatagtagtcttaccttttgccaaaaccgctgccatcacgatattggcggtgccggtcaccgaagcctcatccaacagcataaatgcccctttcagttctttagctccgatagtgaaaatgctgcgttcgtcatcataatcaaagcaagctcccaacttctgaataccgataaagtgagtatccaaacgacggcgtcctatcttatcgcctccgggttttgaaatcagtgctttgccgaaacgcgccaccaacggaccgaccaacatgaccgagccacgcaagctggaacactttttcaggaagtcatcactctccagatagttcaagtcaaccgagtcggccttgaaagtataagagtcaattcctgttttcgataccttgacccccatttcacgcaataactgaatcaagttattcacgtccagaatgtcaggaatattattcactgttacttcttccgaagtcaataaagtggcacaaagaatttgcagaacctcattcttagcaccttgcggatgaatttcgccgtgtaacttatgtccaccttctattacaaacgaagccatgatatcgaagtttttaagaattaatattttcttctctgattattattctgttgcattctgcgctgcccgttgttttgctgcggtctgcgctgaacatacgtgcgctgtccgcacagttgcaaatcttcgggagacaaactgatagccccctgggaatattcgcgaaggtcatccagtatcttctggtcttccacactgtctttattccagttgataaagcattttttcatttgattggcaatcaatgaaatcagatgttttctgtcttctccttcaggatattccaccgccttcttcaccatgttttccaatatgtgtccatagtgacgataacgaatgcgtttttgcggataagccaatacctccggtttcacttcaaggctttctttcttcactatttcataaggataatcaatatccagtttaaaatcggccatgatagccaaatggtcccacagtttatgtttaaagtcgggcacatcgcgcagatgcggaaacataccgcccataatattaataatcgtattggcacaacgctggcgttcagctctatcttcgatggtaagagcatggtctaccatgttctgcacacttcttccatactcaggaaggggtaatcttcgttgttgggtattatactccatgtatataaataatatgattttgtttataaattataaaagcttcttaggtttagaagcaacgaactctttcaaatagaaaggttcaaaatatgccacatccttaaaatcctgtttcacaatagctttctcagccaatggaaacatccattttgccagcggacaaatttcatcaataaaatgtgcattgggatgtgtaatcttctcacggcacttggcagctccgttgccgaagaaataaacaggatgttcatccagaaactccaagtaagagttttcatctactatgtcggctgctatttcacgcttcacttccaacgcacggtcataaacagctgcatacacctccatgcggcgtgcatctatcatcggacaaagcagtgcatcttcgggcaagtcatgatacaataaaaccggtacacacagcacctccaacgtatgaagccctatgagtggcaaattacgtccataacaaacacccttcgccattgaaacgccaatgcgcaaaccggtataggaaccgggaccacagctgacagccaccgcatccaacggcagaccgcggctgtccacaaatgacaacgcttcatctacaaacacgcccaactgaacagcatgcgaaggtcccttcaagtcctctttggagaacaccgccagcccatcttcgctaacggcaacagagcaagcctctgttgatgtttcaatatgcaaaatacacgacataatgctatacttatataatataatgtgcaaatatacacttttatttatacttcatttccataaaaacactacttttgcaaaaaaacacattagttatgatacaatcaatgaccggatacggcaaagcaagtgctacattcggagataaaaaaattaacgtagagataaagtcactgaatagcaaggctatggatttatctacacgcattgcacccttataccgcgaaaaagaaatagaaatccgtaatatggtttccaaatcattggaacgtggaaaagtggatttcagcctgtggatagaaaaagaagcaagtacttctgccgcacaaatcaatatagccttggcacaaagctatgaccaacaaatgcaaaaactgtccgaagcattaggctggggaaattaccctaatgaatattccatggcaacattacttcgcatgccggatatcatgagtaaagatgaaatcatagagctatcggaagaagaatgggaagtggtacgtcaagtagtggaagaagcaattgctcacttggtggatttccgtaaacaagagggagcggcgctcgaaaagaaattcaatgagaaaatcgacaacatcgaacgtttgttgaaatccatcgaaccgtatgagaccgaacgtgtgacaaaaatccgtgaacgcattacagatgcacttgaaaaaaccatcagcgtggattatgacaagaaccgcctggaacaagagttgatttactatattgagaaacttgatatcaacgaagagaaacagcgtctgtccaatcacctgaattatttccgcgaaacaatggcaagcggccacggacagggtaaaaaactggggttcattgctcaggaaatgggacgtgaaataaatactaccggcagcaagtccaaccatgcagagatgcagaacatcgtagtgcagatgaaggacgagttggaacaaatcaaagaacaagtattaaacgttatgtagatgaaaaaaggtaagcttatcatattttcagccccttcaggttccggcaaatcgacgattatcaattatctgctgacacagaacctgaatctggcattctctatctctgccaccagccgcccgccccgcggcacagagaagcacggagtggagtatttcttcctcacccctgaagaattcaaacaacgcattgccaacaatgaattcctggaatacgaagaagtgtacgaaaaccgtttttacggaacactgaaagcgcaggtggagaagcagttggaagccggacagaatgtggttttcgatgtagatgtagtaggtggctgtaacatcaaaaagttttatggcgaacaggctttgtcacttttcatccagcccccgggcatagaagagcttcgcaacagactggtaggacggggaacagatgcacctgaggtaatcgaaagccgcattgccaaagcagagtttgaattgagttttgccgacaagtttgatgtggtaatcgtaaacgacgagttggagaaagccaaagcggagacactgaaagtaattcaggactttattgcaaaataaacagatgataatcaaagaccccaaaagattagccctgcggatgatgatactctgtgtcattatcggactgacagccttggcggtagctgttatggctatctccatgcagaaatatatcattgccggcattatggtcatcgttgccatcatgcagatttggaactttaaagtatggcaaaagagaacaaaataagaacaggaatattcggtggttcattcaatcctattcacatcgggcatttagctttggccaattacctttgtgagtacagcgaattggacgaaatatggtttttggtttctccgcataatcctttaaagaagcaaacggatttatgggatgacagtctgcgactggagttagtgcaacttgccatcgcagattatcccaaattccgcgcttctgattttgagttccatcttccccgcccttcttacatgatacatacgctcgatgctttgcagtccgcctatcccgaacgtgagtttacgcttattatcggggctgacaattgggctatcttcccgcgttggtatcattccgatgaaataatacaacgccatcggataatgatatatccacgtcccggatacacgattgacccggccacacttcctccctctgtgcaacaggtcgatactcctttattggaaataagttccacttttatccgccgggctttggcagaaggaaaggatgtaaggtatttcctgcatccggcggtcaatgaacgactgacgagataaaaacaacggtagcaaaaaaggagcactccgaagaatgctcctttatatttagtaaatgattaaattagtcactaagtccggttactttcaaagtaacttcttttggatggacaaaagctgaagacagattgtgaagggacttgggaagcacggctgaagggaggatgagaggaggttctgtcatccttagccgattgattatctgcatattataattaaaatgtaaggatgaacggaaaagaaggaatgaccggattagagaggggggggatgcaatttgtccctacatgaaaaacacaccgagcttttcaaaaaagcccaaagagtttccgaaaaagaattaagtctttttcaaaaagatgaaggaatgtttccaaaaggttcctttttgagattattataaatgcaaaagtaaaccttccttcggtttcttccagatgagccgctttgaaccggacaattcaccggtaaaaccggctgtttaaccgataaaatagaaaaacccgcaaggatattacactgtaataccttacggggaaacacacaattctcggtataataactaatttaaaatacggtataacatacttatctgtcgctttccgcgttctactttgtgtttgtgttcacattttatcttgtgttcttttactattagacgcaaacattcctccaaacgttgcaccgaaagccgttttttttcagattattttttctctacccgatgaagtaccaccaaaaccacctcactgggagtaaacagacggacattcattctcgaagtacccagtccgttcgttataataataggaacaccggcactattctctttccgaccggtcagaaaacggttaccataaatggaatgctttacaggagagtacttcttgaacaaactcacctgcccgccatgcgtatgcccggccaaaaccagattggcattagacacgtccgtatcttcggcatagtcgggcgtatgggtcagcaggagaataaaatcatcggcagggaaatgttgtgaaggcgaatcaccattctttttcaggtcaaaaggattacgcacgccactgatgataatgtgttgcccatccttcatcaatttatagctcttgtgttccatcaaatgcacattattcttcttcatggcttccgccaccttcgtatagcaataactgtaatcatggttccccatcacaccatagataccatacggtgtaagcacctttcccaatgcggtgaacaatgtgtccatatcccctcctttcggactgccgtagtctccccccaacaataatacatcggcatttaaagattgtaatgcacgtatcgcattgtcaagacgcttgcgcgtgaaacgactttcataatgaaaatccgatgcaaagccgatacggaatccgtcgaatgccgacggaacgtcataactgtaaaaatcatactgcttgatgcgtcccactccgcgatacttcgacagagaagcagtggcacaggaagtaaacagcactgcggcaagcaacaaataaagaacaggtttcttcatgtctttttcttttaaatgaggagtaaagatagagaattaattgtttatctttgcacatctttaatatgaaatggatggaaactgttaaaacaaattctataaaggcatggctattggctgcacgccccaagacattggcaggtgccgctgttcccgtcatgctgggatgtgccttggcagcagcagacggatggtttcaaatcgtacccgccatactctgttttctttttgcttttctgatgcagatagatgccaactttatcaatgatttttttgactacctgaaaggaagtgaccgcgaagaccggttgggccccgaacgggcatgtgcacaaggatggattacattggaagccatgaaacggggtatcgccctgaccaccatgttggcctgtatggttggagcccttctgcttttttacagtggagcagagatgattccggtcggactgctgtgtattctgtttgcttttttatatactgccggtccctatcctttggcttatcatggctggggaga

SEQ ID NO: 6844 - DNA, 1488 bp, Unknown
  gut microbiota DNA sequence
ccttgttaatggtaaacaattatcgcgaccgggaacaggatgcgttaagcggcaagaaaacactggtcgtaagatggggtgcggcaacagggcgtatgctttatctgtttttaggattggcagccgcatggttatgcctcttgtttgccgtcagcggacatatatgggcagcaatactaccacaaatctatattcttccccatttcctgacttggcaacgaatggtgaaaatcaacaaaggcaaagagctgaacatcatattgggagaaacttcgcgcaacatgctgttattcgggatattactgaccttgggattgattttatgagatggagaaaaacacgttagtatgcatcgcctcacacgtacgtcagtataggctcatacgtacgtgtaaaattacccttctatcaatacagtggcatacgccgaaataccctcttcacgtcccgtaaagcccagcttctccgtggtagtcgccttgatggagacatcatcgagttctattttcatcagatgggccaagacttcctgcatctcgggtatacgcgctttcagtttcgggcgttcggcacagactgtcgcatctatattgcccaccttatagcctttggttgcaatcagatcaactgttttggccaacagaatcttactatctatattcttaaactcacctgccgtatcgggaaaatgatagccgatatcacgcatgttggcagctccaagcaaagcatcgcaaatggcatgaatcagtacgtcggcatccgaatggcccaatagccccaattcatgttcaaactttatccctcccagccacagttcacgccccggcaccaactgatgtacgtcaaatccaaatcctactcttattttcatcttacatagaaatctaatagtttttcttcttccagataaccttgtaaatgctggccgacactgaccggtcctactcctaccggtgtaccggtaaacaacaggtctcctatctttaatgtgaagaaacggctgacgtacgcaatgatttcgtccaccttaaaaagcatatctgccgtattaccctgctgcaccgtattgccgtcaatgtccaaatggaacttcaaattctgaatatccttgaacttattcaccgatacaaaatctccgataacagccgaattatcaaagcccttgcataactcccacggttttccctcttcgcgaaaccgacgctgaaggtcacgtgccgtaaagtcaatccccaccgtcaccgcatcataataacgatgcgcaaatcgttcggctatgttttttcccaaacggttgatacgaaccaccagttctgtttcataatctacctgccgagagaaatccgggataaaaaaaggcttgctgtctttaagcaacgcagaatcgggcttcataaaaatgaccggttccttcggtaagttttcattggcatgcaactcttggcaatgagccacataattcatacctacggctaatatcttcat

SEQ ID NO: 6845 - DNA, 56238 bp, Unknown
  gut microbiota DNA sequence
aacatattcaagccgtattgcgtttattttatataaatagaatgtttaattaaacataaaattataattgtaataaatacaaatttgaaatataatatatatctttgtggtataaggcaagggtaataaaataataactaaccaataaaacaaataattatggctaagagcattaaaggtacacagacagagaaaaacttgttaacttcatttgcaggtgaatcacaagctagaatgcgttatacttattttgcaagtactgcaaaaaaagaaggttatgaacaaatcgctgctattttcacagaaacagctgatcaggaaaaggaacatgcaaaacgtatgtttaagtggttggaaggtggtatggtagaaattactgccagctatcctgcaggtatgatcggtacaacaatggaaaatctgaaagccgctgctgccggagaaaatgaagaatggacgactgattatcctcactttgctgatgtggccgatcaggaaggttttcctgctattgctacgatgtatcgcagaattgctgaagcagaaaagggccatgaagaaagatacttggctttattgaagaatgtggaagaaggtacagtattcaaaaaagcagaagagactgtatggcagtgccgtaactgtggttacatttatgtaggtacagaagctcctgaagtatgtccggcatgtttgcatccgcaggcttactttgaagtaaagaagaacaattattaattgagatagaattatccgtttaccgtgtccggcttctcccgattggggggaagccggatttttgtttcattagaatatcctgtatgatttaagcgtaatgatgcagggttgaaaagactttggagtttttttataatgcccgattgaaattaaaacaaatgcttttgtaatataaaattaaccattcggttaagataatgaaattggctgttcatgccatcgtaacgtcccgactgtacttttgcggcaaattaatctaaagtatttatgggaaagttcaattatttgtggtttaggaatattctgttgttatcagcaggtatgtggggattggctatgccttatgctgttgctgatgataaaatgaaggaaagtcctattacagaacaggttcgtacaaaaattcaggtgtctggagttgttgtggacagcaatggcgaaccattgattggtgcaacgattcgtgaaaaagaaagtggaaacggaacaataaccgatgtagacggaaagtttacactttccattcctgttgatgccgtaattgtggtaagttatgtgggatatcgggacaaacttattgcggtgaatgggaaaacatcttttaaaatagaactggaagacgatacggaaacgcttggtgaggtagtggtcgtgggatacggtattcagaagaaagccaatctttcggggtcggtagaccaaatcacttcaacccagttggagcaacgacctatgacggatttgtcgaaaggattgcagggaatggtacctaatttgaatgttgattttaccagtggagagccgggacaggctgccaatattaatattcgtggtgaagcttccatcaacggtggttctccgctgattctgatagatggcgtagcttcggatgctgaagagatgaatcgcttgttacccgaagatgtagagagtctttcggtattgaaagatgcttcttcggctgccatttacggtgcccgtgccgcttttggggttgttttgattacgaccaagcaagggaagggcgatagaattcaggtgaattataacaataatttctcgtggaagcgtccttcttcattgactgaaaaaacttccgatccttatatttatttgaaactgaagaacattgcggtgttaaacactccttggagctccggtcatgtgaccagtgacgagcgtttggagtgggcacgtcaacgttctgacaatcccgatggaacggaagccatacgcctgaatccgttggacaacacgcagtgggagtatatgggtaatcgcaactggacaaattattttctggataagagtacattcagtcaggcacatcagctttccatttccggtgcgacagagaaaaccaagttttatttgtcgggaggtgtggacagtgaagacggtgttttctcaggtgtggtaaaaaatgacaagtatattcgttacagtatgcgaggcaaagttaattatcagatttggaactggttgtctgtttccaataatacctcttttgtctctactacccgtaaaaaaccgagttattataatttgagtgatttttacgatgcagagcctcacgacatggacgtgaaccccgatggtacatgggcaaacagtgaactgggtattgcattggcacaattggtggacggaggcgaggagaaaaccgtttacgaccgtttgcaaagtactttctcggccgaaatgaatttttgggaaagaatgttggtgctgaacgctaactttactttttcaaaaagccatgaagattacgactggtataagactaagtatcgcattggctacggaccggatgatgttcgcgaacagggtacaagccgtgcttacaaaggcagtacttccgaactatatactgtgcttgacttgtatgccacgttgaccaagtcgttcgacaagcatttggtgagcggtgtgttaggtttcaatcaagaatatagccgttgggacaaattcactgccgaccgttacgacatcatatctacctctttgccttccatcggcttgtcctcaggcgaacagtatgtagacgaaacttataaggattgggctattcgtggcttgtttttccgtgctaattatatgtatgacaaccgttatatttttgaattgaacggccgttatgatggaacttcacgtttccccaaaaacaaacgatatggctttttcccttcgggttcggtagcatggcgtgtcgatgtggaacctttctttgaaccgctccggtctttattctcacaattcaagatacgtgcttcgtatggttcattgggcaatcagctggtaaccgaatatggatatattccttctatgaattcgtcattgggcagttacctgattgatggaaaattgcaacaaaccgttacagctccgggcttggtttctcccgattacacttgggaacaggtgcgtacattgaacggaggtattgacttggcgttgtggaacaataaattggtggtctcttttgacatttaccgtcgtgatacaaagggaatgcttacattaggaaaagaattgccgggtgtgttgggcaagacagagccgaaagagaatgccgccgacctgaagacaagaggatgggaattgtctgtcgcttatcgggatgagtttcaactgaaaggtaaacctctgaattggggggcacgcttcgtattgtccgacaatcgttcatggattacaaagtttgacaatcctaccaaaaaccttagtcaatattatgaaggacaggaattgggcgaaatttggggattgcaaagtgatgggctgttcaagagcaaggaagaaattgctgcgttggatgaaacagaaattataccttggggtgcattggaaatcgtggaaggatggcctaaatacaaagatttggatggcgaccagcgcataacgaagggtactactgtagacaaaccgggtgacttgagtgttataggaaattcatcacctcgctttcgttttggtttaaacctgaatgcagaatggaacgggtttgacgtatcggctttcttgcacggaataggcaagcgcgattattaccctgtcagctatctatattggagtttctaccaacaaccgtataccggcggacaggtgcatgcttttgatttctatcgccctacgacagacagcgatgtagaaatggccaaacattcccagtcttacatcaatgcgggcttggctaatcagaatctggattctaaatatccggtgttccagtcttggctggccgataagaatttgggaacaggcattaacggtatggggcttgccattccgcaaaccaactatatgttgaacggttcttatctgagaattaagaatataacgataggatatacattaccggcccgttggactaagaagacgcacttgaaccgtgttcgtatttatgtcagtggcgacaatctctttgaatggagcgggctgaagaaatatttcgatcccgaagcggtaaccaattccgattcttacggatatgtctatccgttcaaccgccaatattcgtttggtataaatgtaactctctaaaaaagaaatatttaatagaaacatgataatgaaaagtagattttatatatggcttagtttggtagcaggtttgttggctacttcatgcaatgatgcctttatggaccgtcagcctcatacagaaataggtgcggacagttatttcaatacggaagaagatttgaaaatgtattgttatggcttgatcaacacacccggttataactatacggcagatgccggtacagatgaccaggctactacagataatgtagaggtaaagaacatcatgacttcggccaatcctacgtcggtaactatttctgcaggttggtcgtgggaacgcctgtacaatatcaatttcttcttggaacgttgcgaaaaggctgtcgttccttccgatgtgcttgcacattatcagggaatagcccgttactaccgggctgccttttatatggatatggtgaagcgtttttcggatgttccttggtatgataagacattgaccactgatgaccaggacttatacaaagggcgtgacaaacgggaggatgtggttaccaagatattcgaagactatcagtttgcagcagagcatgtaaaaacagggcaacccaaaggaaccatagacaaatggattgtgctggctaccatggcacgtcatgcgctttatgaaggtacataccgcaaatatcacgaagaattgaatttgcagaatacggcagatatttatcttagaatagcagtggatgctgcatcgcagattatggaagagggtggtttcagtttatataatacgggaaatcctgaaagtgattactcaaccttgttcaattcgttggatctgactactaatcctgagataattcaggcccactattatgaaaaagctactgctagcaacggattctgggcttatatgttcggaaattatatcccttgtcctaccaaggacttggtgcaggcttacttgatgagtgacggctcttactattctgcccagccgggatatgagaccaagcaatttgtcgaggagtttcagaatagagatcctcgtatgagccaaacattggcttatccggggtgggaattggtgaataccatgacttatgcacccggtgcaggtatatatgtgcagaacttgaataagaatttctccggttatcatcaaataaaaggttttatcaacaacaaggatcaagattattattacagcattgactatccggtcattcgttatgccgaggtgttgttgacttatgccgaagcacgtgccgaactgaatgaactgactcagagtgatttggataatacaatcaatttaatccgcgaccgtgccggtatgcctcacatgttgctttctccgcaggctgaccctgctttgcaggaagcttttcccggagtgtctcctttgctgttggagatacgtcgcgaacgtcgggtggaactggtatttgaaggattccgttttgacgatttgatgcgctggaaagccggaaaattgttggaaaaggaaccggaaggactttattttccgggattgggcaaatacgacttgacgggcgacggtatagaagacatttatttgattccttcggatgcgaacattcctgccgaggccgataaggaaaccaattcgttgggagagaaactggtgtactacagaacaggaagcattgacgatgtaaatgcaacggtttatttgcgcgaaggaaccaaaggcaatatattaaccattaaagatatgggtacttttcaagagcctaaatactattatcgtccggtgcccaagcatgaaatggatttgaacccgaatttgggtcctcaattatttggttgggaataataaatataagaatagttatgaagaaaaattgtttgaattggtttttgtcggctgcctttttatttttgttgggcagttgtgcaaacaaagtgaaacctgggcaagaaccggaagtgaaagagaagtttacctttgcttattttacagatgttcatttgaacaaggataatcgtggcaatggtgatgttgctttgcgcatggcattgtctgacgcaaagaacaaaagggtggactttattttgtttggaggagataatgcggatgccgatgctttgggagatgcagagcacacggcagattctttgcatgaacgtttcaagtcgattgtagatgaggccggaatcccgctttatttcacgataggaaaccatgaccgttattatcgtcggaatggcgagacggatacattgggattcggcttgtttgaaaagtactttggaaacacattcgattctttcgaccataaaggagtgcatttcattacactaaacggtcttttcccttgcgaaaaaggcccttattcggtaagccctgaagaaatggaatggctgaaaagcgatttgcaaaaagtgggaaaagaagttccggtggtagtatccattcatgtgcctatgctttcgctttactatccggtggtggaaggtaatttcaagggagccgacatgatatgcaacactaaggacgtttttgaggtgctgaatggttataatgtgcagcttgtccttcaaggacatcagcatatttacgagcaaattcaggaaagaaaccgctggtttgtcaccgccggagcagtgtcggcatattggtggggaggcgctttccttgaaacggaagaaggttatttgctagttcgtgtggacgagaataaccgtttcagttgggaatatgtggattatggatggagtgtaggaaataataataactaatgtatatgaaaacaagaaatgtatggatactggcagctttgttgtgcggtcagataggtgtgcaggctcaggaagcattgcccaaggaagtcaaagtaggtaaagaacgtataaaggcgcgtcatgaaatatgtctgccacaaatcgatgactatcagttgctgaagtgtgattttcatatccacactattttttccgatggtattgtgtggccttcgcttcgtgtgcaggaggcatgggaagaaggattggacgccattgcaataaccgatcatattgagggccagccggctcgccgggggttgcagacaggtaatcacaattattcgtttgatgctgctcgtgaagaggctttccggagaaatatcattttaataaagggaggagaaattacccgttccatgcctcccggacatttgaatgctttgtttgtggaagatctgaatgtgctcgaccaaaaagactatatgaaagccatcgaggaagcgcacaatcagggagcgttcatccagtggaatcatccgggatggggagtgaacgaaatcaagtggcacgatgtgcacgaggaattatacaagaaaggatggttgaacggcattgaagtgttcaatgagttcgagtggtatccggtggctttggattgggtcaatgaaaagaacctgacattgcttggcaatacagatgtgcacgatgttatcgagcgtttgtatgattttcaaacaaccactcatcgccctatgactttggttttggctaaagaaaggacagaggagggaataaaggatgctttgtttaatcggcgtactatggtctatttttacgataatttgatgggcaagaaagaatatttggataagttcttttggggagcagttcaagtaagtccggtttattatagcagtgaaaagcgtaattatctggaaataaaaaacagtagtgatgtacctttcagattgaagaaagtggataaagctcggaaaggatatcccgaacggatagagataccggcaagacagtctgtgacagttgttttgtctaaagatgacaataacacaggcaaggttcaatatgaggtggagaacttgattgtttctcctcgtgagaaattgcaagttgccttattctgatagaattgtcagctgtaggggcagggtttgcctgcctgaagacacaagccaactgttttcgggcgagcgaacctcgcccctacgagcgaaacgacagcattatccacgttttgacacactcccttcgtttttgggttacacttctttgtaacccatcattttcatacctcgatatactacaatgattttttatatccgaagtagatattcatttcagcaaatttcccggtaaagtcagtttattctctttttgacttcggaagataaccatggtttgcggttgctttaaatctgtttcttgaactgctttctgcaagtcagccaggttattcacggttttgccgcccagctccaaaatcacatcgttggggcggatatagtcacgcaacacactacccagtgcattgaccgaaatgacataaacgccgcgttccgtatccataccggtggcagaacgttcgcccagggtatccaagtttttaatttgtagtccttgccattcgatagtggcatgtgcttttccttcttccatgagaatgggtttgggaaattcgggcgtcttggccaaagcttttaatcggggtgagacaactccgaatctatccatgtcaaagttgcggaagccacaacgaaaaacagcgtccgaatggttgtcaatccgataatctccccggctcgggttaaggaaggcaggggtgcatacaatggaatgtgcatcggtattctgtttgcgggctttttggtaagcagtgctgtcggtaaagatgttgtaatccacttccagaccccaatggcggacttgaatcggccggtaagaagacatcacaatattacgggtaaacacatcaccgctgttcttaaaccatacgtgaggatggaaagagttattgactatgatattgttttctactacccgatagaagccttcacgcagtttgatgcctccgttcagacacagattgttataaatgtggtaattaccggagccgtcgtccaagtcaatgtcccaacctctgtcgcagcgaaaacgattataccgtaatacgatgggagaagtgacgtctgccagaatcagtgaggcttcggcatttaccaacgaatccattacctgtcggtgaggatgccagaaacggtcacgtccccaggaattgaaagagccatggtcaccggtttcttttaccgtgtcaaatacatcgttgaattcgatgatatgcccgccccaagttccttcgctgacgttgatgccggcacgcggagtatcatagatgctattgtggctgactgtgatgtgtcggcacatggatagttccactcccgtaatctgtttctcgaacagaccgatggagtgaatcagattgtcatataccagacaatgagccggatagttatttcctataggaccaggtgtacgatccagtttcccggccgctacaaactcattatattcgaagcttggagagcggacagcattcgggtcgcccacaaagcaaacagcactggctccgatacgggtaaaatgagaacccgatacggtggagcggcggttataacaggagaagaagactgcgtttcctcccaaattatgaagatagcaatctttcagcgagcaatcttccgtaccttcaaacaccacggcaccaccccgatagaccatccagtccgagcggagcaacggttcgtatttatccataaaagtacgcaatgtttgtgtcagttcgattccctgtatagtaatgtgagtgaccggctgttgttccgaaccgcggaattcaatcagatgcttgagtatgggagtctcgaagacggctgtttctgcgtcttcgtccggcatgggataataatataaggtggaagattccgcctgatagaaccattcacccggagcgtccaattcttcgaatatattttccaccatccggtttttggcgtgtaatcctgattggcggttgttctgccatccgccttccagcattagttttccggctttgtctttaccggtgatgcggtagtgaaaatcaccccagtcgcttatgtgcatggcatggaggtatcctccttcgggatgtttccagctctttaccctccggggagcggtggcatcggctgaggtaccgttgaaacgcactgctgtggaatcgaaattgggataacgtgccatgtggcggatgtttccgttactcaacagcatatccgggtgacgtatgtcgtcttggagaacagctgtcaggataccttttttataaggcttccacacagggtgtaatacttttccgccggataacgttacttgttcattgcggaaggcacgtatggataatggtttctcttttccaccgtcttcgggggtgaagattaaagggcgttccagccgatagatacctttacgcaaatagatggttgtttctccctgagcttttcgagcttccaattgtgcccgttcaatggtttggaaaggtttctgaaaacttccgtcgtgattgtcatttccattgggagccacataatactgattctgtgcccacaggaacaatacttgtcccagcaggcatagagtcaaaatgcttcgtttcattctattatttattttctgcgttagcatgcggataatcaatcgtgtagtgcaggccgcggctttctttgcgttccattgcctgacgcgtaatcagatatccgatgttaatcatgttgcgcaattcacacagttcgcgtgatgccttgcagcgtttaaacagtcgttcggtttcttcatacaggatgtccaaacggttccaggcacgaatcaggcgcgtattactgcgcacgatacccacataggcttccatgatttggttcacttctttcatgctctgtgtaatcagcacacgttcttcattattcatggtgccgtcatcgttccattcgggaatgtcctcattgtaatcataccggtcgagcacactcaaagcatgtttggccgcagcatcagcgtaaaccactgcttcaatcagtgagttggatgccagacggttgccgccgtgcagtcccgtgcaggaacactcgccgatggcgtacaggcggttgatgctggactgtccgtccaaatccaccttaatgcctccgcacagatagtgagctgccggagcaacaggaatataatctttggtgatatcgatacccagactgagacatttcttatatatattagggaaatgcttcttggtttcttccgggtctttatgagtgacatccagataaacatggtcttcaccgcgctgtttcatttcactgtcgatggcacgtgccacgatatcacgcggagcaagagacagacgcggatcgtatttttgcataaactcctcaccactctggtttttcaacacggcaccgtaaccgcgcatggcttcagtgatgaggaagctgggacggtcgcccggatgaaagagggcagtgggatggaactgaatgaactccatatctttcactgcgcctttggcacgatataccatggcaataccgtcaccggttgctaccagcggattggtggtattgcgataaacggcttcacagcctcctgtggccataatagtcactttggataagaaagtatctacttctccggtgctttcgttcagcacatacgcgccaaaacatttgatgcccggagtatgacgggtgacgatgatacccaaatggtgttgagtaatgatttctactgcataatgatcggtaaaaaccgtaatattggggtgggcttttacagtcttgatgaggcttgtctgtatttctgcgccggtattgtctttatggtgcaggatacggaactcggaatgtcctccttctttatgtaagtcaaactctccgttttctttcttgtcaaactctactccccattttattaattcttgaatctgcgatggagcttcgcgcacaactttttccacggctgcacggtcactaatccagtcaccggcaatcattgtatcttcaatgtgcttttcgaaattgtctactttcaggttggtaacagatgagatacctccctgagcaaaataggtattggcttcttccagcccggctttacaaatgagggcaaccttgcctttgtgagccactttcagtgcgaagctcattccggcaattccggagccgatcacaaggaaatcgaattttctaaccatgataatgtgatttatggttgcaaaggtaaagaaaaccttttttcattgtacattttaatgctgttatttgctgcctttttttgaaagatacggtatgatatgtattttattggtgttcttcttttcgtttaaaatggattcgtttgttgttttatggtcgtgggaatcttgttccgtgattgtggggatggaagaaaaacaatcagctcttttaaaataattgagaacaaatgattaacttgcgccaaaatttaaaattatgatgaatcggactttccatgtaaagatttcaggaacaactcatttgtttcttattttgtttactttgatcatgctggttgccttttggtacaaaggggcggcactgataggaatgtttttcgctatgattgtcattatcaatatagagcgtatcattcattccacctatacactgacggcagacggaaacttggtgatttataacggacgtttccagaaggagaaaaacattccgctttcacggattacggatgtagaactgaaacgtctcttcggattgaaacacctgagattcacccgatatgtattggtgcattatgacaatgataaggtgatagaccttctgccggagaagcctgaggaatttatgaatgcattggtcaggcggttggaacataaagaagaggatgaagatactttttgaagaaaatatgtagcaggaaaccggttattttagtatctttcggacatacaacctttaaaatcggaaaacatggaacaagtatttaagacaaaatgggttcccgattggcaatatgtaggaatgggggtcgccatattggtcgtgattgttgtctttttttggctgcaggaatggacggctttgggtggtttaattgtacctctcatgctgttttattctcagtcgaagactatttatacgattaaagatagcggtgtgctggaagttaaatcggtatggggcaaaagattctgtgtggatggcatcaggaacattacttaccagcctcatgcccttgggatgcaaaagataaaagttgaacatgcacaaggatttgtgatgataagtcccgacaggcctttggagtttgtggaagctttgaagaaggtatgtcccggcctggcggtcgaaggttttgaattgataaagaactgattaattttaataaataccatgaaatatcaaattgcgattatcggtggagggcctgccggctatactgctgccgaagttgccggaaaagccggcctcagtgttgtgttgtttgaaaagaggagtctggggggcgtgtgcctgaatgaaggttgcattcccacaaagacattgctctattccgccaaagtgtatgattatgccaagcacgcttccaaatatgcggtcactgtgcccgaagcttcttttgacttgggcaagattgttgcccggaaatcaaaggtggtgcgtaagctggtgttgggcatcaaggcgaaactgactgcccatcaggtgaatatagtgacgggagaggctactgtcatagacaagaatacggtgaaatgcggcgaggagatttacgaatgcgagaacctgttgctttgtaccggtagcgatacatttattcctcccattccgggagtggatggcgtggattattggacacaccgtgatgcattggacaataaggaagtgcctgcttcactggccattgtcggaggtggcgtaatcggaatggaatttgcttctttcttcaatagtttgggcgtacaggttactgtggtcgagatgatggatgaaatcctcggtggaatggataaggagctttcggcaatgttgcgtgccgagtatgccaagaaaggaattaagttcctgctgagtaccaaggtggtaggagtggcaaaagaggagaacggagtaacggtctcttacgaaaatgcagaaggggcgggaagtgtttcagccgaaaagttactgatgagtgtaggccgtcgccccgtaatgaaaggtttcggattggagaatctgaatttggaactgacggaacgtaagtgcgtcaaggtggacgaacacatgcagtcttcggttcccggtgtctatgtgtgcggagacttgaacggtgtctcattgttggcacatacggccgtgcgcgaagcggaagtggctgttcatcatattcttggaaaagaagatgcgatgagttaccgtgccattccgggcgtagtctataccaatcctgagatagcgggtgcaggcatgagtgaagaagctctgcaggctgccggcattacttatcataccataaaactaccgatggcatattccggtcgctttgtggcggaaaatgaaggagtaaacggggtttgcaaagtattgactgccgacgacggaacggtattgggtgcccacatgctgggtaatcctgcttccgagttgattgtgttggcgggcatggctatcgaagaccgcaagaaagtggatgattggaaacgatatgtgttccctcaccccacagtaggagaaatcttcagagaactgtaaacattctcaaagagtatcctgcctagcattccaccacccggtacacattccccttagcggtatgtacccgctcggccgggtggtggaaaggctctgcacctcctgaggttctcaactgtttaataccttcttatggtatcctgctctataaaaaacactctttggttcactatccgttcgggcaaagtcaaccaatataatgcattttctggtatctgttcgtatgtttgcgtagaatctgttgagcttttgcaaggaatggatacaaaggattccctatcaacatcccaatagtgcaatgtataattcctacttctttttttcttatcgaatgtataactgaacttttggtctgaccggggtataaacaaatgcacttcaccatttgaactcacataaaaaggagcggtcaggtaacgtaaagcaccattgtctgttacatcggctaccataaagatattatcacccaccacatttttaaaagaacacatcccgttttctaaatatgagccaacagccaatggtttccattcataataattatgtacgcacaaataggccttgtcgtgaagattgtttttttccttgtccaagataggtacttcaaattcggttgttttatcaagatattcatgggttacatcacgccataaaggagtattgaggaatgtctgataaccgcctgtcgaagaaatcttgccgtaatgcaaaggattgaattggtaacggtaaaccttggcaggccttctgtgccgtttttgagaaaacattcttgcatggacttccggctggtcttctccgggaccaaagctataaaatcgtccgtcattccaaaccgcgcaccagctatgccccaaatccattttcggccaaatggtaaaatcaacggcaacaggtatacctatcgcacgcattataaatgtacccaaattgcaaatgccgtcacagcggctaattccggactgataagtctcttcgatggtcggatagaaaggcaggccggtatcttggtatcttacaaccgattttaaatgttcattcaatgccacgcaagcttccagcggtgtctttactcctgcggaatccagtaaaggcagaaaccgcttcatcatctcttcacgcaaagaagatattttctccgtttgcaccctgtaaggaagtatatacgtgcaaaacacgtcaaaaggcacatcccttgcccaaggcttttcccatgccatgaaagccaaatctatattcttaatcagaaaagagctgtcaacagagaggacatcatatatcatatcatgtttttccagatacctacaccgtgtcaatgagtcgcaatgcattcccagttcttccttgttcttgaacttgcatatatcaggcctgtatttttccccttccggcgataaataatagtcttcctgcgaataatgataaggcatattcttgataaggaagcaggatgcccggtattttaaagaatcgtgcttgtaatggccaagaactgcctctaacgcattgcggttttctccagacagcttcaaggcttgctcgagttcaccaccgctacggctttgcgaacaagcagctataaagcacgacaatattatataggttataattctcatcacactactctattcttttaaatactctgttccaacgtatctttcccgtatcacggctgcgcgaagtaatgaccagggtggcctttcccacaataaagtcttcaggtatcaatccccaaaaacgcgaatctacggaattcatgctattgtccccactcatgaaataataattgctcttaaaacgatatccgtccaattctttattgcccaaataaactttctcatcctgaaacagcacttcctcaccctgttcccacactattatttttttgtacagaaggtagtttgttctgttcattggaatggaatcgttctttcccggtatataaaaaggaccaaactctctgatgttccatcggacaatgctgtcgaaaggaagcgtgtaatattggtcgtcaggaatattatcaggattaaatttcatgattcgcttttgagattcaatattgccggccaatacattcccatcaccaatcatatagattccgtcatggataaacagagtatctccggggacagccacacaacgctttacataatagtttgatatgttcattttcatattctcatcccattgattccactccgaataaggaaaattaaaaaccaagatatcatcccttctgaccttagaaaagccagacaatctgtatacgtcaacctcttcgcctttcagagcagtccaaatgttaaatatccgtgcgcctaaagccggtttacagacagatatgacatccccttctatcaatgtaggctccatcgagtcactgggaattttgaatgtagcgaacaataatatttgcgccaaaacatacagcaccaacagcgcggccaaaccaaagatagcattaactgccttattcatccattttcgagccctcttcatggttatagttatttgacaggtttatctataatttcatcccaataagatttttccatctgagggctggagacaggattgccgactaaaacaacccggttatgctcatccaatagaaaatatttatcagaagaaaattcattcaatctaccaattcgattatctgcatcaatacagaccggatagtcgggtaaatcacagtccagcataaatttcatctcttccacgtcattaggaaacaagaagaaagcaaatgaaactgatttgcttaatgactcgtccgccttgattttagcaatcaaatcgctccatctgtccagatacaatttacaccccatgcagtctgttgtatctgcataaataaagaacttccatttcgacttgtcaaaatcaaaataaatcgtatcctttccggcttttgtaaatacaatattttcaggaaaggaaatttgcttgttttcccattgtccttcattcgatttgcaggaaacgaagaaagccaaaggcaatatccacaagagccatctattttttaattttgtcatcctatcattttttatggttttagtaccctaaactcgcactgagatgtgcctaagtttcctaagccatccgttccttctaccacgcccacaaagcttgtattgatgtccgaacagaagaattctacttcggctattcctttctcatcggtgacaatgtccggtttccacagcaagacgttccgcgcatccggtagcggactttgcacgtccagctcatcgggttggtagaactcacgcgtgccgtaatagcctttcacacgccacaggttgttcatgcggagaagttcttcttcggtaaattcctcacctttccaaataatctcgtctagtttcgttagaatccatttgttattctctccttttggctcatattttatgagataatatttccgaccgataacgggggagcttatttttccaggaggaggtaccggacatcctataggatgatgtgaataacctttataatcattaaggtactctatattacctccccccgatatacacccagagcatacccatgctgctccaaccttcatttgtgccaagctatctaaccttcccatcatcttatcccgaaatactcttcctttcttacctgtaactgttatctcggataaaaggatactattatcctgactaataacaggataatcaagctgcaattccgaaaacacttgcgaaggattcatatatgggaaataagactgacaagacttccgcaagctatccaccttactgaaagattcttctatcacaatggaaggcttgtattcatctttatccagcatcggcttcaaataaacatatccgcctcgcaatccgagcatcaagtccgtcggcaccacgaactttcccaaagagtctataaacacaaaacggttttcagtgttcggaccggaaacttgtagcaactgctctccatttcccaactctttccgcttctttttcttaccgataatctgccttcctctgatttcatccgaaaggaaacagtccgccaacattgccgtatcagccttttcccatacatacctgcgccatccttgggtaagcagcaacaggtcgagagcagcctggcggtctttgttgttgctatcaaagtaatacgccggattatggatattaccctttatctcggtggaaaggtagcaatacgaaagcatattctcaggattcagttcattctgataagcacggtcgaaaatgctcagccccagatgcgcctgtacaggattgcccttctcgtccgttacctttacgttcagtttgcccttgccacgggtaaagtagcgcgcactgtccgtgttcaactcgatgtgcaatttccgttcgggatggacatacaccaagcgttccgccatgggctgaccgtcggcattgtataaagtaaactcggcaatgccctgcatcggaaactctttcaatgggattcggattttcaatctctcgctcaaggtgcctgttgccgtgcagcaaagcccgccgcgcattttgccttccagcttgattgcctgcgccgctgcccctttcggttgggaaagaagaaactccagatactcatccgtctgtttacgcaaatggacggacaacactgaagataccacttccgcaaatgggaactcccttccatcggacaacaccgccttatatgaagctccttttatcggaaggataaacacaaaacccataccgtcgtgcacggactctaatttagcaatgtccttaccattctccagcagcactccttttacctttgccggcatacccttctcgtccagtgctttaaaagccaccttggtgggaattccgtcaatcagataaccaccttcggggaagaaggaaaaccgggcaacaggttggtctttttcctgcggggtattcgttcctttgtaggctatgctctttaccacacgtatcttcttgggatagaccggacgcaacgtgtcattcagaaaagaaaagcgggtataggcatggatgcggtaatcgccctccttcaagtccttgtccacatagacgtgcccctcggcaatgccggaaaggatggggtatttctcctgccatacgatgctgtccttggcattgagcatttccacaaacagcgtcttgcttcggtcggaaagggcaaggctctgagcgtccaaagtgtaggtcttgaaccaaaggtcttcaccggtctcataaatccccttgtctgtctggaggtagacaagttctctggattccggcatggttccttcctgcgaatggcaagtaagcgtatgaccaaccaacaaacacaggagaaagaaaaataataaccttacattataaagcctcatttccattattttttatgataaagattactctttatgctgttgttttaatagtttctccaaattataaagagcaggtgttttaggagattgaaaagcatattgctgtaatttccctttatttacttggataacacaaggataaattgaatgatcagtcggtagcttaaattgattattccaatcaatataaacattaggatgtgattttatttcaactcctgttttttgctgaaggatttttaatgattcaatattggttagtacgaacaatattttttcattggatatatgttttttcataaagaactcagcctcttgaatacacccatgacaccccattccgggcagcagaataacccattcatattgttggttaacgctaagttgctcaatagcattacttaaaaatattttttcttttttttctattttgtcctcacaggaagcaaacaaaaagagtcctaaaaataagacattcgttatatatttgtttaatacagtcattaacttaattttttcagtgttaatatcttaaatatcaagtaattttcatccaggtcgtttttatctaaatattcaatattcagcccctcttcagtaacaaaagaatttgcccaattccattctttccctgttccgagtgtcgtttcgcctaaatattcaaatttttcattcataatgataacattaataagcttatctttcatagtcatttgaatagttgcattaggaattccgcgttctaaaaaacgataatatatttttcgatagttgtcataaatgatagcaccgtacatatcctgctgtacataatgaacgaggcagagttcaccgggagtttttctaggttcatcgtaatctatagaatgaatggcggttgcaacattgctacctccataaattttggttataacattagaattcagttcacatacatataaatcatgggaagcaggaaagctatgtatcaaatttccatcaggagaaagacaggggtaaacttgagttgcaattccgtcctcccaattcgtatcgctatatatttctttcggataagtataacgaaaatcgatagcattattaagcatatctatgcatgcagtaaatttgaaattcattatattggacatagtgagagacctgaatgtttgaccggtcaagtatattttattcccgattcggatgaaaggattgactgtcttcagccaatattgaggataacgatccggccaatcaggttcatttgtccttagtgatatcctgtttttaactttacccatactgtcagtaagatcaacttcggtcattggcatattatacacataaatagaatccggacttttgatataataaccggcaactctcattatagcatcactcccctctctattatagactattttcttctgatatgaagaattatcataatcataaaaataaatagaattcttatatgaatttaggaaggtcaataagcgattgcctgtagaatctgtatagatttgcatatatggtggtcttgttggtgtctcagagtctagagctatttttttttcgtcactgaccatcaattgataagtcgagtttaatttcccttctttctcgttctttacacttacttgattattactgcaagacgaaaagacgaaaagaaaacaaacaaaatataaacgtatatgcataattgtttagtcgattaaattatttatgaataaggtgcaaatcgaagactcccttctcttcgcaaatgcgaaaaagaaggaactcttcgggccgaagtgctctagatgacagatacatatctaatatccagaatttctttcactaaatagttgtgaaaatacatttgtgaacacagtacctacctaaattattctattataataagacctctttagtcgaatgtctattttataatagtttatattttaaataggcacttagtccagacaaagcttaccgcagattcttacattgaataagggttgcactcgattttttcagtatcaaagacacatatctgagccgcatgcaaacagtgtccatgtgcaaattcaaaaggtgcacattccgcattagcttcgctagcattaaccaagtcagaaagagctacgtctcctgaaccgttagtcatgccaattgaagcattaacacccaacgcgattgcaaaaatagcaaccgcacctaacaattttacttttgtcttcatttttgtaaaattttaaattaataattatttaattaataagcagtcagttaatgtactgcctgatttatatttctcaatcaaattcagcatttcatccttcatttcatctatagctctcgattctaccttcacctttttattcaataaaccttcagccacggaaactgcctgttctccctgtcccgtcttatcatataactttgccaacttatacaacggataaaatttgctaggtatcatataccatgcctgcaaataggcctgttcagcttctttgaactgtgacaatgctgtataattgtctcccaaagcaatgtacactattacattggggtaatgtagtgttgcctgatttaaaatgccaacggctgaatcatgctgtcggttcagcgtcaacgcttttccataataggtcaaaaaatcaccgtcttcttttaaccagggatatgccaatttacattcatcaatacattgtgcataatcacctctattataggaaagatgagacaaactccatttcttataagcttgataataggacggtaacttgcaaagcccacaaatacctactcctacaagcaataagaaagataatgccggagcgtattttttgcgagacaaatcaatggtaaaaattttcttgtccatattggcaatccaagccaagtagcaaacaagagttacttttatgggcaatatttgagccggataagaaaacagggcaaaggcagctatgcttaaaattccggctttggccatcagcatgttgtctttctcatatttattttgactgttcaatgcacaaacaaggatgccaagcatcagaataaagccaacaagcccggtctcaacaaatgcctgcaaatactcattaaaggcataacaagtatcacttgcaaccatgctttccggagcattgggattaatcttgaaaaaatccgcttgcttgttcatatagcaagatttgaagttatcaaagccaatacccatccataagtttccagctacaatttctgttgacacattccaaactagtaaacgccccatagctgaattttctttcattttaaacaagccaacacaccccattataaacagcaatagtgtcgacgtaataaaaaaactgcgtatttttaagcttaaagcctgaaaacgattatagcacgaatagcgtttccataatataagtccaactgaaagcccaagtgctatataagaggcccgtgaatccgctgcactccatgccaacaagattaatgcaccgatgatgagtagaatatttcgggtaattacgatatttgctttgggaatgagtgatttatggaagactatcattcctacaatgacaggaaatgcagagattaaataacctgcataaggaccgggattcaagaagctccccgtcattttaaaataagcatggttggaaggaagcattccccatagttgcatattgccataaacagcttgaacagcagaagcggcaattattgcgaataaaataatgccataccatgacacatctatgctgcggaggtgcatatataacagtaacagtcctcccagctcaaacgtccgaacagccaaaggagagtgggtaaaaaatatattaccggagatatacaaagtccaagcagctatacaaatgtcaaccttgctaatgaaaaacttcttgggaaaagggcgcaaatatagaaaaggccacagaatggaaaacagtgcaatggcaaacaaaaagaagatagacttgccatattctttttcccatcctaaaaaattaaaggaaggcaataagaacaagataagggacagtaaagacatgaaaaatcgtttactccctgaaatattatttatatttgttgttcccttcataatctttaacaaagatatgccttttaaagaccgggtgtttttatcttaccatcaattatgtattgttaaactattttatactactacggtgactggcaagtccgcaaagcctggttacccattgattttacgttgtttatcaggcatttatccggcatgaacaagcctaacgaaccgctgataaagcttccactattgctaatacgattccactacccggtacacattccccttggcagtatgcacccgctcgcctagccggggcaggatgcggctcaggctgtagacggtcatgcccctcatgaccgaagggtgggtggctttcatgcgttcgaataattgggtggcggaaagggtcagcacttcctgcggatggtcctcttgggtggcaaagcggaagcaaaggcggaacacttcttcttcgggtatgtgtatgtagaacagggcgttgtgttgctgtatggcctgttcttcttccttgttgaaccagcttcgtttgccggacaggagttccgccttgagttgggcgtacagttgctcatgctctacaggcgtgacgcagtcaatggcgtgctccaagctgacacagagaaagtggcgtgagccggtgcggtccaccaacaggtcctcccggttgctggtgccgatgaacgaggcgatgcagggcagtgccgacgcactgcgtttgtaggccttgcggatgttcagtgcggaggcttgcatcaggttcttcagcaggggcattttggacgcgctgagtttgtcgaattcatccagattgatcagaccgcaggcggcagaacgtacttttccctaatccttggcggctgctcaccagcaggggagccacgctgttggtactgttggtatccgaccggaactgcatccattgggcggagagtcccaacatccggcggtggaaaccgttcacccataccgggtcgtcggacacccggcgggcaagtgcggatacgcggtccttgccgtcccattcgggaagttgttcaaagtaggctgtaaagggatggtatttgctgatgtggcgcgagcgcacaaagcgttggatatccctgtctcagcagtctatgcctgtttcgatggcttctatgctgagtgtgttcatccatcgttcgtccactttggtgtagcgcaggtgggtgccggggatggtccgacaaagcggcatcagtccgttgagggcggatacgaggtcacggcgtggtgttccgtcggagggaacaggagctgacaggaatttgcttccgaagaagactgttttgagagtggcgaatacattcatgagcactttttttagatttgacgaactacaaatatacaacatgaaaaagcctttgtcaagagagaagacaaactaatccaatcccggcacagaatatgacggagcctgacacaatgacatatatacgtgcaggctcatgcgtacgtacgtgtaggccgatgcgtacgtacgtgtgggcttatgccaccgtatgtgtagaccgatgcctacgggggtcaaaatgtggataatgctgtcgtttcgtgcgtaggggcgaggtttgctcgcccgaaaacggtttgttttgtgtcttcgggcaggcgaaccctgcccctacaactgacgatgggatagcccggtttcgttttgacacacttcccatgctgcaaaaaagactttgatgttttccaaaaagaccttgatgtttaaaaaaagcctcaaagtctttttaaaaaaggtcgttgtgttttcagaaaagctcggcatctttttaataaagctcggtatgtttttcatgtaggggcagattgcatcatcccctcattaagccggtcatccttcttttccgttcatccttacattttaattaaaatactcacataatcagtcgattaagaatgacagcacatcccctcatcctcccttcagccgcgcttcccgagtcccttcacaatcccttgtgtactttctacacctcttttcagcctgcccctacaagcaaaatgcaagaaacgtgacaatatgattgaaatgtatacttatttctcataaagactatggtttgtccgcttttaacaaagaaaaaacactgatgaacaacaaaataacctctttcaagagcacaaattcggggtcacaaaagcataaaggtggtccctggacctagtgagcctaaataagacagtcaacacactgttattcaacactttgactacatcaccactttgcaaacccagcaccattttccaactagacagaaacaagtatccaaagcattgcttatcaacatattaagttcgtttttcagcactataacgcccctcccaaaaggccttggagtttaaaaaaaagactaaggtatttgctaaaaactccttaatcttttgataaaacactttagtcttttagagcctgttcaagtttcattcgaaagctctttaattttggtgctactttataaatcatttattatcaatgcatttaaaaaaatcatacaaccagacgcagtattttacattctgctgcattatataaaatacaagaaaaccattattaaccttttaatcaccacctttatgaagaagattttaaattatttattcgtgttatgcctgctcgttggagcatacggttgcagcgatgatgacagagatgtaaaacggatttatccggaggaaaaacaagaaccttttgaaagagagaatttgaaaggatatttaaggtatgataattcccttaaaagatggataatctatcctgttgacgaaccggaattccgaacaggagatgaagatagtatatcttttttaattgaaaacatgaaggatgaatacaaggcttatgaaggtgatgttaccttcagtggcacccttttatatttatattatgaagcgagattgcctataacaggttgccatggtggtacttacatttactctctccatctaaaagacattcagaaaagagaaccggcagaaagtccctactaattgatacgaaacaattaattttaaatgcataatactatgaacaaactttttacttatctgcttgcattatgcacggctacttgtctatatggttgcagtgaagaactagaggaaatgacttctacagaagaatctccttcaaacattgtcagccgttcaatccctgaaagtttttcttgtggaacgatagaaacagacccaccggcatggtatttcaatactcctcgcgtttttaataacaatagcatttataccttaaatatttatatccatgtcattagaagttctagcggagtgggattttataatggttattatagacacaaattctctgcagagcaaatagccaaaatgcgcagcatcattagccaaagagaagaagtaagccccactattcatcaaaaacagattatcggtcccaaacatttctccaacagcggtacctactcgctgagtgtattaaatgctgatgaaagcgtgagatgggaagtaacggcctacagtgaaaacggttctaccaaaaccacctataccacttctacattgactttgtcttccacccagccaacctattacagtatcgtggcttccatcacatcgcctgccggaaccaagtctgtcacaacccatgccacttgcaatgaaccatctccctacatcggaagcttgtattgggaaaccaaccaagggcaatacagcattaccgatgccacaaactatggcgaaccctctatgtatccggaaacatcaacctgagcctggaatatagagacaaggcaggaaacacatcggatgctcttccgggagctgactttatgtgtaccacagcaagtaatcgccttgtgcgtggcaaaacattttcgttgacacccgccgactgcgaaagggatttgtatattcgggccaaagatgcctgtggcacggcagaatcgtttttcgtcattccttgccaagtgacgaactattattatgatgtcaatgtagctttgggtgaagttgccattggtgtagtgaaaaccgacaatgcagaagtaaacgccattttgactgcccaaaaagcaaaacaagctgttgtctttaatgcagcaacagatgtcaaaatcaaatcggtagtagtttacacagaaaaccggcaagtgctttattccaaagaatacgccatgggagtttctgaaataaagatagatgcagtctcatgggcttcgggagtttatcacttaagcatttcgaacggaacggaagtgcggcatcagaaaataatgattccataaaaacataccaacacaataaagaaggtgtctcgaaactctcataagtcaaaaggggttgtgtcaaataagttattggggtcattgggcggacacatgggtccgcccctaccgtaaagtattatcgaaaaagttcaaaagccggaagaagtattacagatgaaaggaggctgaaacgacaatacggaatgtccattcactaccggaagccccattaacagggcgtttcaacgactaatgaaaggaggaagggagaaacagattttcgctttctttcttgcaggttccatgcttttgttatatattgccaccctgttttaaacaggcttagaatgaattttattcttggaaatacatctatcaatgaaacgagccgtattatttttattactgaacttgactatttgtgctatttatgcccagagccaacctgtttcccaaaggctggatgctttgctgaacgacgaaatcctgaaaacttccgaagttggtatcacggtcttcgacctgaccacgggtgaatctctttatcggtatcaggatgagaaactgtatcgccctgcttccattgagaaggtgattacttctgtcacagcgcttgcccgtcttggggcagattatacaatggatacccatcttcgctataccgggaaaatagagaatgatacactgaaagggaatctttatctgatagggggctttgacccggagctgatggatgaagacctggatagcctcgtggcggcggtggaagcgcagggtatccggtatgtgacggataccattgctgccgatgtatcgatgacggattccgtatattggggaccggggtggtcgtgggatgatactccttattcattccagccttatctttctcctctgatgctgaatcgcggttgtgtggatgtgtccgtttcacctgctcagaaagattctttgccgacagtgcgttgtactccggtttcagattattaccgggtttgtaatcgggcagtgagccgtaacccgcaggcagggaaattggaaatcacccgcaattggctttccaatggcaatgtaataacggtttcgggcaatgtgtcccgaccctatacaggacaggtgaatatttatacttccaaagactttttcttccatacgtttatccaacggttgaaagagaagggaattacctccggtgtgcatacttatgcagattgccccgtcatccatgacagcattgcaaccttttgcaccatcagaagacccatcagacaggtattggaacgtgccttgaagaagagtgataacctgtgtgccgaatccatgttttatcaccttgccgcgcaacatgccccacaccatcgggtgactgccgatgacgggacggatgccatcgccgattttatgaagactgtgctcggttttaatcccgataactataaaattgtagacggcagcggcgtttccttatataattatatctctccgcgattgttgctggagtatttgaagtatgcctattatcaccgggatatctttttgccgctgtatgatgcccttcccattgccggagtggacggcacgttgcaatatcgcatgaagcaaaccaaggcgcgggggaacgtccgtgccaagaccggttcggtgacaggagtaagttcgttggcgggatatgtgaaaggggccgacgggcatcagctggcttttgtcatcattaatcagaacgtgctgaaattaagccgtgcgcgtgttttccaagataaagtttgcgacatcctttcccgatagcggcgatgagttgcccggagtgtgacgtatttgggaataagtgaaagtgattttgctgtaaactggacaaaatttacaccttttctgaacgattactgtatcttgaagtggtggatgttttgtaattttgcccgaacagaaaatcaaatgaataccatcaaacacatataaatagcgtatgaaaacaaattatgaaattcgctatgccgctcatcccgaagatgccaagcattatgatactgcaaggatacgccgcgactttctgatagaaaaggttttttcggacaatgaggttaatatagtgtattctatgtacgaccgtatggtggtagggggagcccggcccgtaggtgaagtactgaagctcgaagccatcgagcctttgaaagctccttattttttgacccgtcgcgaaatgggtatattcaatgtgggaggtcccggtatggtaagagccggtgatgccgtgtttgaattggattataaggaagttctttatttgggagcgggagaccgtgaagtgacttttgaaagcaaagatgcctgcctgcccgccaagttttatttcaattccactaccgcacatcgtaattatcccgataaaaagattaccaaggcagatgccatcgttgccgaaacgggctcgttggaaggctctaaccatcgttgcattaataagatgttggtaagtcaggtgttgcctacttgtcagttgcagatgggaatgacggagctgaaaccgggaagcgtgtggaataccatgcctgcacatgtgcacagccgccgcatggaagcctatttttattttgaggttcccgaggaacatgctgtctgccattttatgggagaagtggacgagacacggcatgtgtggatgaaaggagagcaggctgtcctgtctcccgaatggtctgttcacagtgccgctgctacgcataattatacctttatctggggaatgggtggtgaaaatcttgactatggagaccaagatttctgtctgataacagacttgaaataataaaaatgcgatgtaaaaaagagttttattaaatgttttgtgtacgataacggaagatttttattacctttgggcatcgtaatggataagaaaatacaagaaataaattattatactaataacattaaattaattactatggtgaatttttcattggaaggtaaggtagctcttgtaacaggcgcttcttacggaattggttttgctattgcatcggcttttgctgcagcaggtgccactattgttttcaacgatatcaagcaggaattggtagacaaaggcttggctgcttatcaggaaaaaggtatcaaggctttcggttatgtttgtgacgttaccagcgaagaacaagtgaacgctttggttgcacaggtagaaaaagaggtaggtgttatcgatatccttgtaaacaatgcaggtattatcaaacgtattccgatgtgcgacatgagtgcggcagaattccgtcaggttatcgacgttgacttgaatgctccgtttatcgtgtctaaagccgttatccccggcatgattaagaaaggtcatggaaagattatcaatatctgttctatgatgagtgagctgggacgtgaaactgtatctgcttatgcagctgccaagggtggtttgaagatgctgacccgtaatattgcttctgaatatggtgaatacaatattcagtgtaacggtatcggtccgggttatatcgctactcctcagacagctccgttgcgtgaacttcaggctgatggttcacgccatccgtttgaccagttcatcattgccaagactccggctgcacgttggggaactcctgaagatttgcagggtcctgctgtgttcctggcatcagatgcttctgatttcgtcaacggtcatgtgctttacgttgacggcggtattttggcttatatcggtaaacaacccaaataatataaagcccggaaagggttattttcaggtacggatgggggatgtgtcaaaacagcattatccatgttttgacacaaccccattctcctttcattaattatagataatatgaagaaaatctttttagcagtggcagcggcatgttcgttgtgttcttgttcgcaacagcagccggttactgtaactgttaccaatcctttggctatagaccgcagcggcgagatggtggaagtatccatggcggaaatttcatctaagttgcaattgccggatacggcgcaagtgattgtattggatgaaaacgacctggaagttccttatcaggtcacttataatgatatgcttattttccccacctcggtaaaggcatcttccacagccacttatactattaaaccgggtaatccgaaaccggtggatgtcatttcctgcggtcgtgtttatcccgaacgtgtagatgatattgcttgggaaaacgaccgtgcggcttatcgcgcttatggtcctgcactgcaggcaaccggagaaaaggcttacggttatgacgtatttaccaaacgtgttcccgaaccggtggtggaagaccgctatgacggcgagttgaataggaatatctcttatcacgtagatcacggtaacggtatggatgtatatgcagtaggacctacattgggtggcggtgcggcagctttgttccccgacagcaccattgcttatccgtattgttggaaagaatgtgaagtgttggataatggtccgcttcgtttcacggcaaaattggtttataatccattggttataaaaggagatagcaatgtagtggaaactcgtgttatttcgctggataaaggttcacagttgaacaaaacagtgatttcttatactgatttgaaagaagtgactcctattgtagccggtatcgttatccataaagaaaatccgacaggatattctttcgattccaatgccgggtatattgcttatgccgattctactcagaatccgcgaaataataatggcgttatttatgtgggtgctgtatttcctgccagtctgaatgctgcaaaagctcagctcttccccgaagcagaacgaaaagaacatggtggcgcccttggacatgtgttgggcatcagcgactatgaaccgggaaccgaatatgtttactattggggttccggatggagcaaatatggttttgccgccgataccgaatggacgaaatatttggagaattttgcccaacaggtacgtaacccattgacagtgactgtgaaataaaagaatatagtggatgattaaaaagttacctgaaaaagccgtgtgcttcaaggtaactttttctttttattgaataactggaatacgatgatgaaacaaagaataattattggtttcttatgtatttgtctggcaagtatggcttttgctcaggagcgtatccgtattgaacatggaccttatttgcagaatttgaaagaaacggagacaaccattgtatggatggccagcaagccgtctgtcggttgggtggaattagctcccgatgacggtagtacatattatcaaaaagaacgggagaagttttttgatacaacaaacggtgtgaagaacacttccttgttgcatgtggtgaagattagcggactaaaaccgggtaccggttatcgttaccgggtatacgcacaggaagttttggaccatcaaggtgtggaagtgacttacggaaaagtagcggcaacggatgtatatggtgccaaaccgcttgtattcactacaaacgaccgtcataagccggagacttcttttgtaatgattaatgatattcatggtcgtacagacgatattccgaaattgctggaggttgcagactacaaaaagatggatatgattatctttaatggggatatgttgactcagctaaaagatgagtcagggttgttcagcggatttatggatgttgccatagatttgtttgcaaaagaaaaaccgatgtattatgcacgtggcaaccatgaaacccgcggactgtttgccacttcttttcagcgctatttttcgcctaaagaacctcatttgtattatctggtgagacaggggcctgtttgttttatctttttggatacaggcgaagataaaccggattccgacatagaatatagtggcattacggattatgaccgttatcgcacggaacaggcgcaatggttggcacaggcagtgcagtcggatgatttcaagcaggcaaagtacaagattgtcattgcgcacatgcctcctttacccgataaaaacttgtggcatgggcaaatggaagtgcttgaaaagtttgttcctatattgaatcaggccggtgtggatgttatgctttcgggacatttacatcgttattttaacaacaaaccgaccgataaggtgaagttccctgtcattgataatgcacataagacagttattaaggcagtggcagagagcaatcagctggtgcttgaggtgaaagatctgcaggggaagccggtagatacgattgtaatccctgccaaataaatgaaagctgtttgtcagctgccctaagcgttttctgcttttgacacatcctcctacagcagacgatttgatgggccattggggagttgccacactccctttctttcccttgttgcgccttaaaagttctttttgatgatttcctgcattacttccgagttcctgtcttcgtcattcgcttcttttctcagttccagcaagcgtgccttcatctctttgataaccggagcatactcggcatctttatatgcgttgtgattttcgtgcgggtctttctgcaagtcatagaactcccaagccggagcagtcggagtatcgtccgaaccggtggcatccagcttattgccgtaaaggaacatcagcttataacgttcattgcggatgccgatgtgtgccggacgaatggtgtggtgtgtccagtaacggtaatacatatctttgcgccaattttcgggtgtgtttccggcaaggttgtcccggaaactttgtccttgcgatttgtttggagtctttacgtgggcatagtcggcaagcatggctgcaaagtctgtgttcagaataatatccttgttgcgtgtgccggcaggtatctctttgggatagcggatgacaaacggcatgcggagtggttcctcatacatcattcgtttatcaaagaatccatgttctcccaggaagtatccttggtctgatacataaatgacgatggtattctttgccaatcctttttcgtccagatagcggagcagtcggccgatattgtcgtcgatggtggcaccgcagcgcagataatcttttatcattttctgatatatcttctttcgggcggagatactgtccatgccttcggtgctgaaggggagttcgggatattggcaccaccaggggcctttggatgcctgttcccatcgccatcccatgttctcaagctgacgtccggtgaaggtgcgtcccgaagcaatggtatcgaactccatcatggtgtcgggttcgggaaaggttacgtcatcatatagatgtttcatgcgttcggggaaatcccacggctcatgggttgccttaaagtggcagcagagcatgaacggtttatcggtgttgcgttcttccatccattggatacatttgtctgtcaccaagtcggtggagaagcctttttcttctgtgccgtatcgtccttcggtatcatctttccagttttcggctgttttgaaaaccgggttaatgtattctccctggtcgtgaaacacgctgaaggtgtcgaagccggagggttgtgtcttgaggtgccatttaccgaaaagggctgtctgatagccgcctgcctgcatttgtttggcaatattgtcctggttgcggtcgaagctgtcttccaatgttcttacaccgttgagatggctgtaggcacctgtcaggatggtggcgcgactgggagcagagatggaattggtgcaaaagcagttgtccagcacgcatccttcatcggcaaggcgtttgatattgtcgttctttacatacggagccagtatacctccgtaaatgccccatgactgtgaggtgtggtcatccgatagaatgaataggatattggggcgttctttgtcttgttcttgcgcttggagctctcctgccgacagtggttggcaaagcaatgcgccggtcagtaattgaagtgtttttcttttcatcatggttttgtgtgtttttatttgaatggttatccggctgtgattagtcgaacaccttgaattcatatccttgttccagtaaccattcaatggctctcggcaatgcatatttcatgtttttttctgctttaagcgagtcgtggaaggtgatgatggagccgttgcgcacatagtgcttgaccttgcgtagcacttgccgcccgttcagtcgtttgctgtagtcgcgggtgacgaggtcccacattactatctggtatttgtggcggagcaccatatattgcatccagcgcatgtgtccgtgtggcggtcggaagaggttggtgtgaatcagttcgtttgccttatcggtgttggccagataattatcgctccggtattcaaatccgcgaatatggttaaaagtatggttgcccagccgatgtccgcggtctactatcatcttgaattcttcgggatgcttgcgtacattgtcgcccaccaaaaagaaggtggctttgatattgtatttatccagcaaatcgagcacccatggcgtgatttcgggaataggtccgtcatcaaatgtaagatagaccgctttgacatgcttatccatgcgccagaaggcgcgtggatagagcatgcggagtatcagtggcggttgttctattaacataagcgtgcgtgctttttattttctttttccgcctacgcggttgttgaatacttcataaagttcttcaaacttcttgacatagtgcgccgacatatccgatttcggtttctgttcgctttcgctttccacaccgcttgcggtattgcaacgtgccaaagtcttgttgagttcgtccagaatatagaaattgcggacacactcttcatacgaattggccaagcgttggtcgtcaaggctcagataccagctgatatattccactgccttgtttgccaggtcgctcaggatggcttctgctttttccgtctcgcccaaagccagataatcgtctgccatttctttcgagctgctcatgatataatcatggggcacggttgtgctgggaattactttcagactatagtcgagaacttccagtgctttgtctttcttgccttcctttatcagttggctggcaagttggataaacatacggcggtgtgtcaggcacatgcgcatgactgtctcgtcaatatagatattcggattgtcaatgcctccgaacttaaacttgttcatcaggttgtcatacattttttccgaatcgatgcgtgcgttgagtgctgtggtattgaacggagtgatgcggtaggcaagaccttcctgaatgaagttgttgcctaagttcaggtgattgtcgctgcccacggtgatggccatgtacaacggacgttcccagttggtgtttgccagcatttcgagcatcatcagttcactcttgtaaagcatacgcttgcctttcagtgagatgttcatatactcgggtatctcaccgtgcaatgagtcgggaatcatcatgcccgagcgtttgatggcttctttgtccagcttgatgacgatactgtctgtaggaatcatctgcagaccttctttcggagagcgtacccagtatttcaggatattcttcagttcataaggattctctccgaactctctcacagcatcttcggggttttgtttatagaagttcttgatgctttccattacttcgggacggatggcaacggcttcgttatgtccctgcacatattccaggcgactccagtcgataggtacggcaggtgaatcgtatgcctgacgcttcatctggtcaatataccagtctgtctgcaggtaactcaggttgcacacacgcacgtcggtgcggaagccttcagtctcctgattataccacaaggggaatgtatcgttgtcaccattggtgaagataatcggattgccttcttcctgaacagtgctcaaatagttttgtccgaagtcgcgtgccacatagcggttgctgcggtcgtggtcatcccaagtctggcttaccatttggatgggaaccaacaggcaaacaactgttgcaagaacggatgccggtttttcaccgattttcttctgtaaccattctgagatacctgccacacccataccaatccagattgcgaaagcatagaacgaaccggcataagcatagtcgcgttcacggggttgaagaggtgtctggttcaggtaaagcacaatggcaagaccggtcataaagaacaggaagaatacaatccagaactgttggataccaatcggttcatagattatttttccgtccggtgtggtgatgcgtctcactttgtaagcctgccagaacagaccgataagtccgagtaaaagaggcagacagtagaatacattatgccctttgttgttcttcaggtcggaggggagcaggctttggtcacctaccaggaatttgtcaatgaccggaatgccggtaatccagtttccgtgttctatttctccttgtccctgaatgtcattctgacgtccggcaaagttccacataaagtatctccaatacatgaagttcacttgataagagaaaaagaacttgatgttctcccattgggtaggaacctttaccatcatcatctgtccgcattggtcgtaaggcacttgtgtaccttccacgccgcccagccagtcttcgtaggcttgcgggtgaccgggtgcatcgctgtacatacgcgggaacagcatattctgtgcatacttatattctgttttatggcgaaccacttcgtagctgtctttttcgtcgggagtagctttttctttccgttgatataccggagctccttctgtcacatcatacacgcatccgccgtccacttccttcagtgccggttttgaggtgtaagcctgtccgtagaacaaaggacgggttccgtattgttcgcggccaagatattcacccagcgtgaagatatcttccggtgagttctgatccatcggtgtattggctgtggaacgaatcacgatgagcgcgtaggatgaataacctaccataatcatcatgatgcaaagcaaagaggtattgagcgtgcgtgcactgatttggtattttttgtccagcttggcaaacaggtagatacctaatgctgccaagacaatgatgccgatgaacgtgctgctccatccgtgtccgtagaatgggatgcccagcatggcaatggtgacaaggaaggagatgttcatgcgtttgcggctcttttccacataactttcatatactccccaaatgatggaggcggccaacaggatgatgtaaacaatcaatccgctgttgaaaggcattcctaatccgttgacaaacagtagttcaaaccatccgcctactttcactacgcccggtacgatgccataaagcacagcagccaccagcaccatcgagccggctaaggcaagcaggctgcctttcaggttggcatcggggttctttttgtaatagtaaaccaatacaatggcggggatacacagtaagttaagtaagtgcacaccaatggaaagtcctgtcagataggctatcagaatgagccaacggtcactgtgaggttcgtttgccacgctttcccacttcaggataagccagaataccactgctgtgaacaggctggaataggcatatacttcaccttctacggcactgaaccagaaggtgtcgctccatgtgtaagccaaagctcccacaagacccgaacccattatagtaatgagtttgcccaatgtcatttcgttatcgtcggggcataccagtttttttacgaggtgtgtgatactccaaaacaggaataagatacacgccgcactcatcagggcactcatggtgtttaccatccgggccacttggccggggtcgcttgtgaactggctgaataagttggcggtaagcataaagaaaggtgcgccgggggggtgtcctacctcaagtttgtagccggtagtgataaattccgggcaatcccagaagctggcagtcggttcaatagtcatgcaataggtaattgctgcgatgacaaaagtaacccaaccaaccagattgtttactaatttgtactgtttcatgaaattatatttgtttcgttaacattcgatgggcacaaagatagtaaagaaatagttatttaccgtctgaatgtctgttatttagtgttacgactgttagtcttagagttttttttgtaatttcgcctcacttattaaatctaaagaatatgaatttcatgaatagagtaattgtcgcttgttgcattttgttatgtacttctgtatggaagataagtgctcaggattatcctttccgccgggcagacttgccggtggaggagagagtggaagatttagtccgtcggatgacactggaagaaaagatagacttgttggcaggttatcaggatttctatcttcatccttgcgaacgattgggtatacctgctttcaaattggcggacggacctttggggcttgcttcatggggattgttcggcaaggcgacagcctttccgtcggcattgtctttggcggcatcatggaatagggacttggcagcccgggtaggcgactgctacggacaggaatggcgtgcccggggcattcacttccttttggcgccgggagtgaacacttacagagcttcaaagggggcccggaactttgaatacatgggtgaagacccttatctgtcttcggagatggttgttcctttcatcaagggggtgcaggaaaggggtgtgatagccaccgtgaaacattttgcagccaatgaccaggagtacgaccgttatagggtcagttcggaagtgtccgagcgtgcgttgcgagagatatacttgccggcatttaaggcagcagtgcaaaaggcgggggtgaaagctgtgatgaccggctataacttgttgaacggcgtatattgtacggaaaataaatatcttatcgatatattgaagaaggaatggggatttaaaggaatgctgatgtccgactgggcatgtacctattcggcagacaaggctgccaaccatggacttgaccttgagatgggcagtaacgactggtttgtcagagagaaattgttacctctcattgaacagggagtggtgacggaggagactattaacgagaaggtacggaggatttacggaacctgcatcgaaatgggattttttgaccgcccgcagttggatacgactattcctgtttataacccgaaagccaaccgaatggcatacgaggcagccaaggagggaatgattcttctgaagaatgaagataacctgttgccgttgaagcgggtgactaagattgcagtaatcggacccaatgcttgttataacctggtgacggacaggcagaataatgtaaacggcacgacttatgggggtggtggcagttctaaggtacatccttggcatgttacttctgttctgcaagggatagaggcggaatatcccgatgcggaagtgtggtatgcggaaggaatatccaatgcatataagccaagattgttccgttctgctaagttttataccgaggatggaaaacaagggctgagagcaaaatattataaaatggggcaaggcgacggcagtgttttgcccgataagctgatgcagcaacaggcgaaggcggcgggaagaacggaagatagtcataatggtgtttctgctgtttcgtcttctgtctctgcaaaaagttcggacaaggagccggtgatggaaagaatcgaccggcatgtggatttctcttggtggggaactccgaaggaaggtttgggcgaggattatcgtgtggaatgggaaggctatgttcccgtggaacggaatgacagtcttctgttctttgttgacgcacaaggaggataccgtttgtggattgacggaaagttgtgcctggatgcctctgcttctcagtcttttgattgcaggcaagtggcagtggacggtcagaagggggcacggctgcatgtgaagttggaataccttaaccagcgaagtttgccggcagagattcgtttgggatatgattataaaggcaatcttgatttttcggaagctttgcggttggcacgtcaggcagatgtggtgatattctgtggcggtctggacggcagcattgagttggaaggacgtgaccgtccgtttgaactgccttacggtcaggatatattgataaatcaactggctgaggtaaatccgaatcttattgtcagcctgcatgccggaggcggtgtgagaatgagcccgtggattgaccgggtaaaggcagtggtgcatttgctgtatccgggacaggcaggaggacgagcgtttgccgaaatgctgtcgggaaaggtggttccttcagccaagttgccttttaccatagaaaagagatgggaagattctccggcttgtggcaattatgatgagacacgtaaagaacggaaggtgtattataatgaaggaatattcgtgggttatcgtggatatgaccggaaacaggttgagccgctttatccgtttggatacggtttgtcttatacttcgttcgagtattcggatttgcagttgacggaaatagacaagaagaacaagtcggttgcactctctttcaatataacgaatacgggaggctatgaaggagcggaagtggctcaggtatatgtgcgtgatattgcttcgaaggaagcacgtccgttgaaggagttgaaaggtttccaaaaagtattccttcgtcccggcgagacaaagcatgtttcggtgacattggacagagatgcttttcagtatttcagtgagaagaaatccgactgggtgtttgaatccggggagtttgagatatgggtaggtgcttcttccaaggatatccgtttgaaaacgaaagtaaagatgtgataaacataattatccactgtaggaggccggctgaaaagtttggcagctcattctgtcattctgagtgcaatatacttttggggtcagcctcttacggtagataattatttatctttgttttcagtctgcccgtcttcgtggcagtgacatttcagtatgcgatgggggaaattgccgtgtcccaacagttcaatggggcatccgaagtgctcttccagccattcggtgggaacttctgtatcggggtgataatccagtgtttcgttgacacaggctattgtcttcacgttctgcaagacagtgccgatatcgtggcttaccaggataatcgcccgttctttattgatttcttccagcaaagagtataattttgcttcaaagcgtttgtctatgtatgtgttaggttcgtccagtatcaccacttccgggttggatacaagtgcccgtcccagaagtgcccgttgcagttgtccgccactcagctcaccgatagcacgtccttccagtccttccagtcccatgcgggaaatgattctcctgacctgttcatgctgttccggggaatagcggtgcaacaatgatttctgtttgctgagtccggacaatacaacttcgtataccgagataggaaacttcttatcaatgctgttgtactgaggcaggtatcccatggttatttccggcacttctttgccgttcttataaaaacggatggtgcctgataccggtttcagcagtccaaggattaatttaatcagtgtcgtttttccgcctccgttagggccgataacacctagaaaatcatgctcatatacgttcaggttgacacggctgagtacggtctttccatcataagcggcagagatatcgtttagttgtataataggatggtttgtcataagcacttttatttggtaagggcctttgctatatttatcatttcttcctgccaatcatagctcagcggattaatcgggatgacatctactcccagttcatcggctatcaatttggcgttacgcgtatcaaactcctgctgtacaaagatgacgtgagcattgtcacggcggcaggtctcgattaaatttttgagatgagcaggcgagggttcttttcctccttcttcgatgctgatttgttttaatccgtaatcgcgggcgaaatagcttaatgccgggtgataaataagaaaagtggtatctgcatgttgcagtagtccgcgaagttcattgtctgtccgggtgataatgccttgcaaactgtccagacgatgtttgtaatagggtgcattggtactgtccaaccggcacagggcagcatagatgttatcagctattatagaagcattccgggttgagttccaaatgtgtggctcgatacctcctccatgatgatggtcaccatggttgtgttcttcctcatagatagggtctatacctttagaagtatcgaataccttgaggtgcggggcgttggaagtcaatttatccatccatgcttgttcgaatccaatgtaaccgatgcgtaagtaggcagtgcttttgtccagattgaccaactgttgcggagtagggtcgtaagtctccgggctgctgcccttaggaaccatactgactacattatatttatctccggcaatgacttccgtgaagtatcgcaacggctcgagtgtaacggttaatgtctctttgccggactgttgctgcttggagccgcaagcactcaggcaaagcagagtgacgagaaagagagcgattcgtttcatattttcatttattgagcgtttattttgtggcacgtaatatttcacgttttccacccggaggtcccggaagacgttccactgtaaacccggctgcctgcaacattcttcttactatccctttggcgcagtaggtggtcaggatacctcctttgtttaatatttcatatagagagttgaatagagactgttcccacatttccggctgcttttcgggtgcaaatgcatcaaaatagataatgtcataaccggatagagaggtctgtcttgcttcttccgaatgaaaaaggcgggtaaaatccccttctatcttatggagtgtgaaccacggagagagtacctcgtccgtttcccatccggcacggtgaatggcgtagtaatcttctccatgtccttttcctataaggccgggataattcaatttatgtacggtatcttcacttaacggataccgttcgatgcctgtataatatactttcttccgaatctcttctgcggtaagcagggtgaggaaagcattcaggcctgtgcccagtcctatttcgagaatacgcggttcggcaaccggagaatgcttcagtcccatttcgatgaatatatgctgtgactccgtcaatgctccttttaccgaatgataatgctcatccagctcaggtacatagagtgtataactgccgtctgctgtctgttccagttccataaaattacttcattaaagcggaggcttccagcactccccaaaccaacaatgcatatcgaagtacctttccgattgtcatggccagaatgacaatccatatattggcacgcatcatgcccagtacgatggaaatggcacttcccaaaatgggaataaaagcaaagaatgccatccatgctccccgtccgtgtacgaacttctcggcacggtccattttttcttttttgacatggaaatatttctctatccattccatgttacccaaatgtcccatccagtagcaggtcatgcctccggatacgtttccggctgtggctgcggcaatacttattaccgggtccagtcccagcggaccgacacaagctgccagtacagcttccgaactgaaaggaagaacactgccggcaataaaagagccgagaaatagcccccaatacccccagtctatcaggaattgaagaattgcatccataaattataaatagctaatgttattaaggtaacaaatgtaatgatgaaaaagatgccggaaaagcgattacgggttaaagtaaataaatgtcctgttaaaatggacatcataatgatttgtaattgcaacaacacattgaagtgctgaggttgtaacaaacctagtgcataaatccatgcttcgacggctatcaggaatgagaggaataaacgtgtacgcgtcttgtctaaataggaaactataaaatagtgcacgctgcatgtcagtgatatcaatgtaatgcctccccacgaaataatttgatcgggagtaaaaccggtatagtggataggctggaattgtattaatgactgcaatgggctgtaaaacagttctattttaccgttataaaaggcatagccgaagagaaaccaatagggaactatcagcccaaccagtccggcaaagaatgtttttgccgacaaagaacgaaaactgatcatactgatatagaacaaaggagcgaaatacaatagttgtggaaaagccagactaccgagtccgataaagaaaaaggaatgaaagatgttccctgatgcctgtccggattcgtagctgcgaaataattggaacagagcaatgataaatgccggtggaacgagattggagatatggaatggatgaagaaacatacatgccgatatgataaacccaaacaggctgacgtgcagcatcgtccgggttcgtatcagggtgaaggctgtatttatttcaatcatcatgtatccggtcaatgcacacgatataaaactaatcaattcattccatgaatggatgctgactccccataaaaacaggcatataaggataacaacgggaagggttaaccttcccgtcgctatctctgtctggagtttattatagcctgtcatgcattatcttttcaactatgacaccattaaaggtcgaatccgatatccgagcggaaatacttcttttcgaaatcaatcttcttggcattggcaaaagaccgggccaatgcctctgatttatcggcaccgtatgagctgactgcaatgacacgtccgccgctagttactacctttccgtctttcaatgcggttccggcatgaaatacgatactgtcttcaacagcatccagcccgttgatggcaaagcctttgtcgtagtgctcgggatatccgcccgataccagcatgacacatacggcagaacgcgggtctatttccaatgtcttctcattcaggttgccggcagccactccttcaaagagttctaccaaatcactcttgatgcgaagcatcacgctttctgtttcagggtcacccatgcggacattgtattcaatcaccatcggttcaccttttacattgataagaccgaagaagatgaaacctttgtattcgatgccttcggcagccagtccttccacagtgggacggatgatgcggtcttctaccttttgcatccattccttatcggcaaacggaacaggagaaatgctacccatgccaccggtattcaaacctttgtcaccttcacctatgcgtttgtagtcctttgcttcgggcagaatcttgtagttctttccgtctgtcagaacgaatacggaacattcgatgccactcagaaactcttcaatgactacagtggcggaagcatcaccgaacataccgctcagcatttcttttaattctttcttggcttcttccagtgtaggcagaatcaatacccccttgcctgcacacagtccgtcggctttcagtacatacggagcttccagtgtttcgagaaatgccaaaccttcttcctgattagcggcagtaatgctcttataaccggcagtcggaatgtgatgacgctgcatgaatccttttgcaaattctttgcttccttccagtacggcacctgcctttgacggaccgataacaggtacgtttttcagtgcttcgtcattcttgaagtaatcgtatattcctttgaccagtgggtcttcgggacctaccactaccatgtttatatcgttttttactacaaactctttgatggctgcaaagtcgtcggctttgatagctacattttcgcctacctcgcttgttccggcatttcccggagctatatacagtttctcaatcttggggctttgggcaatcttccatgccagggcgtgttcgcgtccgcctgagcctaatagtaacagtttcatattctgatattgaatttattattttagatggtcttcaaaatagcgggtgatgtgttcgtataagtgaacacggtcacggccgaacatattgtgtccgtcttccgggtagatgaagaagtcgggatgtgtacctgcatcaatgcatgcacgcaggaaggtgtagctgtgttgtggtacacaggtggggtcttcaccaccatgaatcagcatcagccgtcccttcaggtcgccggctctcaatttcagatttgctttattatagccttccgggttgctgagcggactgtccatatagcgttcgccatacattacttcataatacccccaatcgataaccggaccaccagctacacctaccttaaagatatcattataggtcagcatgagattggtggtcatgaagccgccgaagctccaaccatgtacaccgatgcggttttcgtctacataaccgagtgatttcagaaattccactccttttacctgatctttcatttcttctgtacccaattggcggaaggtgcagttctcaaactccagtccgcgattgtcactgccgcggctgtcgacagtcagcattacataacccagctgggccatgtaaatatcccatcctcctgcaccatagttgcgtacattgtgtatcatctgtgcatgaggaccgccataaacatagatgactgccggatatttcttgttggggtcatagtttaccggttttatcaaacgataataaagatctgtcttgccgtcggccgctttaatggtgccaagggtgatttcgggcatattgtaagcatccatcggattggcagcagtcagcaaattgatattttttcctttacccgaagtaggaacaatgtcgatattacgagggactgtggaagaagtatagttgtctatcacatatttaccgcttgccgacagttgtacattgtgcatcccatccttatttccgatgagacggcgctttccggtttttacattcacggcgtatgcgttgctctgtaacggagaaacctcggtgctcatgatgatgatttctttggctttagggttaaaacctaaaatgtttttcactaaccatgtgccttgggtgagttgcttcacatgagtatattcatagcaagttccatctgtttcggtacggaatgaggtcggttctgctttcaattgtgtatccatcagatacagatggttatatccgtcacgttggctttggtagagaaattttgtttcatcccagggtaggaacgtgagtatatgttgcggctctacatatttgggatgttcttccacatagagcacggcatctttttctccgttttctgcattgtaccgcactagttctgcatgattttggtcacggttcaattctatcacataaacgcttttttcgtccgggctccagctgatgttagtgaaatagcggtcggtcgggtcaccggctttcaggtaaacagttttttcggttgcaggattgtaaattcccacggtaactttatggctggtcattcctgccatcggatacttgtccggttcgagggtggcgatacgggtagtggtattcacttgcgggtaatccgttaccattgtttcatccatgcggtaaaaagcgagcaggtttcctttcggactccagaatgtacctttataaataccgaattcctgacggtgtacactttgaccgcatacgatgcctttgggttcatcggttacttggtgggttttaccgtctgctgtggttacaaacaaattattggcaatggtataagccagcgaacggctgtctttgttccagtcttggttggctgctttggcagcgatgggctggctccatattatttcttttttgtcacagtcaatcagcactttgtgggtagatgtgtttaccagcatccacttttcggcatatggaaaagatacattgtataaatgattcatctttcccagttccttggctgccagtaagtcatttgtgtcttgtaaggtgaagagaacagtctcttttccgttggtcgggttcaccgcttttacctcttctatgtcggcgttgacacatacgtctccccaccatttcagtccatgcagattcttgggttgcagattgaaataattgtttcctcccggcatcaaatcttcgagagtaaaacttttcttatcttgcgctataacattcatagtagagatacatgatgtcattaatataagtagactttttagtataatattcttcatagcttcttatttttccccaacctgaatttctgaatcagaatctcaggttggttatttttttactatttttcctctcttttaaagcgtggtttgaattcttttctttcttcgtttcctctgtcttttctgtctctgttcttgaaatctccacgtccttcgcgtttgtcgtcaaagttgcgtcgttcgcgccgttctccgtattccactctttcactgttgcgacggggacgagtatcttcgcgtcgtggtttgaaatctctgtctttattttcagtgcggaactctttatatttgccgtcaaacaattgatatttgcggaattcacattccaaagcaccattaaacagcggtactttgactgatggtttcaatccgatctgatcgaagcattcttcacgataactcaatatccatgcatcatttccggcaaatgcatgtttcagtcgttcgccaatcatttggtataaacctaataaatcgtttgtcgaaatacgttcaccgtaaggagggttggtgatgataatactcttttctttcggttgttcgaattgctggaacggttgtatttttaagattacctctttgctcagtcctgctgctttcacattatgtgttgcaatttcattggctttcgggttattgtcatatccgtatactttgtgtgtgaattcacgttcttgtgaatcatcgttataaatcgtatcgaataattcctggtcgaagtcattccatttttcgaaagcaaattctttgcggaatacgcccggagcgatattacgtgcaatcaaggctgcttcgataggaatagttcccgaaccgcacatcgggtctatcaggtcacattcgcctctccagccggtcattaaaatcataccggctgccagtacttcgttcaacggagcttctactgcctcctggcgataaccgcggcgatgtaatgattcaccggaactatcgagtgacaaagtacatttgtcttcggcaatgtgtatgttcagtgctacatcagggttattgatgcgtatggaagggcgttcgccgttcttctcgcggaagtagtctacgatggcgtctttcaccttataggctacgaactttgaatggcggaattcattcgagaatactactgcatctactgcaaagctcttgttggtgtctaaatactcttcccatgcgatggatttaatagcttcgtacacttcatcagcatttttggcttcaaagtgtttaatgggtttcaggatacggatggctgtacgcagatagaagttagccttatacatcatctccttgtcgccggtaaaagataccatgcgtcttcctatttctatattgctggctcccagctcggtgagttcttttgccagaacctcttccagtccctggaaagtcttggcgattagctcgaattcttccttcattttaaaatgataattacgtaatttcaattgatgcgacaaatttagtgattttctctttgctattcaattatttagaagattatctgtttttgagtagttaaataaggcataaaagagggcagaaaataagattggcaatgtttgttaaaggtgtggaatattgaaaaagaccgtcccaacacagtgattgaggcggtcttttgagttatcggtaaatgttacctttaatgtagacatgcctgtcaaaccggtaacagtaatactgttagcaaccgtgttccggagtgaaatagattatattggctattggtaagcaaagggtttaaagttcctgaaatcggcacttatcctatcattcaggtttttgactaagtaattggattgattcggtaaattcagctataatctccgataaatttggattgtcattacgaagaattatcgttgcaaagtttacgacaccttcttcatcaacaattgaagatgaaatcattgtaaaaagagccttccgattataagtggagaaccaatactcaaacaatcggctacgcatactttgcttgctgtcaccggtctcacaaatatagagcaatgttgagttgttgttcctgaaaaattcatcaacgatagcaataatcgtatcacgtactttatggtcacggggagatttatggttattgatattggctataatcaattgatatgagttctgtgacagtaaaatatcatcttccataaaccctacagaataatgtactcccccgtctgtaaagaactgataaaatccatcttctccggtcgtttctaccggatatgaagaattttcgttaatacgtttcaatgaaagaagctgtttcataatgcaaaaaaggtttcagcctccttacctgtacgttttttataggcttccttcattgacttttccaaattagccagacaagtacgtttcttttctcttgctgctttaaatttggctaaagtttcttcttttgttgcttttgtttttaccataatatctatcctttcctttggcaaagataatactttttgttgagaatcagattcttttgtagaaccttataatattataactttctctcttcaaatcagcagaacaatgattatagaacgacacaagcgcgtcgctctgttgtttgatgatgattttttggggggacacattgacgaagtcagggcgtaaaagaggacagaaaataagattggcaatgtttgttaaaggtgtggaatattgaaaaagaccgtcccaacacagtgattgaggcggtcttttgagttatttataagtagggtttatactacttcattatttggcgggttgaatttttacagtggaagtataaatcaaacctgtagcatcagtaaatgttacctttaatgtagacatacctgttaaaccggtaacaacaataccgtcagcatctaaagtaacactcgtaccgctttgttcgatagagaactctgtcttaacggcatttgccgaagctgtagaagtgcttggtaagaatgtatattttgcctgattggagttagtcagtccggcagctggcgatgaagcagtaatattagtattgtttacagccatatttgattcatccaataccagtttagtagttgctttaccatcagcatccaaaataatgtctttaccatcaaatgcgataccataaagcggagtgataagtttagaagtataagcagtggatgttacagtaaatgcttctaatacaatattaagctcgtcttgggttaagcctgattcagtagttccaacctgatagaacaacggataagcagctaccatatttgcaaaagttgtttcctttaaagcatctcctgctgtattgtaaacaactgttttgtccaaagttgcaataccaccgtcacctactgtagcaacaccttcttctgttgacagttctgtattacttgctgctgcaatcggagatttactatcaatgtatttaacagcatacactacttgtgaatattctgcatcggtatattttgcagttttcttaaaggcttcaccaaatctcaattgaggttcgttggtagtgttatcaatgtaaattctagcgttgaattctgttttagcagtattccattctgcagcttcttgttcaaacatatcagcgaatgaaggaacagttacattgaccggcatattaatcttaatgatttcattgcctttgatatttccgctacctgttacataattctcatccattacaacaaatgacaattgatagtcacccggttgagcatcagcagctactttacctgctacttccaaatcaatataacgcaagtcaagaatatcgtctgtattatctgcccattgtgtttcgtcagctttcagatatgaaacagtattgaacttattgtaagtagagttactcaatgcagtattatctcctatcaagaagccggtctgactcttttcttctactacatagaactgagctgtttcacgtgctgcttcacgagttgcggcaggaatattcttgaatacatcacctaaatcgatgcgtacttttttcagaacatcggcagcagttgcggcgggtgcaatctgatgggttgtagcagcgatactctgagcggttactgtgctaccgatgatattgaatgtaacttcgttgtcggtaattgcagattcgtaaccgttgatagccattgtatgtacaatacccttgatagttacacctgtagcagaagcaggaacattgatagtcataccgtcaacagtgattccgtattgttctgccaaagatttgtttgtaccttcaaaagtgatgtatgaatcatacaaattattcttttcgataaacagttctgtgcttccggtggggaatttaccagatgataaatctgctactcgtccgtctgctgctacatattttatatcagcatcggttagacctgtaatggctgcggaaacagaagacttattatcgctgggtttaacagccaattcataagtagtataaggaataccgtttacacataatgtgtatgccatatgtccggtaccggtaacaggatcgtaatcgaatatcgttgcaatgttggttgcagtaacgtcgtctgtcatttcgatagacaaatcccagctgccgttagccgatgcagcacgagacattaatctgttgtttgcaacagcagttatatttgccggagctacattgcctcttgaatcgaccaaagtcagtgtctgtgctcctaagtcatagccggcaggagtaacctgaacctttacgacgttagtctgacctaccatcaactgatttctggtgatagcaccttttttacctccccagttagggaatgcgatacgggcagtaccccattgaaatgcagtggcagttccttcaatatcaacgaattcaggattctctttttggaactgtacagaagtcaatgcagcagatgctttcatcaactcaacagtttgcaatttgccgtctgcatcaggcagagtgatggttacggtacctgcgctttgattgtccaaaatagcatattgaccaaccttgatgccggtagctgtaccattgattgtcaactcaccgtttttcactgcgactgtgtcacctacctgacctatcacttttccgtctactttaaggtctttgccttcaatagtaatggttagttcgtctacatcaggagctgttgttttaatggtatacgtttttgtacccgtaccgtcaactacagtcaatacacctgtcttttcgtcgaaagtcacactggtcacacccttgtcgccaatctttgactccaattcagacagtgtggtttcaatcttgtcaatcttgctgttgatttcgtcgatatcatcgtcgtaatccttacaagacacaaatgttcctgtcgaggtaaccatcaaggctccgaacaggattgcacttaaaaactttttgttcataatagaaaaactttaaatttataaatttaaaaaactaaaattggttatacatattctgttggttccgagagcttttctctctgtccatatttcatataacgtttgggaga

SEQ ID NO: 6846 - DNA, 221 bp, Unknown
  gut microbiota DNA sequence
ctcctcgactagtgagctgttacgcactctttaaatgaatggctgcttccaagccaacatcctagctgtcttagcaatctgacttcgttagttcaacttagtattcatttcgggaccttagctgttggtccggattgttctcctttaggacatggaccttagcacccatgccctcactcctgacatagaactgacacgcattcggagtttgtcaagacttg

SEQ ID NO: 6847 - DNA, 14835 bp, Unknown
  gut microbiota DNA sequence
gaaaagaattctctttgtaaaagaaatagtagttataattaaataaagaaatgacgagcagaatcaatacattacgttattcggacatcttttggtggaatgagttgtaaccaaagatgtgccgcctgtggctgtagcagcaggtaatccggttcgttttattaagaatattgaagtcaaataaattagaaaaacacttgaaatatgagaagaccaaaatagtagcagtatgaaattacaaattattaccataatgatagtcctttcacaattttcttcgatggaatggcggtttttggatgcgtgaggtgtgaaaggactttcggaattacttctgtatgctgagaatgttacataattgagcacttttgttacgatgaaacaaaagagctatctcatgcaacaaatgttttagaagtgttgtgagacaacccatacctttgcctcagaaaaacttctaaaaatatttaatgctatgaacaagaatcagcgaatgaacagaatgggcgtgctccttatgatatgggcagccgcttgcttgaacagccacgcacaacaagactcagccaaagtcctttctaattctaaggaagaaggaaatcgaaatgtcatgctgaatgcagccagtgccaatggtccccgtgaaatttccatcggattgcccggcggcgatgtcaatgtactcgaaaacggtttgcccgtggtctataactcaaatcctcataatgtaaatactcattggcgcggagacagcagtttgggacataccggactgcttaaaatatccgaaacggccattactaccggaaacatcggttatgctgtgaactctttcaccgaattgggactgaataaagagaagcggtttaatggtgtgctgaattataataccaatcacttcggcaaacagcagtttgatttcaacttaaacggaagcatcggcaaggactggttctacagcggaagcgtttatcagaactttgacccgggttcgttcaaactccgtttcgtccaatatcaggaccgcacacaaatctataagtttgctttgacaaagttctaccatgaaggtcgcggacaattgtcggctatctaccattacagcaatagtcactggttgtcaaatgccactaccggtgcaccgtttatttatgtgggcgacggtagtgtgaaagaaattcccggattcagtctcggtacttcgtcttatcttcccgatgtttctgacattgtctatatggatatacgtacgggcgagatgaaaaagacaagtctttatgacgccactgccagcaaaggtaatcaattcacattgttgaaccgttacaaatgggataacgggttggagtggactgtgaatatgaagtatgaccacgcattgggttcttatctctaccagactcccatgtcgatggaaaagaaaaccttggcggacggctatagccggaaagtatcggacgggacattgaccccttacgaagggtatgtgcagagccgtatgtcatgtttcaatcgcggcagtatcgacgagttcttctttaccaccgaactgtcacggaagtatgacaacatgacttggcgtgtgggcttgaacgaatggtattacgatgtagactatgcttcaaacactacgatgtacgaccatacggtggaagaatatcctcagattctttacagcgccgataccaaagacattcatcattatggtgatactccttattataacctgaaccagaatgcttcggaatactataaaggtcatgaaaacaagctggctctttatgctactcacgattgggatattactgataaatggaatgtgtattatggcgcccgtttcgaataccagcgtttggcgggaaagaatctggctgtttacaatgcagacggaaaagcggtaggccgttttgccaattaccacatcggggcagtggcagccgacggcactaagattgctcctcgcggctatggttatgattggctcaatatggctttcacggcggcggctacctataagatgacacaacagtttggttttactgccgatttcacttacaatacccagcgcccgaacatgtcgaattttgcgcctgccgagatgccgaatgtagataagataaccattccgttgggacgtgcgggtatttattttaataacgattggattagcctgacttctttgtttacttatattgccaaaacgaataacaactctacgctgaatctgataaacccccataacgataaggatatcaaagccgcagcattgagctatgatattgaaaccatcggatggacaacggatgcggtagtaaaacctttcaaagggtttgattttcattttctgtttacttaccaaagtccgaagtacaagaaatatgaaacggaggtgacttttggtgacggaaccacctcgggcatcaatgctacaggcaatattgtgaccgaaatacccaaggtgctgattgaactcgatccgagttataatattacaaaagatttgaaggtatgggccagttttcgttattttagcaagacgtatgccaatattaagaacgcttattactttaacggacgttgggaaacctttggcggtgtcaactggaacgtgaacaaacacttgtcactcagcggaactgtcattaacttcctcaaccagacgggggcaaaaggaagcatctcgggtgcggaactggtggataaggaaaatgctgccgcctataacggggcatggatggcaggaagctatatccgtccgtttaccgtagagtttgcagcaaaaattacattctgattttaataataaaacttttaataccatatattccatgaaaacaaatttagtgaaccttgcattaggtttagcctttacagcaggcacggtttcttgtcagtcacagaaaaataatccggtgttcgagcatcaaggagatacaatgaccgttgtacacattgcttctcccgccaagtatctgttgcttcccgttcaggaaagcagcaatgaaggacaggtaaaactggataccggcagtccggcggatacttatatggatgttcgtctggctacagacagtgttgaatattatgttccgtttgctttaccgcagggagccgctgaagctgtcgttgttgtgaagaatgtggcagccgatgccctttgttgggacagcattaaggttgcagatacctttgatacaaccaacagagacaaattccgtcccgtttatcatcacactccgctttatggctggatgaatgacgccaacgggctggtttataaagacggtgaatatcacctttatttccagtataatccttacggttcggtatgggggaatatgcattggggacattccgtgagcaaggacttggtgcattgggagcatcttgaccctgccattgcaagggatactctgggacatatcttctcggggagtgcagtggtggatacaaagaacagcgcaggctacggtgaaaatacaatggttgctttctatacttcggccagtgacaagaatggtcagattcagtgcatggcatacagcaccgacaatggacgtacctataccaaatacgagaacaatcccattctgactccttttgacggattgaaagacttccgtgacccgaaggtcttttggtatgaacccgaccaaaaatgggtgatggtggtatctgccgacaaagagatgcgtttctattcttctcggaacttgaaagactgggagtttatgagcggtttcggtgaaggttacggagtacagcccagccaatttgagtgtcccgattttattcagttgcctgtggacggtgataagaaccgcatgaagtgggcattgattgtcaatatcaatccgggatgcatgtttggcggtagcgctacacagtattttatcggcgactttgacggaaaggaatttaaatgtgacacaaaacccgaagtgactaaatggttggactatggcaaggaccattatgctaccgtttgcttctcgaatacgggagagcgcacgattgccgtgccctggatgagcaattggcagtatgccaatatccttcccaccaaacaatatcgcagcgccaattcgttgcctcgcgaattgagcctttatacaaaggacggagagatatacatggctgccgatgcggtgaaagaaacggagactttgcgcaaagatgagcatgaggtgggcagtctggttgtgaatggggagaaccggttggaggaattggttcccaacacagatggagcgtatgaactttcgatggatattactccgggggcatcgcagttggcaggcttcgagttgctgaacggcaagggtgagaaagtgaatatttatctggatatgaaagaaaacaggctggtgatggaccgtacagagagtggaattaccgacttgggtgaaccgagtaaatttaatgtgcacgagaaggagacagataatcatcgcatgaaactttcagtgaactataagaatgattttgccctgggtacttgggctccactctctttgtgcgaaggcaaaacttatcatctgaatgtctttgtggataaatgctctatcgagatatttgtggatggcggacgcatagccatgactaatttggtctttccgaatgaaccttatgacacgcttcgtttttatagtgaaggaggggaaatgaaagtttcggatttcacagtgtataagttaggcttgtgattttaggtcgggtgttcccgtaggggcggacccatgtatctgcccctacggtgaatgaataagaacaacgtacagaaaaaacaatagataataaaaccatgaacaacaataaaaatctatatgccaaattaatcccggtgatgctctgtttcttcgccatggggtttgtagacttggtgggtattgcttccaattatgtcaaggtcgacttgaacctgacggatgcgcaggccaatatctttccgtcgctggttttcttttggttccttatcttctcggttcccacaggaatattgatgaataagataggccgtaagaagacagtgcttctgagccttgctgtgacttttgcctctttgctgattcccgtgttcggcgatggttatgtcatcatgctgttgtctttctctttgctgggcattggcaatgcactgatgcagacctctctgaatcctttgttgagcaatattataacgggggataaattggcaagtacccttactttcggtcaatttgtcaaagcaatcgcttcttttctagctccttatattgccatgtggggagccacccagactattcccactttcggactgggttggagagtgttgtttcctatgtatatggtgattgcagtgcttgccatcgttttattgggctctactcccattgaggaggaacagcctgacaaggcttccggtttcaaggcttgtctggctttgctgggaaaaccgttcattttgctctcttttatcggtatcatgtgccatgtgggtatcgatgtcggtaccaatactactgccccgaagatattgatagagcgtttgggcatgacacttgccgaggcgggctttgccaccagcctatactttatattccgcacgattggctgtttcttgggtgcttttatcttgaggaaagcttctgccaaactgttttttgccttcagcgtggtgttaatgttgttggctatggcgggattgtttatgttccataccgaaacaattatttatatttgcatcgccatgattggttttggaaactccaatgtgttttccattatcttctcgcaggccctgtttgccgcccccgacaagaagaatgaagtgtccggtctgatgataatgggcttgttcggcggcacggtattcccattggcaatgggagttgccgctgatgcggtgggacagacgggagctgtagcggtaatgaccgtaggcgtgatttatttgttaatatataccttaaaaataaagaaataaccatgaatgatattatcgtaggaatgggcgaggcactatgggatgtgctgcccgaaggaaagaaaataggaggtgctccggcaaactttgcttaccatgtatcgcaattcggtttcgacagccgcgtagtcagtgcggtaggagaggacaagttgggtaatgagatactgaagaactttgatgcaaagaaattgaattatctgattgagaaagtaccttatcctacagggacagtacaagtggaactggacccgaacggcgtgccgatgtatgatataaaggagaacgtggcatgggacaatattcctttcacttctgcattggaggaactggcaaagaagacccgttcggtatgcttcggttcgctggcacagcgcagtgtggtttctcgtgagactatcaatagctttctgaacgctatgcccgacggggagggacagtgcaagatttttgatgtgaacctgcgtcagggcttttatacgaaggaaattctttgcaattcgatgaaaagatgcaatatattgaaaattaacgatgaagagctggtgacagtgagccgtatgtttggttatccgggcatcgacttgcaggacaagtgctggattttgctcgccaagtacaacttgaagatgttgattctgacttgtggggtgaatggaagttatgtgtttactccgggtgagatttcctttgtggagacacccaaggtggaggtggcagacacggtgggtgcgggagactcgttcactgctacctttgtggctgctatcttgaaaggcaagccggtggcggaagcacataagttggcggtagaggtttctgcatacgtgtgtacgcagaatggggctatgccggaattgcctgtccgcctgaaggaacggctgatgtaaaaatacacttgcccgactatttgccggcagttgcccgagggccaaagctgctgttgggtattgcaaatgtaaatgtgtcaaaacgtagataatgctatcattctgaacgaagtgataggtcatttgggttttgacacattctctttttcttttctttccaaattcttgtattatttctcttctccttttatctttgtttccataatacatctgtgaatatgaaaaacggtcttctctatttcctgctttgcctggcagcgcttgtttcctcgtgtgacggaacgaatacacgttatcacatcggcgtgtcccaatgcagcgatgatgaatggcggcataagatgaataaagaaatgcagcgtgaagcacttttctacgacggtgtgcaggtggaatttcgtacggcaaaagacaataaccaatatcagataaatgatatcaattattttattgaccggcaggttgatttgttaatcgtcgctcccaatgaggcggcggctattactccatcggtcgaaaaggcgataaagaaaggaattccggtagtggtggtagaccgtaagatattatcggacaactatacggcttttgtcggggcggataattataagatcggcagtgatgtgggacattacattgtcagccgtttgaatggaaaggggaatatttttgaggtgacaggactgcaaggctctacacctgccatggagaggcataggggattgatggatgcattggccgggattccgaatataaagagagttggaagtgtggatggcggctggttacagagtcaggccggcgaaaaggtggattctgttttacgtgttcacaaagatattgatttgctgtttgcacagaatgaccgtatggctatcggtgcttatctggctgccagacagcagggaagagaaaaagaaatgctttttgtgggagtggatgcactgcccggaaaagattatggactggagcaggtgataagcggtgtgttggatgctacttttatttatcctaccggtggcgataaggtgatgcagattgcgatgaacattttggagaaaagaccttttgaaaaagaaaatatactttctacggcattggtggataaaaccaatgcccgcgtgatgcagttgcagaccgaccatattttggaacaagacggcaagatagagaaactgaacgggcagattgatgaattctggtcgcgttattcggcgcagactatgtttttgtatgcttgtctggttattctgattctgtttgcggcattgttgggcattattgtacgtgcttattggatgaagaaccggatgaatgctgagctttcttcccaaaagaaaaagttggaagagcagcgtgaccaactcatcagcctttctaaacaattggaagaagctactcatgccaaattggtgttctttacgaatgtatctcatgattttcgcaccccgcttacattggttgctgctccggtggaacagttattggaagatgaagcgctgacatcccggcaacggtctttgttgcagatggtgcataaaaatgtgactatattgttgaggctggtcaatcagatattggatttccgcaagtatgagaatggaaaattggaattggttctatccaatattgatttgcgtgctcagttgcaggagtggagtggggcatttcgtgcgttggcgctcaagaagcatattcattttatattggatgtgggaaatggacaggcggattataagatggcgcttgatgccgagaagatggaacgtatttattttaatgtgctttccaatgcctttaaatttactcccgaaaatgggagcattgtggtgacattgtctgctattgctcaagccgatggaaaagagtatgcgcggctggtggtcagtgacagtggttcgggtatctcagtccaacatatccggcatatctttgaccggttctatcagattgatgtgaatcatgccggctcgggcatcggactggcattgacaaaggcttttgtggaattgcacggaggaacgattgccgtggatagcatggagggaaagggaacggtgtttacaatagatatccctgtcaacaggtggtctgccacagagatagaaagaaaagagtcggaaggcattggtattccgtcccggtcggtagtggaagaactgtcggaggcagaaacggaagaggtgaaaccggatgaaagcaaggcgtgtgtcttggtgattgacgacaatgccgatgtgcgtagttatgtgaagtcgttgcttagagatgagtacgtagtgatagaggctccggacggtcatacgggagtaaaaatggccatgaagtatgtaccggatgttattatctgtgatgtgatgatgccggtgatggatggactggagtgttgcagacaattgaagtcggaattgcagacttcccatattccggtgatgttacttacggcttgttctttggacgagcagcggatagccggatttgaatgtggggcggattcatatattgccaagccgttcaattccaagttgttattggcacgtctccgtaatctgatagcaaaccaccatcgtttacagcagttctttggcgataaaacgactctgtcaaaagaaccggtcagtgagattgataaaggatttgcagaccgtttccgtcggttgattgaagagaatatgtcggattcggagttgagcgtggaggagttgggcagcaaaatgggtatgagccgcgtgcaactctatcgcaagataaaagcgttgactaattattctccggtggagctgttgcgcatcgcccgtttaaagaaggctgcttctttacttgcttcttcggaaaaaactatttcagaaataacgtatgaggttggttttacttcgccttcctattttacaaaatgttataaggaatattttggtgaaagtcctaccgattttttaaagcgcagaggataagcttttcattactccgggccattgtttattccggaccattgccattctgaacatcagtgaagaatctgataacacaaagcagatgtattcagattcttcaccggcgatgacaaaatgagaggattgtcacgtttcttgcgcgagctcttgttaaatcagcgacgataaatccttgtctgccacgaaagagaggttattcaggataattacttctctggcgcggtcgggattatctgttcggaaaatcaggatgcctttatctcccaacaagaaagaatacatataggtaataccgattttggcatcactgaaaatcttaattgcatccgcagcacggcctacctggttgtccagtgtcagggcaaatacatccgaaagggcaaccgatatattggcttcttttagcgtgttataagctcgcatcggttcggaacaaataatacgataaattccatattctaccgtatctgcaatagtcgaagctatcagttgaatcttggcttctttcaataactccagaactttaagtaatgtccccgctttgttttcaatgaagacagataattgttggacggtcataattttatcttttaaaaagttttacgtaagtctttcactctcacagccttgccttccgacttgggtaaagagccttttggaacaagttttactcgcggagtaaccagtatctcgtctttcagctgtcgtgtaatctcgcgggtaagggcttgcagacgggcatagtcatcggtaaataactggctgagttccacttcgatggtcatctcatcgttcgactccattgtttcgagtgtaatcaggtagtcgctgcccaactctttaaactgcaacaatacagtttcgatttgtatcgggaagatatttacccctttcaggataatcatgtcatcactgcgacctttcattctgtccaggcgtttatgatggcgtccgcacggacattcccccggaagaatgcgggtgaggtcgcgggtgcggtatctcaacatcggcatcgcttcgcggttgatggtggtcagcaccagttcgcctacttcgccgtcgggcacaggctccagcgtgtcgggattgatgatttcaacgatatagtaatcttcccaaatgtgcaggccattttgctcccggcattcaaaagctacgccgggaccacacatttcagacattccgaaggaattatatgctttgactcccaacatatcttcgatgcggcggcgttgttcttccgaatgaggctctgctccgatgattaatgttttgagcttggtgtcccgacgaggatcaatgcccatttcttccattacttcatagaggcgggcagcataactggggatggcatgcaaggcagtggttccgaaatcggtgatgaacttcaattgtcttttggtgtttccggcagcagcgggaacggtaagcattcccatgcgttccgctccgtattgaaaaccgagtccgccggtaaacattccgtagccggaagagttttggaagatatcaccggggcgcaagcctaccatgtagaggcatcgtgcaacggcgttggcccattcgtcaaggtctttctgtgtgtgaagaatcacagtcggattaccggttgtgccactggatgaatgcaaacggactgccttctccaaaggaacggcagccattccgaagggataagtatcgcgtaagtcttgtttggtggtaaaagggattttgcgtaaatcatttaatgagcggatatcttcgggtttcaggtggttatcttcaaaacgttttttataaaaaggagagttcatgcaatgacggacggttttttgtaggcgttccagttgcagcttctcgatttcgggacgtgtcaacgtctccatttccggatgtaaatacatagtatctttcatgtttagttggttatcaattgcacaaaagtagaaaaaaatcttatatggttgacaaataggagagaaaatatgtatctttgggcgcttaatgaaagatgataatatgaaaaaactgataagtatattgattggtatagcaagtgtggttggtgtgcaggcacaggatatgaaggcgttgtttgtgtcgatgccggattctattgcaccattgctcacaaaggtgaaccgggaagattgtattgattttcttgccagtaacatgaaagcggaagtaaaaaaccggttcggtcagccgacagaactgaagaagctgacagatgattatctgtacctgcaaacgacttcaaaaagcagtatggaaatgaaattgctaccattgaatgattcggtgaaaatcgtatgtatggtgaatacagtgtgtgcatccgcttgtgatagtgagatacgcttcttttccactcagtggcaggaactccctaagcaggattatatgaagttgccaccggttgaagcattttatcttcctgttgattctttgaaggaagattttcttttgttgcgtgagaaggctgatatggaacttctgaaagctacactctcaccggatagtgcagttttaagtattgcctataccacccctgattatctggcaaaatcagaaagagaaaagctgactgtttatataaaaaaggagccgattgtgtatgaatgggtagggggaaggtttattgaaaggaaatgacgacatgttggtcaaaataaaaggctgcaactttttttgagttgcagccttttattttgaaacttgaatgaagttacaaattactttttcatgcggttaccataacggctcatgaacttatcaacacgacctgctgtatccaccaatttagatttaccggtgtagaaggggtgtgatgtgctagagatttcaattttcaaaagcggataagtttcaccttcgaattcgatggtttctttagttgccacagttgaccgagacaagaacatatcaccgtttgacatatctttgaacacaacgggacgatagttttctggatgaagaccttttttcatttctatatatgtttttattgttattattttactgttttggtaacaacaatgtgtaatggttcaattttggattgcaaagataggtcatttctttgaaagagaaaaacttcggcagcattttttttgtttttcatctgcattttattgtttgtcgatattgcaaggtcgacattacaatataatctgtttgagacatttagcatggatgttagttaataaaaccataatttataagataattttagagcgaaaatgccatagttagaacatttatgcttaattttgcaatggaatttaattcactaacaattataaatattagaacaatggttaattacaaagatttaggtctggtaaacactagagatatgtttgctaaggctatcaaaggtggatatgcaatccctgcattcaatttcaacaatatggaacagatgcaggctatcatcaaagctgcagtagaaacaaaatctccggttattttgcaggtttcaaaaggtgctcgtcagtatgctaacgctactttgttgcgttacatggctcagggtgctgtagaatatgcaaaagaattaggttgtgcaaaacctgaaatcgttcttcaccttgaccacggagatactttcgaaacttgcaagagctgtatcgactcaggtttctcttctgtaatgatcgacggttctcacctgccttacgaagaaaacgttgctttgactaagaaggtggttgactacgctcatcagtttgatgtaactgtagaaggtgaattgggtgtattggccggtgtggaagatgaagtttcttctgatcatcatacttatactgaccctgaagaagtaattgattttgctactcgtacaggttgcgactcattggctatctctatcggtacttctcacggtgcatacaaatttactccggaacagtgccacattgatcctgctacaggtcgtatggttcctcctcctttggcattcgaagtattggatgctgtaatggaaaaacttccgggattccccatcgttcttcacggttcttcatcagttcctcaggaagaagttgaaacaatcaacaagtatggtggtgcattgaaggctgctatcggtatccctgaagaagaattgcgcaaggctgccaagtctgctgtttgcaaaatcaacattgactcagactctcgtttggctatgactgctgctatccgtcagacttttgctgaaaaaccggcagaattcgacccgcgtaagtacttaggtccggctcgtgacaacatggaaaaactgtacaagcacaaaattattaacgtgctgggttcagacaataaattggctgaataatatttactccataatattataaaggtagaggctgctttctattgtgaaggcagcctctattgtttaatttaggttacttctgtatttggcaggagaaactccggtatgtttcttgaaataacgtccgaagaaagattggtcaggaaaacagagccggtttgatatttcttgaatgctcaaattggtagattgcagtaatgctttactttccaggattacatggcggtctataatgcttttggctgttgcattggatacattttgcaccacagtggagagataacggggtgtgatgaaaagttcggatgcataaaaagaaacctcccgttgcgtagtgcagtgcttatgaatcaactgaatgaaatgtttgaatatctcttcctggcgattcattcctttcggcttcttttggaggaacagatgccgggtcttgtcatagaaatccaggataaagttctgcacgaagttcttgaatatctgaagacggaaattgttatcgcggtcattatacaggtcttttatggcaaaactcagtccgataaaaggcttgacacgctcttcgggaatgacaatgcacggatgctctttcaaaaactggaagaaagaaggctccagacgtgaggtgatttctctgaacagggtatcggagaaaacaatataggacacactgaggtcctcactggcgtaagtgcaattgaaaatgctgccgggtaacagcag

SEQ ID NO: 6848 - DNA, 829 bp, Unknown
  gut microbiota DNA sequence
gcaaatatctatgctttcatctgttccggcaatgaacggttcgttatccggtaaacttaatatatccatgtctgttcttattttgacgcaaaataagctattatttttataataaggagaactttgttcttaaattgaacaattgtggctaataattgaatgtgccggctcgtaaaaatccaactacctttgtcgtcgaattaaaaaagattggaatatgataacaatgaacagaaaatggatgcgactaatggtattagttggttgtgctgctttggcagcatcgtgcaaacaggcacctgctgcacagacggaggcagagtatgcggtgttaagggtatcgccgtcagacaaagttttatctactacgtattcagccacgatccgcggccgtcaggatattgacatttatccccaagtttccggtttcctcactcaactttgtgtagaggaaggccaggcagtgcgtaaaggacaagtattatttattattgatcaggtgccttataaggcagctttggaaaccgctgtcgccaatgtggaatcggctaaagccggtcttgccacagccgaactgacttataacagcaagaaagaattgtttgccaaaaaggtggtttcagagtttgatctgaagactgcggaaaactcttacctgaccgctaaggctggattggctcaggctaaggcgcaggaagtcagtgctcgcaataacctttcatataccgaggtgaaaagtccttcggacggggtaatcggcactttgccttatcgtgtaggtgcgttggtcagtgccggcttgccacagccgttgactacggtttctgat

SEQ ID NO: 6849 - DNA, 452 bp, Unknown
  gut microbiota DNA sequence
caccttatctcgcattgttattagcatgccaccacccgatacacattccccttggcggtatgcactcgctcgcccagccggggcaggatgcggctcaggctgtaggcggtcatacccctcatgaccgaaggatgggcggacttcattcgctcgaataattgggtggcggaaagggtcagcacttcctgcggattatcctctttcgtggcaaaacggaagcaaaggcggaacacctcttcttcgggtatatgtttgtagaacagggcgttgtgctgctggatagcctgctcttcttccttgttgaaccagctgcgttcaccggacagcagttccgctttgagctgggcgtacagctgttcatgctccacaggagtggtgcagtcaatggcgtgctccaagctgacacagaggaagcggcgcgagccggtgcggtctaccagcaggtcctcccg

SEQ ID NO: 6850 - DNA, 19386 bp, Unknown
  gut microbiota DNA sequence
tttagagacatttactgaatatccctaggcatccgtcgttaaaaagcggatgcctattattatttataaaaaaaggatattgcttatttacaattacccaagcaacgcggtttcaactgcttgaagaaatcgttacccttatcatctaccaagatgaatgcagggaagtcttccacttcaatcttccagatagcctccatacccaattcaggatattccacacattcaatgctcttgatattgttttgtgcaaggatagcagccggtccgccgatagaacccaaatagaaaccaccatgtttcttacaagcatcagttacttgctggctccgattaccttttgccaacataatcatgctgcctccatgctcttggaacaaatccacatacgggtccatacgtcctgcagtagtgggacccatagaaccacatgccataccttccggtgtttttgccggacctgcataatagataggatgatccttgatatactgaggcaaatcttcaccgcggtccaaacgttctttcaacttggcatgagcgatgtcgcgaccaacaataattgttccgttcaatgaaaggcgggtagctaccggatacttggtcagttctttcaagatgtctgccatcggctggttcaggtcaatcttcacagcatcaccttcgcctgcttcgcgaagcgcttccggaatcaattcacccggtttgtcatccatcttttcaatccagataccgtccttgttaatcttacatttgatgttacgatcggcagagcaagatacaccgagcccgatcggacaagaagcaccgtgacggggcaaacggatgatacgaacatcgtgtgccatatatttaccgccaaactgagctcccaaaccaatcttgtaagcttcttccaatacttgcttttcaagttccacatcacggaacgcacgtccgtattcgttacccgtagtgggcaactcatcataataatgagtggatgccaacttcactgtcagcaaattcttttcagcagatgtaccgccaattacgaatgcgatatgataaggaggacaagcagccgtacccaaagtcttcatcttttctaccaagaatggtaccaaagtagccggattcagcacagcttttgtttcctgatataaataagtcttattggcagagccaccacctttggttacacaaagaaagtggtattccataccttcggtagcctccaggtcgatctgtgccggcaaattacatttagtattcacctcatcatacatattcaaaggagcattctgggaataacgcagattctcttctgtataagttttataaacaccttcggaaagtgcttcttcatcacaataaccggtccatacctgctgacctttttcaccgtggatgatagccgtaccggtatcttggcaaagcggtaatttacctttagcagaaacttccgcattacgcaagaaagtcaatgctacatatttatcattgtcactggcttcgggatcgttcagaatcttagcaacctgttcgttgtgcgaacggcgcagcaaaaacgaaacgtcacggaatgcggcatttgccattgcagtcaaaccttctttttcaatcttcaagataggttttccttcaaactcacttactgacacataatccttagtcagcaaataatactcagttttgtcaggtcccaaatcgaacatgggctgatagtggaacggaggtgttgccataatgatacttattttagttaattagttattagtgacacaaaggtagtaactattatcgaaatttttccttaattagcgtaaaaactttcagagaatgtccttacctttgccgactcattatttaataacctaatattgtatatggaaagaacaggcaaattacttcttatcacttctctatttttatgctttttcggtctgaaaggatggacccgcgacagagccaccaaccaaccggacagtttggagctccgactcatggaaatctataccaagcgggaggttatgattccgatgcgtgacggagtgcaactctacactgctatttacgaaccgaaagacaacagtcggaaacaccctaccctgatgatgcgtaccccttattcatgcagcccttacggagaaaggtttgataattatctgaaaaccgcgctgaaaaagtatgttgacaagaactatatcattgtttttcaagatgttcgcggccgccacaaaagtgaaggagactttgtacaattacgcccgttaaacaaaaacagaaaagggaaaaaagataagaaaaatatagatgaagccaccgatacttatgataccatcgaatggctgattcatcacactcacagcaatgaacgtgtaggaacctggggcatcagctatgaaggcttttatgccaccatgaccgcctcatgtaatcatccggcattgaaggccgtttcaccgcaagctccggtcacagactggttcaggggagacgaccgccatcacaatggtgcgtttaccctcctgcaaaccaccaattttctcccccgtctggaaggccgcaacatgggaaaaggcgtaatgcatcagattgtgaaaaacgatgtatataccgacttcctgtctatcggcacatttaaagacatagataatctggtgagagatacaactgaaaccatgtggaacaatatcaagaatcatcccaactttgacgaattctggaaagagcgtgatgcacgtacatcttgctacaatctgaaacctgctatactggtagtgggcggactgtatgattcagaggattgctatggtgcatggaacttatacaaagcaatcaaagagcagtctcccgaaaccgacctttatctgactttcggtccttggtggcatggcgcttggacacgccacagcttccaaagtatcggaaatgtttattttggcaaaagtacttcggcttattatatggatgagattcagtatcccttctttcgctattttttggaaggagaaggagaaaagcccaaaaatcgggtaaacatattctattccggcgagaatgaatggaagacttatgaagaatggcctgcaaaagaaatggttccaactccttattatatccatgccgacggttcagtatccactcaggcaccgaaagaagagaaatcatatacagaatatgtatcggatatgtcacggccggttccttatacagccaatccgactacttaccgcacattggaatacatgattgatgaccaacgttttgccacttcacgcccggatgtcattaccttcatgaccgaacctttgaaagacacactaaccttggcaggtccaatcgaagtggaactcatgacagccataagcagcaccgatgcagacttcatggtgaaagtgattgatgtttatcccgaaagattcgaatatccacaagaaatacgcaaacaactgaaaagtaattatcccatgagtggattccaacaaatggttcgcggcgaattgttccgaggacgttttcgggaagggtttgacagccccaaacctttcaaaccggaagaaataacaccggtcaactatactttatacgatgtagcccactctttcttacccggacacaggctaatgatacaaattcaaagttcatggttccccatcattgaccgcaacccacagaagttcatagacacttatcattgcggagtggaagattttgtgatgaaacaagacattaagatatttcatcaacaaaatgcagcaaccagacttctacttccgatagtgaagaagaaatagagtatacactatgtattttaggcacagaaaacatggagcttacggaataaaaaataatccgtgtttatccttgagttctgtgcctaaaagaaatattattccaaacacgcatctaagtcacgtaccaactgttccttatccaaatgctgaccgataaaaacaatcttctgcatacggtcaccatatttatcgtcccaatcacgcagcaagcccggttcccggcgcatcacttccatcaattcttcttccggtgctgtggcataccacaaacctgcttctttcagtttcttctgcacaccggcctgttcaaaaaggaaagacatgtccgggttattgctaaagtaacatacccccttagcacggataatattacggccccatttggtagcaacaaaatggtcgaacttatgaatatcgaacgcaggacgacgatagtaaacaaaagtactgatgccatattcctccacttcaccaccttcatgatgatggtgacaatgctcatcgtgctctgcgtgatgagtatccccttcatgttcttcgtggtgatggtgatgtccgcgctcttccgcctcccgtttctgctcttctgttagtactccttctataccacgtatccaaccggcagaagtggcagtccgttcaaaatcaaacaaccccgtattgataatcttattcaggtccacctcggcatagtcacattctacgatttcggcagccggttgcaaagtacggataatttgcttgatacgctccaattcatcacgctttacttccgaagctttattcaacaggataatattacagaattcaatctgttggataatcagattttcaatatcttcttcatcaatacctttacgagttaaatcattaccgcaagaaaattcactttgcaaacgtaaagcatctactacagttacaatacaatctaaccggcatgaaccgtacacagtattcatgcctgaaatagaacaaatggtctgtgcaataggagcgggttcacaaacgccgcttgcctcaataacaatatagtcaaaacgccccaatttcatgatatcatctatctgctccaccaaatccatcttcagagtacaacagatacaaccattctgaagtgccaccaaactatcgtctttcttgtctacaattccacctttctgaatcaagtcggcatcaatgttcacttcaccaatatcattgacaataactgcgaacttgacaccacgcttattggaaagaatatgattgaccagcgtagtttttccactgcctaaataaccggtcagcaataatataggtatttcttttattttcattctattatccttctactgcattcactttcagaaattttcacctcttcggctacaaagagacatccgtttcgtcataagtctgataaaggaaatcattataagggtacttctgcacatggagttcccttaccttattatatatgacctccttcagttcttccaaattagttttctcttttgccgagatgaaaatacaattatcattcaatttagccatccacgtattcatcaactcatccaaagtaatgttttccttggttttaggagtcaaatcgtcttccggtttctcgatataagtgtatgcatctattttgttgaacacaatcatagtgggtttaccaccggcacctaaatccgcaatggttttgtctactaccgctatttgttcttcaaaatcaggatgcgaaatatctaccacgtgaatcaacaaatccgcttcacgcacctcatccaatgtcgatttaaaagaatcgaccaaatctgtcggcaacttacggataaaccctaccgtatccgtcaaaagaaaaggtaaattatcaattatgaccttgcgcacggtcgtatccaacgtagcaaacaacttgttttctgcaaagacttcactttttgaaagcagattcatcaatgtcgattttcctacgttagtatatcctaccaacgccacacgtatcattcggccgcggtttttccgctgagtcattttttgcttatcaatctctgccaaacgctccttcaataaagacatacggttcaagataatacgacggtccatttccaattgtgtttcacccggtccacgcaaacctacagacccttttccaccaccggcaccggatccaccgccctgacgctccaagtgtgtccacaagcgttgcagacggggcaacatatatttgtattgagccagttctacttgagttttggcatttgctgtttgcgcacgcatggcaaaaatatcaagaatcagtgaagtacgatccaatatcttcaccttcagttcagcctcaatattccgtatctgctttgcagaaagctcatcatcaaaaatcaccattccgatttctcgttcttcctcttcctcccgatgaatatattccttaatctcttccagtttccctttaccaacataagtcacagagttggcagacggtaacttttgagtatacctcttcacaaccgttgctcctgccgtttctgccaagaactccaattcgtccagatactccattgtcttccgttcatcctgagtctgcgtaacaagacctaccagaatagccgtttcgacttgtgcttcagatattacaaattctttcatttatctatgattataaataagttcgcgacaaatataacaaaaaaagaggatgaacgttgaacgttcatcctcttttttatgattcttctgagatatgaatcctcctgttcaattctataaaagaactaaaacatggtatctttttcattaaagagttttttctcgttcagtcttattacttttccaaatttcttcaacgcatcaatacttatatccttaggatttcccaaaactccgattataatcggcttgcccttgatattcttttgataataatccacaatatccgggaatgtcaaggaatcaatcaaaggtagttcctccttagccggatcgtcagtatagcccctgcgtttccattccgctatccggagactcaagttacgagaatcagggtgatcggtcaaagctgattggcgcaagtagctctttatattatcaatacgtcccggtcgttcaggcatatccgtcaataacttcatatataaatcaatagcgtcaacagccttgtcattttgggtaccgatataaccggagaaataagtctgcgctcccggaagcccgcgcgaagaggcaaaaccataagcggtatacgccatagaattcttttcacgaatctcattcattatcaatccgctgaaaccgccactgatatactgattaaaagcctcacgccttacattctcttcccgattataatctcccataggaatatagaaataaatctggctttgtcgggcatcactgttaggaaggaaataaaccgtattttccatcgggcttatcatatccttcataacaggagaggaactctgcttctcgcccgccaccaaaggcagtgaagtactcagcacctgatagacggtttcaaaaggcaaggtacccgagtagtggatttccgacgcataggccgtagcacgattgatatcaccggtcaattccgagaggttcagctccgtcagttccttgtcggtcagctccgatttataatcagacttatcaccatacataatatactgacgcaaggcatctgccagcaaattgacattttccttgcgggtaatacgaccgcttatcacattcccttccagactcttcaactgtctttcgtccagtttaggcatcagtaactggcgggtaagcaactggcaggcctgttgaagtgcattctcataaccgcgtaatgtcacatacagataactgtcatcggcatccacgacacacgtcgcattcaatttgctcaactcttctttcagttcttggggctcaaagcttcccataataccggcattgttcatcagcgaagcggcatactcaagccgaggaaaaatctccgaaccgacaccgtatttcaataataaagtaaacacctcattctcctcatttcgggtataatacacatgagaatagtcattaagcttacgttcctgcaccctactccaatcaacaaacttttcctctaccttattaatagccatattcttgaactgacgggcatacagagaagactgtccgacaggtggctcaatgggcatatagtcaggcttcttaatcttctggctcttgtccggcttacccttctcattgtaaatagcaaggtaattgcctgtcagatactctctcgcaacccgtttgatatcatcaacagatattcccatgacgacatctttataattcaatacctgattgatatcccgctcattgacaaaggcatcctccaaaaggtgggccttaaagttattggattccatacgcaagtcaaaatcccgacacataccggatttgacggtctccacaacccatggttcaaaatcgccttgggctatctgccgaatagccttcagcagcttcttttcaacacttttgttggattcaaaacgcctttgattattatcataagaaggaacaccggtaataatatttcttccctgttcacgaaatgtcacgggcgaggcatcccctcccaaaagttcaccatcaatcgtcagtttgttcagcagaccggtctgactgccattactgagcagttgcatacagatttccaacgcagtttcatcctgatgaccgttcttcacccccttatagaccagcatgacagagggataccgagaaaacttggtgttgtattgcacacgccccttgatgtccaaatcaggatagactttacgctcgggagtagctttggaatgtaacttaccgaaagcagcggcaatgcgtcccattattttcttggtatcaacattccccaccaaaataagagccatattctccggggtgtaccaatcattgtagaatttgataagctgactcaggcggggattcttcaaatgctcccccaaaccaagtattgaccgtgagtaaggatgtccggcaaatgcctgttgcatcataaactcaccggtttggctgttaggattatctttgttgcgattatactcttcataaacagtttccaactcattctgaaatgtacgaaaaacaggatttacaaaccgttcggaagagatttccagccatttgtttatctgataaggaggaaaggtattatagaacactgtataatctaaacttgttccggcattaagacctgttccgcccattccttcaatgagttcggaaaactcattagaaaggctgatcttacctgcttcaatagtaaggttattaatttcctttccgataacttcttttctgacaggatcattctccccggccatttcatcatatttagctatgatttgttcataaatgggagcttccttttcccagtcgagtgcaccgatcttctgtgtacctttgaacatgacatgttccagataatgagccagaccggtatattgttccgggtcattgactgcaccggtgcgaacaacaacttctccaaacacatctgatttgcccgaatcttcccaaataaaaacagacatgccgttttttaacttaaaagtcttgagcccctgtgcttgtacttgaaaacagaaacacattgataatagaagaaagatatgaacgaagtgtttcataatatggattttattgattattgaattaaatagaaaggtcatacattcctaattaataatattgggatgtatgaccttaacctatgattttttagaaagtgctattcatgtttcatactcaaataaaagaatccgaacgaacccgcactacaagaagcctgccagtttccggtaattaaagtgccacctttagccgtaaacgaacagcttattgtctttgtataattttcaatagcatcatcaacacctttcataagaacttctccataagacggatgaagcattacaatttgatcagttggaataacaagagttccatctgccttattgtaagtacctgtaattttttgtccaccattaaatatattgaaaatttctacagaagtttcgcttcctgcaacataattaatctgaactttgtaactttccggttcttccttgccttgagcatcatactgaatcgccgtatatgtcccatctatactatataccggagcaacaggagtctttatcgttttcgactcacttgtcacaattccactgttcgcagtaacggcataagtgcgtacataatatgtagtattttcattcaaattagatgcattaacagtaaatggagtatttaagtctgctgcagcacagataatggaattggtaaattgttcgtccgtagacaacattgcaccaatttctaagactttatcagtttttacctctaatgaaccggttatctttacagttgaaaaattaagtacgacaacatccgttgtagatatcgttggtgctattgaagcatcatactctatatcaaaatctgattttgaaggagtatcttcatcttcacatgcaaccataaaggaagcaagcaaaagagaagttatagataagaataaatattttttcataaatctcttattttatcattgattattatggattttgttctgattcatccatctgatcattttcttggaactcacgtctcggaatctgataaagtagcgtccagtctccggctttaaagtctaatctaccacctacccaatggttacttccttcataattacgtataatatccttttttaaacgaaggtgatcaaagaaagaaaaaccttctccccataattccaaacgacgttgagtataaacctcatctactgttacagatgttttattccaagaaggatcacggttaaccatcaattcttttaatacagaagctgcttcaccatttttattcaaatgcgccaaggcttccgcttctgtcagataagcttcagacaaacgcataaaaacataatcggcttcccatcctgctacctttttaaattttaaattagtataatcaggcacctgtctgtctcctgtatcataagttataacaaccttttctccgggatttgcaaattgttttctacgtgcatctgtctctgaaaaattactgaacaaacgtgcatctatttttctatattgtccaacagcccctccgtaacctgcgtcataagaacaaagaaatgaaaataacgaagcaaacatagtggtagtttctcctgtaatatctgcaccccacatccattctttgttattgatattattaaatccatcggtagcaatttctgataaactcattaattgtgcatcagagtttgtccgtgcagcatgcgccaaatctgcagcttcttgccaacgctccatatttaaataaatacgagagagtaacatttgagcaacttccttatttatgctcgtttttgcttttcttttaaagccttccaaaagactgataccattctttaaatcagcttcagcctgtgcataaacttctgccaccggaacacgattcaaacgtgattcaccttcattgggagtataaataagaggtactcctaaagctgttgccggatcaggcaaagaagaataagtttgttggtacatacttattaaataataataagccatacccctaatagctaacgcttgtcctttcgcagcatttatttcagcactttcaactccttctggtatcttgctaataatatcattggatttattaattaacgtatagaagaaattccaatacataaatgtacgaatgtattgttctccccgatattggaattgataatcgaaagtaaaccaaccagaaccttgtacttcaaaagccaagtcatctgtcattacatcacctaaatgaaaaaatgaagtaagtccaaaatcattatgcacagtactagagcttccctgtgtattatattgattcatataattgtacataccagccaacaatggatcaataactatcattaatttatccgggtttttggtagcaagatcatcaatctgctctccagttgctacatctgtaggatcaactgttatataatcttcaccgcaggatgataaagttaaagctgcggtaagcatagatatcgctgttatttttaatgacttcatatattttatttttatcataagttcatactaataccaaaagaaatggttctaatagccgagtatgcagcgtctttcaatgaaccgtcaatagcctgtcttggatcaagtcctgtacgtttggaagacaaccaaagattatccccggaagcatacacacgcaatgattgaatagctaatctattagtccatgctttaggcaaagtataacctaatgttatattctttaaactgaaataatcatttttagtcaagaaacggtctgaactctgattggcatgtagatagccttgctgaacacgaggaacatctgtattgggattacttggtgtccaacgtttaaagatatcaggagaccagtttgttccggcagtaccaccagccatcaatgcagagtaaccggtatccattaaataaccacctccttggaacgcagttgcaatacttaaatcaactccatatgcttctactgtagtagataaaccaccatagaatgtaggaatagcagactttcctatctgataacgagttgccttattggggtcatttgtcgtgcccataacaatattgccattttcatcttcttcatctacataatataatgcatcaccattagcaggatctactcctgcatatttataagtataccaatcatacagactgccaccttcttttctccaccatgaaccggtataataaccattggggtctttaccttttgctaatttagtaaccgtattcttatacttagtgatgttagcatcaatattccatttgaaattatttgtattaataatcttaacgcccaattccacttcaaaaccattatttctcattgacatatcattaacagctttggtacccggcaaaccagctgaaggaggcattgcctgataataaagtaaatctttggtttctttgatgaaatattctatatttcctgttattctatcccataacccaaattcaactccaacattaaaattattacttttctcccaagttaaatctttattaccacgccatgtataattgataccgattgcaccatcttgcggcacaacttcatattgatctaagtaaggagttgaattacctaaattatcattaccttgcgtaccatagctggcctttaacttaatgttattcacgaaatctatttctttcataaagttttcttcgctaatacgccaagaggcaccgacagaccaaaaactaccccaccgattatccggatgaaaatgagaagaagcatctcgacgataagatgctgtcagataataacgatctctataatcatattgcaaacgcgaaaagaaaccttccaaattatatttattagtataagaagttgcatttttcagagaagctccattcgacagctcagggttgttaggaattaaaaattgttccttcatagccatcaaataagtaagcttatccgatttaacttcatgacctaataatacatcaatatgatgatctccaaaatctttttcataagttagcaattgattggtatttaatgcaaaataacgctgagcataacgatagctacgtccattgacatttaaagcatctccaccgataggagtttgaaaatcaacttgcgttagattcatattatctgcactcaaattgaaagtaaatttgaagtcttttaaaaatttaacttcagcatatgctttagcagaaataatatcatatgtatactcacgtatatcattcactaactgtgcatatgggttagcattagctccataagggcgtgtatgtccgtctgttactccatagtcatacgccggattaccattactatcataaatcatattaccctcagcatcatgacgataaataggatagataggtgcaatattctgtccaaaaaagaacaaagacgagtaattggaaccaccgacattaggagaattagtagttgtttgggcataggccatattaaatccggttttcaaccaacttgctgtttgattatcaacctttaaacgtcctgtatatcttttgaaattagaattacggagataggaatcgtcatcaagataatttaaagatgcatagaaagaagtcttttcagaacctccttttatagatatattatattcttgacgcaagccatttttaaaagggtcttcttgccaatcttcagaataaagctgatgggcattaggattaagacgcccggtagttggatctattaattggttatttgcaacatcataaacattataaccacccaatgaagctaccaaattttgtgaggcatcccaagctgcagcagcttgtcccatacctgttgaaatattggcattctttaaagcttcccagaacatttcataatactgaccagcatcacgaattgttttatatgcttttacaccacgagagttaattccccatttggcatctaatgaaactgtagttttaccattaataccttttttggtagtaatcataactacaccattggcaccacgagctccatacagagagttggctgcagcatctttcaatattgtcatagactcaatatcagcattattgatagagttcaatgagccttcatatggcacaccgtccacaacaatcaatggtttttttgaagcactaatcgaaccaataccacgtacaaaaatgcttgcttcgctacccggttgccctgtactagaagtaatttgcacaccagatacagctccttccaaggcttttgaaacatttgaattttgttgttttgttattttgtccgcttttatagtggcagcagaacccgtaaaagaagacttcttggccgtaccatacgcaactacgacaacctcttcaagagtctcagtatcaggttttaatgtaatattcaaattaggttttattgctacttcctgagttgccatacctataaacgaaataaccaaagtctttgcagaactaaataattatttattttactgataatcaatactttggtgtactatctccaagtgtttccccttcatttaaagtaccaaataagcaatattatgaaatattttctactaatattctaccataaatcagagttctgatatgctaaaacagctctgaataaaacttattcttgcaatatcgtgggaattttataactataatgtactcaacttaaaaaggccgtgttatcataaaacacgaccttttattatattcagtaagcttttacattaatatccaggattctgttgccctttcagttgtggattactatccatttcatccttcggaataggccatacccaacgattatctgtagcttctttttcaatatcagtacccaaagcaggcaaataatcgtctctttgagcatcagatgagctacgcttcataccaattttccaacgcttcatgtcaaacaatctattgccttcagcaaacaattctcgtacgcgttcatcctgaatttcctgcatcaaagctgcgccattgtaaactgtttcagtccatcctttgatacgtatcttttttagttcattcaacatctctgaagctttatcttcttgattcaacattgcataagcctcagcagcaatcagatacatttcagaaatacggaaagcttttaacttattgacattattggattttccttcatataattcaggattacccggccatttactacaataagtgacctcaatatcatcacctacttgacggtcaatcaatccggttgtgaaataagcatcgtaacggatgtcattttccttatcgtacaaatttaaaacagacttaacaggtaaataactagggcgaggcagtttgtcaactattcccataaaagaactacctaaagcgtttgaaccggtttctgtctttgacattgcgaactgccagatagcttctgtaccaacatcgttcaaccacatctttttatacgcatctccatcagatatcaaagtatagcgcttgctattgattaatccttgtgcagcagccgcagcattttgataatcttccatttccaaatagacacgtgcctttaaagcttcaactacatctaaagtaatatatgcagactgggcttctccttgaattcctactaagttggaagcctgttccagatcttttacgataaaatcgaaagtttctttcaggctgctacgaccgggatatttggaataatccgaactaggcgcatattctgtaaccaaaggtattccataatcacttccggcagatgcgggatcgtagttcttacaataatgcaaggccaattcaaaataagcataagctctggaaaaataagcttgtcctacataatgattgatataagctttatcattttcacttagttccgcatcatttgccaagatattctgaccgccctttattaaatgattggcattggctatgatgtaataattatcggcccaacatcccgaaaatgctccatctgtgatttcgaaagcccaacgataaaaatatccataggtattaccataatctgctgtggcagtcaatagtccggattgtaccaacgcatccattgaataagcattttggacgtatcctctccattcagcatgaagcatattactaaaggcttgacagtcctttacggtcaatattgattcatccgtaggtattgatgtgctaggcatttcgtccatattacatgaagtaaatgctgcacaacaggctataattgatagtataattgatttcttcatattatgctttatttaaatttagaatgttaattcagcaccaatcgtaaattgcttggtattaggatattttcctaattgtaagtttgaatctacttcaggatcggcacccgtatagttggttacggtcaacaaattacgtccaacagcaaaaatacgtgctcctttgatgaaaccggtcttatgcaaccaattttccggcaaagtataaccgatagtcaggtttttcagacgaaggaaagaagcattctcaatcaagtgagtgtcaaaacgcaattcagaattagcagcaggaatattggttacttgtcccggagtcgtccacatatcaagcatatccgttgattggtttaactgacctgcaaaattcggattgttgtagaagaaagcatcattattaatagtatactttcctaatacataagagaagtcggcattaatgctgaaacctttccagaagaatgaagtactgaaaccaccggcccatggagcataacgttgctttcctgtaaatacagcgttatcttcagaataagttttggtctcattaccgtctttatccaaccaaatctgctgtccgtctgccgggtctactcctacccaacgaacataatacagttcaccataaggcattcctacctgatatttaataccggtattggctacaacatactcatcacgtccaccaaacaactcagtaatctggttcttgttatagttaatattggccgaaacactccattgcagatttctacggttaataatatcgtatgagactgtagcttcaaaaccacggttaaacatactaccgatatttccccaaccggaactgtgacctgttgtatatgaataaggaatagtcatcagcatatctgtggttttcttatcatagtatgccaagtcgatatccaaacgatcaaacaaacgtgcactcaatcctatatttatagtcttttgtttttcccaagttaaaccatcattctgaacagaagaaatatagaatgtttgatctccattatacttgccggtacccactaagcccaaagaaggataatagggatcaccatcaaatgcagagttaccggtcgtaccatagctgaattttacttttaggtctttcagccaatcaatatcttccatgaacgcctctttggacacattccacatggtaccgacagagaagaaagaagcccaacgattatcacgtccaaaaatagacgagccgtcagtacggaaagaagcgtcaaagaaatatttctcaccaaaattgtattccaagcgactaaaatatgagttcatcacttttttctttttgctggcactcggctgcttaggaatagtaccattactcagcataggcagacgaccatctgttatgttatccacactggcaccaaacgaacttccattataaataatagattcttgtccaaccaatgccgatatattatgcatttcgttgatactgaatttgtattcggctgtattggtaaatgtaaatgaagaataacgttggaaagattcggatgcagaacccttttgattattataatcagcgggcaggctaacataacgatatctgtaatcgaaagcatctattgcctgtgccgcacggattgtcagtccttttattggtgttatctcttcaaaagcattaccatatagacgtattttattcttttctgtaggttgattttccagcagataatacggattccacaatccaattttatctaaaatgttttttctttttccataagaaatagaaccatctgcattttctatgatttcataaggagtttcataagggatggcccacttacttaaagtcgctacgttgtaccaactatttcctgttccggcaaaaccgttagtttcaaaatcttcataagacaaacctaaattcaatccaacccggaaccaatctgaaactttagtatcaatattactacgtactgtttcacgtttcattcctgaagccggttcaataccctctgcatcataatggctggcagagataaaataattggtattgttggctacaccggtaatacttgcatccaattgataggtcggtgcattatctttaaaaaagtagtcataccaatctgtagatataccgtgtttcaatgcaaattctttattagcctgaaaagcttcattagtcttataattgggattgacagtttcacagaaattgaaatattgctctgagttcattaaagtgatattttctacagcacgctgagagataccgtattgcccctttatggtaacagtcggtttgacacctttaccgcgtttggtagtaattactataacaccattagcagctcgtgaaccataaatagaagttgaagaagcatctttcaaaatagtcagattttcaatatcattagggttaatggccgtaaatgcaccacttgaaataggagcaccatctaatataaataaaggttcgctggaagagttgatagaaccgataccacgtaaacgcatagagactccttcgctaggttcaccggaagaagtaaaaacttgtaagccggcaacctgtccttgtaaggcatccgcaaagttcgcacttggtctattggctatcttttcagattttacagcagcaacagaaccaaccatggagcctaacttcttggcactaccataagtaccggtaaccaatacctcacttaataattccgtcatgggtttcaaagtcacttttacactcggtttaataggcacttctttgttctccatacctataaacgaaataaccaaagtctttgcagaact

SEQ ID NO: 6851 - DNA, 8694 bp, Unknown
  gut microbiota DNA sequence
agtgctactataattctaccataaaatgaaattgtgttgatgtcgttttactaaataaacctttatattattcgtatatgaaataaatttcattactttcacttcaaatgtatggtgcgtatgaaagaaatgactgatggcagaaacaagatttattttgcaatcaaatgacattttttgtcagaaacgcctagacacctgccttattaacgaaatcaaaacacatgatgataattgcattataataagattataattatctttgtggaaaagtatgtgactatggtaaaaatgaacccttttataacaagcggttatcgttcagagaaatatttctgtgaccggatagaagaaacgcgttttctgacgaagcagatcaccaatggaaacaatgtagctctcatttccccccggcggttgggaaagacaggactgatagaacactgtttccaccagccggaagtaaaaaacaactattacactttcctgatagacatttacgctaccaagaatctgcaagaatttgtctttgaattcggtaagagcatattgcaagggctgaaaccccaagggaagaagatatgggaaacatttctatccactttatcttcccttcgtaccggaatcacctttgatgaaacgggcaatcccagttggaatctggaaatgggcgatatcaaaaacccttcagtaacattggacgaaattttcagttacttgaagaaagcggacagaatttgcctgatcgccatagatgaattccaggtgatagccaaatatcccgagaaaaacatagaagcgacactaaggacttatatacagcattgcaccaatgcctgtttcatctattcgggttctcagcggcatatgatgggagaaatattcaccactccttcacgtcctttctatcaaagtactactattctggatttgaaacccataggaattggaagctatgccgctttcattgaacggcattttatagagaatggaaagaatatcaataaggacaccatagaagaagtatatcggctgtttgacggtaccacttggtatatccagtttgttatgaatttcctctatgcggataccatggaaaaagaaacctgtacggttggaaagatccaattggcattagatgaaattttatcgcagatggattttacctattcttctttactctatcaacttccacccaagcaaaaggaggtgctgatagccatctgcaaggaaggcaggataaaggaagtcacctcttccagatttctccacacttacaaactgacggcaagcagtgtacagggagcactgaaaggattgctggaaaaagattttgtcactgctgaattaggtgtatacagcgtttatgaccgttttttcgaactctggttgaagcggttgtaaagaaaataacaactccatttattttcaaatgcgtactttataggatagcctctctctttttctatgaagaaaaggaagtctttgtccgagaattctgatggaaaaacgattaaggtatcttttacacctaccatatggaataaaaatgacttgatactttatggctgttctacagtgtaccccactgtagaattcaaaccaaggtatcaagtcattttatataatagtgttaatattcaggattctgttgtccttgcagatttacattagcatctatttcagcttgaggaataggcataacacaacggtagtcattccagttagggcttattaagtctgtattattcaagaagtgacggcctccttctcttgttacagttcctccaactcgtaaaatatcattgagacgatgtccttccaatactaactccttccttctttcccggtcgatcattggcaatgtagcgacaacatccgatgctgttggaatagcccttttaataatcttattcaaatagctatttgctttcgcttgatctggacttgatttgcgcaaagcagcttctgcagcaatcagatagatatcagacaagcgaatcactctgatattattaaccgtagaggctccattccttcccgggtatttattaataatacatttaactcctgcagcatcttcctttaaaagtcctaatctgacatcattaggatattcatttagcagttcgataaaggcatcagttgcagctatagctgcataccctttaggatctaccaaataaccaaagagttcacgattaccggaagacaaatctgaaacatgcaaatcgagtatggattctgaggtatattcattagaccaagcagcaagatagtctgcgttttgaatcagtttataaggactttcttttataatcgtttcagcacaattgaacgctgcgtcataattgcctttatacaaataaaccctagcctgcaatcctagtactgcccatttattaaaatgcccatcgttgactttatcagaaaccaatcctaaagctgttgttaaatctttctctattgcttcatagccttcggcaaccgtgtttctggcaggcatgtcgttggccgtcaagaccttttctacaataggtgctcctaaagaagctcctttgtctttttgataaggataaccgtatactatattaaggttaaaattacacaatgctctgactgcaagagcttctccttttgcattgtctaattgaggagaagccgtgattttacccgattctatagcttgcagaagaacatttacccgattaatgacctgatagggtattttccaaagacctgtcggcgcattattctgacgatacatgaatttgtaaaaattttcagttcttttgcttggagtcgaagtttgtacatcttcacctcctacttctgctcttgatatgaaatcggcaccgtaatattcgctagacagtaaacctgaatatacaccatttagagcagaacctacatcttcaatattgttaatagattcatcggaaggcagtgcgttagaaggcatctgatccagatagccatcacatgaagacaatcctatagaaatggatgccgctatgaataagaattttaaactattatgtttcataattatttctgtgtttataggttatagtgatagttccagaccgaaactgacacttttcattgccggaaatgcaaaatttacattaccattaataggttgttccggatccacattgtcataagattggaatgtcagcaaattgctgcctgaaacaaacacgcgcaaattatttatgtttaaggggttgagccattgtttgggcaaagaataagaaagtgaaaccgattttaaacggagataattattggtgtgcatgtgacggtcgcttgaatagcgggcgtatgtatagttgtttatacgacgcggaacatctgtaatatctcccggtttttgccatctgtttaactgctgtttgcctattgcataataagcgttttcgccatcagtatctgtatacgttaagcaagcgtcatccaataattttcctcctagagagaaggagaacagggcgttgaattccagtcccttccatgaaaggctatttctccatccgccggttaatttggggtcaggagtgccaataataatacgttgagcctctcccgggttctttgttaattctttattcagagagccgtctttattttgggtgttcagtacccattgttcttcacctgtctgaggatcaacgcctgcccattctctggcccaccatgaataataggattctccctcacgtaagatgcttgaaccactaataatgtctttgccatcatataatttatcaattttattcttattgtgtgacaaggctagaccggtagtccactgaatagccgagtgcttgaaaatatcataactaatgtcaatctcaacgccacggttaatcatggagcctacgttttttaacgcagaagtgaaacccactgtcattgaagttggaacatcttgaagcaaatctgtagttaagcgattgtaatagtcaaatgagaaactcaaacgctcaaagaggcgagtgtcaaaacctacgttgaagttcttgtttctttcccatgcaagatcggggttaggaattgtacctggtgcaatacccggtttgtcctgatagtcataacccgtactcattaaactcaggtgactataaagtttgcttggtaatgtaccgttaataccataagaaactcttaattttaagtcattgatccaaggtaatccctgcataaaattctcactgctgattctccacgcaccagaaactgaccagaaatttccccaacgcttatttatccctaagcgagagctcccgtcacgacggtagttggcggaaatataatattttccggcataatcataattgaaacgtgacaaaacagataataatctgtctctagagtatcccgatgaagcagtcatgggagtagaagagttctccagttcaggtagtaagtctgtggaatatccttttccgacagcttctacataagtttcttttttatcatcaacatcccatcctataagtacatctacattatgcttttcattaatagttgttatgtagtttaaaacagttgaggagtaaatattgtgattttgatagggtatcttaatcattaatccttgatgtaagttaccgttgtgtgaagcttttggccagtgtgtggtagcttcattcatgatatagtcgtaactcaatgtttgtttcaggataagcccttttataatttcataagacgcccataaagaattggaacttctgaatacgcttgacaaacttttgtctagattcatgtcttttaccggattggcaacgcctaaattggcaatagggaatccttcataaaaacttccgtcctcgttatagattggtatattaggaatagcataccaacgtgtaacaaagtagggattggcataagcgtatccctctgaaacctgagagctgctttgtttagacatggaaatattaactcccatttttattttgccatcattggatttgtggcttacattggcacgaccgaagaagcctttcatccatgatgattctaccatgcccttttcgttcttataagctaaagaagcatagaagtttgtattttcattacctccttgagctgcaaactcatagttctccattgagccgttacttttaaacagggctgattcccaatcggaatagcggtctagtttaggcgcccacacatctacattttgttgggcgtactgcttggcttggacctcatcgtaatctttatatagtatgccctcattgtaaaaggcttcataagttaactccctttgttggtcaccgttaacagtctcgcggtttttggtagcccaatcggttatgccccaattagctttgaaacttatggttgtttttccttcttgtccttttttggtagtaatcaggacaactccatttgcagctcgggagccatagagtgatgccgctgctgcatcttttaaaatggttatgttttcaatatcactgggattcaaagaagacataatattaaaagatttagtatctccgctcactcctgaaacagcaacgtctccagatactacgggaattccgtcaatgacatatagaggttcatttccggcattcatggagcctgtaccgcgcaaacggatagaaagtgctgcaccgggttgtccactattactgtttaccgtaacacccggagcagaaccttgcaagacttcttcaaacgaattaatcggaatatccttcaatattttttttgctgaaattgttgaggctgccccggtaaatgaagcttttttagctgtaccgtatgccacaaccattacctcatcaagtacttctgcatcagcttttaaaaatatctgcaagtttgcctttattgctacttcctgagttgccatacctataaacgaaataaccaaagtttttgcagaactaaatacatatgtatagcattgataattaacatattaacaactatgtcgcattgtgcatatatccactgaatactgctgtagcattataattaataaacaattcctactttaattctaccatgaaataagattgtattggtagtgtttaactaaatcagtttacactattctgtaggtatatggatcagattgtttaagttctgtatcaataatttgtttcctacagtcataacatatatatgtgtaagcttatgcatacgtacgtcagtgtggcccgatgcgtacgtacgtgtaggcttacgcatatatatgtgtaggctgatgccaccgtatgtgcagcccgatgcgtacgtacacattttaaaataggcagctcacactgcatattgcagaaagaccttgatgtttttaaaaaacttcaaagtcttttttgaacatagcaaggtcttttttaaaaagctcggtatgtttttcctgtaaaggcagattgtaccccttcaccaagtcaatcgttttttcttttccgttcatccttacatctttaccaaaacatacagataatcaattggttaataatgacagaacccctctcattcttgtttcagtcactctttccaagtcccttcaaagctacccacagcgattccaaacttaacgaatgaaaggagaatgaaaggatgacaatgagatgttcattcaccactgactatccatcaacagagcattttaacgactgatgaaaggaggaaggaagaaacgtatttttcacttgtaggacaaaaaacagttgtttttatggtttcagtcatcacatggcaaaccatttacttaaatggaattatccattcctttgaccttgccaaggcaaacatgcatgttgcagaagaaaaatctgtcacacataaaactcaaaatactcgaagagcttttctttgtgtgacagataaaagagataattgttctacttattttctacctgataccgggtgtataattaatatgtcagcaatatttaatcttttcctttctgacacttttttaaatcacggacaatagtactgcccataacttcaccataaatctgcgttgtagtcagatttttatgtcccaatagcttctgtacagttgttatattggcccccttatatattaataaggtagcattggtgtgccgggctgtatgaaatgaaaaatgcttgtctatatttgccaatttacctatacgaattaattctttgttaatattggaattacttttcagtgaaaaaaaagtattccacttgttttgatacttggtaagtatgttcaaagcttttccgccaaatagcagatttaaaggaagcttaacctcaatgcctgtttttacagaattgaatatcagccacaattctctgtctattttaacaatattcttctctgttaaattggtaaaatccgaataacgtaatcctgtataacagcagaataagaatgcatccaatgtatgttggaaatgcatattccgatttatcaaagataattcttccaatctattcatttcatcaggcaaaagaaatacatgttttccctctttcattttaattttatatcttctgaaagcataatcatttaaatcgatatatcctttatttattgccgcattaacaaacgattttaaatgtttcatgtgttttgctacagtattcatttgataaccggcgtcatacaaatacttttcaaaactagttatgaaattgtaatttagatctttaaactcaattgatggtttaaatgattggagcaatccaatagtcgttaagtgattttgcttggtactatcttttaactgagatgcatctatttctttacgcacaaagtttaaaaatgaaatatccgtactacttttaaattcatcctttataagatttaatgtgatgaccttaccttgcctccacaaagccaattcttttctttccagctcaattataaactcttttagcattccgttaagtgcatcttgattgggatgatctttgataaccttcttctttacatcccattgctctggacgtaaatagatatgggtggaaaagtagaccttcttcttattgaggtaagcttctacttggaccagagctgttcctctggaattcaaacattttttccggttgtaaacaggacgataactaatctttctcataattcttagttctaatattgaaatactatattctatgatgagatgtaaagtgaacactaaaaaagcatttgaagatgtttttgttcttttctttatataaacttagaaagattgcccaatatgttaacaattataagttaatatatatttaaaatgcaggttacagattgaaagtcgctctattgctaatattaaaaaatcgaataaaaatgaagtgaattttattttttttgtgagataaaactccctaaaagcatgataatagaggaaatacttgtgaattttaccattatttgtttgattttacaattttattcatatctttgccaattgttagagtgaatgaatttatattaatctaaagttaaactttaagagagaattttatgaaaagaaaatttatgctgttattgacctgtctttttataggtataggtctggtaaccgctcaggtcacgaaggtaacaggtactgttatctcggaagaggacggattacccgtagttggcgcctctattttagtgaaaggtactgctgtaggtactgttactgacatggatggtaaatttcaattaccaaatgtaccaagttctgcaaa

SEQ ID NO: 6852 - DNA, 4423 bp, Unknown
  gut microbiota DNA sequence
agtagtcgttttgggttatggtagcggcaaaaaaattggtagtattgtcggttctgttgcaaaagtaaattcggaaaaattatcagcaaaacctgtagctaatgctatggatgctttacaaggacaggtttcaggtttacaagtttatactagttctggtgaaccgggctctagctcaagttcatatattagaggtgtaggctctctaactgcagataatgaacctttatatgttttggatggaactccggttagttcaagtgtaatggtaatgatgaatcctaatgattttgaaagtgttactgtattgaaagatgcttcggcaacttctatttacggttcacgtgctgctaatggtgtaatctatattactacaaaaagaggaaaaattggtgaaaaagctgtgattacagcatccggtaactatggtacggctagattggcacgaagagtaagtaatccaatgaattcaacagaattacttaactaccagttgtcacatggtatcattaaacaagaaacttatgataagtatatcaattcgggtatcgataccaattgggaagattacttttttaaagatgacgcaccgacttatcaagccaacttatctatccaaggtggtagtaataaaacaatgtattatgtatccggttcatattattttcaagatggtataactcctcgttcagaatataatagatatacattccgttctaatttggaatcaagaccaacagattggctgcgttttggagctaatttcggtgcaacttacgatgaacaacaaacttcattatttacatatcagggatcaaataatttgaatggtggtatctttggtactattttaaatcctacttattataatccttatggagaagatggttctaaactggatgttattcccggcttgaacagatatagcccatattatttgtcagacaagcaaccttcatcttcaaacacagctcaattggacggtactgctttcatacagttgaatcctattgaaggattgactattcgttctcagtttggtatagaagcttatgatttcagacaaacttctaaacgtttggcttcacatcctaatgctactcagggaggatatacctatgaagcctttagaagaaatgctaaattgacaattaccaatactgccgaatataacttcaagattaaagatatacatgattttacaatcttgataggtcaagaaggtattaaaaacgattatcaacgtttcggttcagaaacaaccgggcaaagtgatgatcgtctaagtatgttggaagccggtacagcagctactttattaggagctgacgaaaatgatctctatacttatcaattcttgtcattcttcggacgtatcaactatgctttaaatgacaagtattttgcagatttctccatccgtaatgatgcttcttctcgttttggtaaggacaacagaaatgctatctttatgtcaggaggtttgatgtggaatatgaaaaaagagagtttcttagaggacgtaaactttttgtctgatttaaaacttaaagccagtatcggtactaccggtaactcttctatcggcaactatgatcacttggcattagtgggtactaatttatataatgcacaaggaggttggaaaattaatactcccggtaatggagatttgggatgggaaaaacaaactttggctaatatcggaatagaagccagcttctggaacaaatatcgtatcgaactgacttattataataagaagacctctaatatgttaatggatgtacctgttccttatacttcaggtttcagttctattactcaaaacgtgggttcaatgaccaactccggtgttgaaatagctatttcgctcgatttgctcaaaacaaaagattggtttgttggatttaatatgaactatgcatataataagaataagattactgaattattctatggttatgatgaatgggcgatgcccaattatttggtgtcatacaatgtcggtgaacctgtacaatattatatggctgagtgggccggagtagaccctgctgacggtcagcaaatgtggtatataccgggaacggatggtgagacaaccaaagagtatgatgaagaacgacttcagcaggctaccggtaaaaaacgttatgcaccccataatggtggttttggattaaatgtctcttggaagggcttgagcctgaatgctgattttgcatgggtattaggaaaatatatggtaaacaatgactattattttgcagccaatccttataattttgccggatataaccaatcaaaagatgtgttgaatgaatggaaggaacccggtgatattactgatattcctgcttatggaaatgttatgcaatttgatactcacttattggaaaatgcttcattcttgcgtctgaagaatatttcattgtcgtacactttgcctaaaaattggttactgccaaccaaagtaatacagggagtaagaattatggctacagcacgtaacttgtttactattacaaattataaaggtgcggatcctgaattggatactaatttgacttatggtgcttatcctaatacaaagcaatttacaattggtgctgaattaacattctaaatatttaaattatgatacgtaaaatattcaaaactataatattgtcgtcatctcttgtcctgactgtgacatcgtgtgacttagaccaatatcctaatgatagtatctctacagagacatcttgggagactgtagacgacgcggttaaattccgtaacggtatttattcctacttcaaatctatcaatggaggaatttatacctatactgcagaccagcagtcagatttatttaatgcaacaatctcctattctaaccgtggtggagatatgcatcgttgggactttacagctgctcaatatgatgttgaagatatttggcaatataattattatacaattaataattgtaataatattatagctaatatagataaaattgcagctgaaaaagaagaggataaagcaactcttaatatgattaaaggtgaggcttatttaatgcgtgctatttgttataatacattagtaacccgttttgcaagtgattatgaaccggcgacagctgcatcagctaaaggtctaccgctggttcttgaaatggatcctcagggcaagccgtctcgttcttcattggaagatacttataagcaaattaaacaggatattaaagaggcacgcgctaacctaactactaaaggtgaagctaattccgtttattttacagtagatgtgattgatgcgattgaagcgcgtgttgatttgtatatgcacaattacgctgaagccattacattggcaaaaggattgattgataaataccctttggttgcagatgcaaacatgtttagcaatatgtggttaaatgatgaaagctctgaaattatttttaagtcattccaatctgtagatgaacgtgctaactctatgtcattatacctttcttatagtactacaactaaaagttttaacccggattttattccttcaaaatgggtattagatctttatgaggatggtgatatcagaaaagaagtatattatcgtaaggacaaaattacctgccttgaaacaacagttgatgatgtttatatgttaaacaagtatccgggcaatcccaaactgaagaaatcggagtatgaatattatcaaatgccaaaagtattccgtgtagccgaagcatatctaatcgctgctgaagcttcctatcaggctaatgatgaggtaaatgccctgaaatacttaaacgatttgagaactcaacgtggtgcaagcgtagtaactgcgacaggtgatgctctgtttaaggaaataaagaatgaatggattcgtgaatttgttggcgaaggtcagcgaatgaatgatttgaaaagatggcatgatggccttcaacgtcatgatccacaaaaccaagctattttgatgattggagccgactatactgaactcaccaaagaggcttctgacaaacgcttcttgtgggaaattcctaataatgatatgaatgccaattctaatatagaaggtaattggtaatatagagaaaatagattactcactaacttaaaaaagagactgtctcaaaaatattttgagatggtctcttttattttttttgtaaataaatcgacatcaaataattgcatacagaaagtgtatcggaatcacatatgatggtagaatccaggtagaaaacagttcataatatcgctgtttgaaggtattgtaaaggagaagtaaaatcttatctaaaaaaataaagtgttatatatcagtatactatatataattttagttctgcaaaaactttggtaatttcatttataggtatgcaatctcaggaagtgtctattaa

SEQ ID NO: 6853 - DNA, 1853 bp, Unknown
  gut microbiota DNA sequence
gtcagcgacggtacttcttacaacctgactattgccggcacacctgcaggcagcacggttgtcatcgacaagacaacaggtgaaatcagcatcgacggtactcctacaggcttcttcgccactacaggcgctactccccagggcgaaagcactgctccttatgtaaaggacggcttctggtatttctatgatgatgcaaccaaggcattcgtgaagtctgaatataaggcgtcaggtaacgcgtgggctgtacagaaaggcgattcggtggttctgcacatccccaatgaagcaggcgtgatgcaggaaattaccctgccgacttcttcttcggctctgacagcacttaatgcaactccgagcaattggacttcaggtaaaaatatcgtatggtcaaaagccggtgccgatgtaacttgggcaggtaagaaaggcaatgtggctgcagggcaactcttgattggtcaattaagcaaccttgtggaagtagctgaagtttcacctaaatcttatgacttgggtgcacaggaattgactttggtagacgtagaaggcaaggcggctcctgttaaagtggtggcaactccacaagatgcagaatctacagctcctcgtgccgtttctatgaatggtaagtggaatttgtctatcgaaatgaatgaaaccattaccgccgataatatagctaccgctttcaccaagaaagaaaacggtgtggacagaaacgtgaaatatgcattggcagtgaacggtactgtgatgacaggatacgctttcgttatagatacacaaactgatgcagaaagtaaaaccaacaaagctttgtctgataaaagcataaccagtgtcgtaattgacggtgaagatggaaatacagttcctttaggcactacaattttagctgtcaagaaggataatgtatacgattcttatatcaaatttgaagggttggctgcatcaaaggcagaaaaagcaggtattactgttgatggtatgacaatgactgttcctgctacggcagccggagttcaaggtttggaggccactatttatgctttggacgtaacaggtcatatttcaacacacacagttactttgaatattgccagcgcaacagaagcaccgtcggaaagtgtatctccggttgacataaagataataaaaaccggccaatcattcacaattgacttgggtgatacattcgctaatctggatgctaaccaggctttgtcaattaataaatttgctttgacaacaaacaataaagacttctttgctttgactgatgatgcattaagcgctcaaaatgctccttatgaggtctgtctggcaagtgtcaatggcattgtctataagaatgaaaaagatgaagaagttaatttgactggagcttctgcagaccttcgttctatcaagaaagcagtcattacattgggaagtaattataaatcaggtgcagaaagttctgccaatatgtttggttcattcactttgacattgactttgaaagccggtgaaaatgcagtgaaagccattgaaattcctgtaaccgtagaagaacctgcattcggtgacttgtatgaacagaatgaatatgctgcttgggcagataacacttatacgactgctttagtgaaggctgttggaaacaaaccttctatttctcttgaaaatatctttgtaagcaagaaagatgcaaacggtactgctattacttcagcttctgtaagttatacagagaaagtaacatataccgattatgatggtaaggctgcagaaaacaaaaatgctacggctctgtttggcgatttgtcagcaagtggtgttaaaatcttgaaagacgttgataatgg

SEQ ID NO: 6854 - DNA, 410 bp, Unknown
  gut microbiota DNA sequence
aaagttaaggtaacttctcctgaatttacagtaaaagcaaagagtgtcttcgaaggtgcatcacttgtatactacaaggcaggtgcttcagtagatgcgattgtaaatacagaaacagacatgattgctccgttgaccggtgctgctgaaaagagaaacggtcttgcactgaaactcggtgacagcgaaatggctgtgaactttgctaacttgtctgctgataatgctgctactaataagaattacaatgaacagggaaaacttggtcagaagtttacagtaacaaaacaagatgatttgaatgaaactcctgcaagcacttatgcaatctatgcacttcttgatgagagtgaaaattcattcggtactgtaacgatgggaactcccgctgataagtatactactacttc

SEQ ID NO: 6855 - DNA, 729 bp, Unknown
  gut microbiota DNA sequence
acattagtattgacattcaaagatgaactgggtatcatcaccactgcaacagttaaatataagaagtaatctacttctttcgataatagaaaggcatcctttggggtgccttttttatatcttcttttctaaatcttgagaaaagacaaaggggctgccacacttttggagtgcacttcacttttgagatggcctcttgttttattctctgtcataaattcaaagctttatcaagattgcttctgccataacctattgtcaagactacaaatgcttatataggacccatacaaaattagggataaatccctaatcgcctctctttcttcaatatcgttgataataagcggaatatattcttattacaactaacacaatttgtatttggccagggcttattgtcatgtgaagaaatgaagaatttttatctagaaagaaaatgaaatcttaatatcagattttgataaacaagtattagttatttttagaaagaacttcttgatatttataactattgaataaaaaagtgccggttgcaacaagaggatattgcgttgattatcagttatatttgagaaagagaggtaattcgggatttatcccttattttgtatagatcccatataagcattcataatcttggttatagattatggcagaagcaatcttgacaaggacttgattttatggcgggaaataaaacaaggcggaagaaagcttcatgcttct

SEQ ID NO: 6856 - DNA, 1282 bp, Unknown
  gut microbiota DNA sequence
ttaccgaatgcatcatagaacacacttctggaagtgaacccgcaacgcttgtcaagctcggtgatatcgcattcgttgttgtctatcaggtgcttggcgtgaaggatgcggtatttgttcagcaagtgtttatagttgcatttaaagtaatgattgacgacattcgacaggtaggtagtattcgtgccggttgcaacaagaggatattacgttgattatcagtggtatttgagaaagagaggcaattcgggatttatcccttattttgtatagattccatataagcattcataatcttggttatagattatggcagaagcaatcttgacaaggacttgattttatggcgggaaataaaacaaggcggaagaaagcttcatgcttctcttccgccttattatgttaaataaaaggatatatccggtcaatccaactgttctatttctttgatgcttaatccggttacagcagcaatggcttcaacggacattccaccggaccttaaattgcgggctacagaaagaatgccttctttgcgcccttctttgcgcccttctttgcgcccttctttcaatcctttttcgattccttccttcaacccttcctctttcccctgatttttagcaaaagaaatcgttgccagattgtccctgtatactttgatgctctcatcatacttcatacgctcctctttactcagggaagcgatatccacaatcttctccagtttttcaaagacggctttgcgcgctttgaaaggaagtctgttcagcgtttccatattcttgagtatatatatccaacgttcaaaatccgtctcacattcctcttcctccttgttgaaagaaggaagctcgataaaaataaaccgcagcttgtccgaaaacacttcgtgcgtatcacggtccgaaaggacaatgtccgtgcggagcttgtggggagtgtcctccagacggaagttcatgaagaagacaccgtaaacggccttcaggtcaaactcccagcgggctcccttctcaccctgacgcgtaatggtatgtgaaagatagaacaacgcacgctccttaaagttcgtctgctgccggttctgcatctccacgatgatatgctcccctgcctccgtggtgcaatagatgtcataaataacaccccggtcacccatgtattcgggtaacaattctttatccagaaaagtgatgtcctttatggacctctcacccaccagcaggtcgttcaggaagtctatgagcaaatccttgctgacctcctggccgaatatctt

SEQ ID NO: 6857 - DNA, 326 bp, Unknown
  gut microbiota DNA sequence
agaaaacatgttctttttctcatctttctcatttgaaaaaagccgtccggctaaatcgctttagcggaacggccttttgttatttactacgtaaacgggttacgtcagaatctgataccgagcttcagcaccggcatatcaaaaatcttgatattatggtgtgaggcgttgtacttgtcaaaacctttggggcacagctggatgacatcgtaacggtaggccaggggttggaactggaatcccagcaccaggcccggggccaggctgtattcgataccggctacaccggcagccttgatgccgaacatctgaccggcacggctgcc

SEQ ID NO: 6858 - DNA, 629 bp, Unknown
  gut microbiota DNA sequence
tgatagaagtaatcaaagccgcagcagaaggaacctttacttcctgtttgttaccatctttatcaaagatagtcaatgtaaatccatcagcttcgctacctacaacgctaacgccagaaacgggaacacctgtagatttgtaggttccgtcttcctgcaatacagcccatacaccatcctgcataatgatagacggtttcgtttcacttgtggcaaccttcagctcttgaggttcatcgttgatatacaaaataccatctacaaccttcacaacatctccactacctgtttcatcatccaaagtgatagttacaggatcaccctgattgaatgtaaaggtaataccatgtccgtcagctgtttttgcaacagaagtcacatacttaccgctaccaacgagatcctgcaaagccttgattgcatcagcatttgcagtaatttgtccttgcagattatcgatatcatcgtcataatctttacaagacacaaatgttcctgttgacgaaaccattaaggctccgaacaggattgcacttaaaaactttttgttcataataaaaatttaaatttataaatttaaaaactaaaattggttattcatatttagttataaaggacttaatatccct

SEQ ID NO: 6859 - DNA, 401 bp, Unknown
  gut microbiota DNA sequence
gagggcgattaccgcatccatgcctatacccgcttttcttttctgaatgacacgttgcgtccggtctatcccaagaagatacgtgtggtaaagagcatagcctacaaaggaacgaataccccgcaggaaaaagaccaacctgttgcccggttttccttcttccccgaaggtggttatctgattgacggaattcccaccaaggtggcttttaaagcactggacgagaagggtatgccggcaaaggtaaaaggagtgctgctggagaatggtaaggacattgctaaattagagtccgtgcacgacggtatgggttttgtgtttatccttccgataaaaggagcttcatataaggcggtgttgtccgatggaagggagttcccatttgcggaagtggtatcttc

SEQ ID NO: 6860 - DNA, 18032 bp, Unknown
  gut microbiota DNA sequence
atgcctttcatttatgcaaggttcttcgggcttctagggtttttcagggtgatattggcgagaaccatcagcctgttccgccctatgatgctggaagtttcggaatgcgatatgcgtgtgacggtaaataaatcctgtgcccttgctgcccaaacctttatgattgccatggcaaacgaaggctatgacacttgtccgctggaaggttttgacagcaggcggatgaagaaactattgaagctgccccatggggcaggcatcaatatggttataccttgcggcatacgggatgggaacaaaggcatttggggagaacggggcagggttcctttcgatgaaatctatcataggatataagagacagggtattccttcttattcagtgcccacggccatataaatgacgtgtggcactctgccgcttctcttgattttgtcttccataaaccattggcgcagctcatgggcagccttggttttcagcactcccgtcagattggagtattcctgtcgggtgatgaaggtgtattccttcaggtattccatcagcatgccgaatcgctcttcctgagtgtgcttgggagaagatgtcttgaagccgtatgcggggtctgcgcgttccaattccatttcgccctttctgcatacctctttgacaaagtggcgtgccggcttgaacttgacactgtcgaagtgcaccgagccggagcgtatctccttcttgtccgtcacctttcggctggtaagtgttgccgagaaggttcctatctctcccagtttcacattgtatccgtctgccagataatccgtcagcagattctccaaatcactgaacagtccaatgaccgtgcctgccttgaagccggagcgtttggcgatatcatcggcaatgttttccaagtttttagtgcctgccaccacgattttgggatataacgtagtcttgtctgctgtcccgtttacatcgggactttttttgaaatcaaattttgttgccatgtctaatggggttttaagggaacattaagccgtttcttacctacggctaaggctttttgtgcggcaggttattacgttctgccacagtgggacgtatgtcctgctgcaatgggacgtacgttctgctgtagtgggacgttctggtcttccgtacaaaagtacttaatcatacggagaaaaacgattaatccgacaggaaaaataagttaaagggggtaccttctttctttttgattctgtgcagaggccggctgagatactaggccagacaaggcaaccatacgtggaagacggaacctttcccgtattcggattccacccatattttgccttccatctgctcggtgatggatttacagatgggcaatcccagacccgtaccctggataaaggaattcagtttcttgaatcgcttgaatatctcggtcagattcttttcttcaatgcccatacctgtatccttcacataaatctccactccgctgtccttgagggcatatcccattttgatatatccttgccgggtaaacttggcggcattggtgattaggttggttacaatttgggtaagacgttccctgtccgccttgacctgcacttcctgaagcgggacttcgtagatgaactccctgccgggcagcttgactttgtctttcatctgaatggcaaggtcaccgaacatttcggataagttgaacacggtattgttgaatgtcattttgcctgagtccagaacggaaagattcagaacatcttcaatcagcgtcagcagtaagttattgttcagcataacaatgcgctggtattcctcctgctcctctttgcttgtggcatcggctatgagttgtgagaatcccacaatggcattcagcggtgtccttatctcgtggctcatgttggatatgaattgtgccttcaggcggtcggcttgttcggctttgtccaatgcattctttaactgctccatcatctggtgttgcaaggtaacatcatttcccacacataccagcaatttctttcccttgaatgagaatgaaaacttggcagtctgcaagtgagtgctcacatcgcggtcgggggaggttactatttcgttgataatcagtggagcatcttcggagtacctggaggcttccgtgtcatctctccggtatttgtcggcttcatctttagggaatacctcatagtcggttttacctatcaacagctctttgggcagattgcacatttgctcgaatttcttattgatgatatagaagcggtaatcgtcttctatgtctttgatgagaatggccgaaggcagttcgtggaagatggctctcatcatctgatgtgcctcctgttccactttaatggcatttttcaactttatttctttctcaacggcttttgttatgtcgtatccgatacataccagaagcttgttgccctcggaagtgctcacataagatttggtggtttgcagaatgacttttttctgaccgggaacacatatctcttcctgaaaggtatattctccttttctattaatggcgattttgtcgtccctcctgtatttctcagctacgtccggagtgaatatctcgtagtcgttctttcctatgattttgtggtgaggggtgttctgcaggatacagaagttttggttgaccatgaaataccggaaatcgtttgtgacatctttgatgaagatgatggcatccatccggtctatcaagaactgagacaatttattgagcggctgagtgatgctcagtaactcggttttctttttaagcagtcttatttcttctttaaggctttcgttctctttttttaattcttgttgttcaatgtcattcatgatagatttcggcggattggttatccttaaaaggtattcgtcgtaaatgtattaaaaaaatgaataacaggggcaatcttgtgaggactttctgctatatttttttaattttgcacctgcaactaattaacagataagaaaatgccattaaatttacccgataaactacctgctatcgaattattgaaagaagagaatatctttgttattgataattcgcgtgccaatgcgcaggatatccgtccgctgaagattgtgatattgaatctgatgccgttgaagataactacagagacggatttggtgcgtttgctttccaacactccgcttcagttggagatttcgtttatgaaactcaaaagccatacttcaaagaatacgccggtggagcacatgaaagcattctatcgcgattttgacctgatgcgcaatgaaacgtatgacggcatgattgtgaccggcgctcccgttgagcagatgccttacgaggaggtgacttattggaacgaaatcacgaccatttttgactgggcgcgtactcatgtcacttccacactttatatttgctgggcagcacaagccggactttatcacttctatggagtgcctaagtatccgctggataaaaagatgttcggtatttttgaacaccatatcaatgtgcagggattgcctatcttccgtgggttcgatgatgtgttttttgtgcctcacagccgtcacaccgaagtgcgtcgggaagatatcctgaaggtgaaagacctcaccttgctgtccgagtcggatgattcgggtgtttacatggcaatggcacgtaacggacgtgagttctttatcaccggacattccgaatattcgccttatacactcgatacggagtataaacgcgatttgggaaaagggcttcccattgaaatgccgaagaactattatcgagaagacaatgcggacaatgcgccattggtgcgctggcgcggacatgccaacttgttgttctccaattggctgaactattatgtgtatcaggaaactccgtttgatataactcagatacgatgattaaacaacgaaagatagaattgctggctcctgccaagaatctggagtgcggcatggcggctgtcgaccatggagccgatgcggtttatatcggtgctccccgttttggtgcacgtgcggcggccggaaattctttggaagacatagcggcattggtgcaatacgctcatttgtataatgtgcgcatttatgtaactgtcaataccatccttcgcgatgaagagttgaaggatacggaggaaatgatatgggagttgtatcgtgccggggtggatgcactgattgtgcaggacatgggactgttggaattgaatctgccgcccattcctcttcatgccagtacgcagatggataaccgtactcccgaaaaggcaaagtttctggcagaggcgggatttcgtcagattgtgctggcgcgtgaactttcattgcctgagattggcaagatacatgaggcaattcccgaagtgccgcttgaagtgtttgtgcacggagcactatgcgtcagttatagcggacagtgttatgtcagccagtcgtgtttcgggcgcagtgccaaccggggggaatgtgcacagttctgccgcttggcgttcgacttggtggatgcggacggaaaggtgattgtgcgcaacaaacatttgctttcactgaaagaccttaatcagagtgaagaactcgaacaactgctggatgcaggtgcttcttctctgaagatagaagggcgtttgaaggatatttcgtatgtgaagaatgtgacggcttattatcgcaagaagctggatgctgtctttaaacgccgtactgaatatatccgtgcttcgtcgggaacggtgaaaacggactttaagccgcagttggacaagagtttcagccgtgggtttaccaattatttcctgtttgaacgcaacaaggatatcttttcttttgatactccgaaatcgctgggcgaagagatgggcacggtaaaggaaatccgtggaaactatctgaccgtagcgggagtgaaatcgttcaacaacggtgatggggtgtgctatctggatgaaaacggaaagttgcagggatttcgcatcaacagggtggagaacaacaagctctttccgcaggagatgcctcgtatcaagcctcgcacgctgctttaccgtaactttgaccaggagtttgacagacagatgcaacgcaagtctgccgagcgcaagttgtcggttgccttggtattggcagagaataatttcggctttacgctgacattgacggatgaagatgataacagtgtcagtgtggtattggagcgtggaaaggaactggcacgtactccgcagaccgataatcttcgtactcagttgggcaaattgggaaatacgcctttcgaaccggcgcgcattgatatcgactttagtgagaattggtttattcctgcttctgccattgccgaattgcgccgttcgggagtggagaagttgctggaagtccgtcgtatcaattatcgccgtgaactgtacaaactgctggagacgcatcattcttttccggcaaccgagcttacttatctgggcaatgtgatgaatgaccgggcctattctttttatcagaatcatggagtgcagcgcattgctcccgcttttgagaaagtttcggcagacaatgcggtgttgatgttctgcaaacactgtttgcgatatagtatgggatggtgccccacttatcataaagtgcgttctccttataaggaaccttactatttggtcagtgcggacggaaaacgttttcgtctggagtttgattgcaagcattgtcaaatgaaagtgctttctgcttcggatgagccgaaactatcttcttctcattatcaagcatgactatgagcatcttccaccataaaccgaatcagaagaaagtgggcttcaagcttagcctgcttcttttgccggtgcttttttcttttctcttttcttgccggtatcaggttcctgaatcttcattaaaagctgtttcgcagaagacaaaagattctgtggactatttgccggagcattattatactttgaatagtaatttcgaagttacttcggattccttgttgttgcagcaattgccgttgatagatgtgctgccggtttataaaggagaaaagctggtggtggcggagtttatggttcaggctgccgatacggtggactcggtttgggtaaaggtggctcgtgaccaagagacaatgggatgggttcgtgagaaggaattactcaagaaagtggttccggttgatccgatttcacagtttattcacttgttcagcagttcccatacggtagctttttttgttattctggctttgttcggcatgggatatttgtatcgggcggtgcgtaagaagcgtttgcaactcatctggtttaatgatattgatagtatttttcccaatatactgacgttgcttatggctacagctgctactctttatagcagcattcagcatttcgtgccggatatatgggagcggttttattataacccttctcttaatcctctggatttaccgtttattctttcgttgttcatgtttaatgtctggggcattgttctggtcgggctggcaacgttggacgatttatttcatcaggtccgtgtagaggcggctttcttttatttattgggattgatgtcttgttgcatctttctatacttattttttacgtttaccgcttattattacattggatatccttgtctggtgctttatgccgtatgggtattcagaagcatcaaacgtacttctcattataagttcagttgcggaaattgtggtgcaaaaatgaaatcgaaaggtacctgtccccattgtggcgctatcaatgaatgagataacaccttccggtaaatggatacactttaccggaaggtggacttttatctttttgctgttgaaaactttttagaagtgatagcgcacgtctacaccgaactgtaatggtttgcttctttgttcaaagcctctcgccatactttcaaaatagaatgtggtataatctttattggtgaggttgcgtccccaaaagtctatttgcaaagcttttgcctgtaaagagatacgtccgttcaaggtgccgtagaagctttgtgatacatcgttcttttctgtccagtaaatttttccggcaccggtatagttgaggccgacagtcaggctctgtgcccaattgttttcattaaagaagaaactgtaattgacacctgcgttcatggtatggcgtggaacgaacggaacgtaatgaccgctataatcaatgttttcgtctgacgagctctttccggcatcatacttcttgaaggtagagtgagtatatccgtagcttccgttcaaactgagatttctattgacggatgctgtcaggctgacttccgcaccatagctttcactgcttccggcattgaccatcatacgtcccaacccgctttccacgaacttggcaatctgctggtcgcgggtatccatatagaaagcggccagatcggttttcagtttaccatcgaataaactgagatgtgaaccgatttcgtagttccagctatattcgggcttgtaggttacgaggttttttatttcatcgtcgctgacagcacttcctgcacccggacgctgctttaatgcactttgcaataactcggagaacatctgtatattgtaaccgccgctgcggaagccccggctgacagttgcatagatgttgttctgcttgttgaagtcatatttcaaagcgaatttaggtaacaactgcacatggtcatcatccagcttgcctgtaaactcagctgcctgttccatcggtttgcccattggttttcccgccatatacatctgaatgttcatggctgccgaagaattatagtctatcttattcttttcgtagtccagacgcaaaccaacggtagcagagaggttctcgaataataaatggttgaaggtggactgatggaaaacggctgctcccagcaccggagtgtcgaagattcccggcacgggcattgtttcgctcaatatcttcaagttgacgggcatccccgatgaggccatccctttattaatattattttccagccattgaataccttcaggttgaaaagtgacaggagcatcggtgtgcaaccattggtagaaaccgcttgcaccggttacccaaatccagcgttggttctttttgctcttgaaggtaatctcttcgctcaaggtattgatgcgttgtttttgttctatattgtagatgtcgacaggcaggaaatcctgatccagatacatacggtcggtcagattctgatagcctgtcacggcattcataatgaatttgtttccctgatattctatgttcagtcctgtattgaataatccgcgacgataaccgcagtcacggttatagctgatttttccgatatgctcttggtattcttctttgtttttgtccaaggctcctgtatagtaataaggatagccgccctcatcgctataatcataaccgaccgtaaagtctagtttcaaattgtctgaaggcagccagatagcacggattcgtccgcctccggcttccatgttatcgattttctttccgttatatgcattgcggaagaagccgtccgaaccttcataataacctcctgccgagaaagcaaagcgttcattccaacggtgataatgcgtcagtgaagcactacggtaattgcttttgctaccgtaactcaattttacatcggttccctgataggagaatggtgaacgggtatgtacttttatcagtccgcccatcgtgtttcgtccgtataatgtaccttgaggtccgcgaagaatgtcgatacgttctatatcatagaaattgaagtcgaacgcagatttgtctatataaggaatattgtctacgtataaccctactgccggggtgttgatgcgtgaaccgattccgcggatatagactgcggaagtaatttttgagccataatcgggcataaagaaattcggaactaaagcacttacatttttcagcgttgtaatctgattgatttgcatatctttctgtgaaatcaaagatactgcattgggaagctctcttagtttaccggtttctttgggtgaagcaatgactaccacttcttctatatcaatcactttggttgtatctttgggaagtgtgttaatgtcttctgcgagcgctgtcgcagacaggaaacaagtcgttgccagtaaaagtttttttttcatatttattgtttggtttgagtagtcttgtaattcatttgcaaagtaagggcaaacggatggtttgtacaatcctcatttattaggattttaaattctgtcggcttctatgtaaccgttcattacggcatagacggtgagtccggatacagacttgatgcccagtttctctgttatattcttgcggtgagagatgacagtggtcaggctgatgttcagtttatcggctatctctttattgataagccctttggtgatgagtatcagcacctcaatttcacgggcggatagttcatgctccgttttaggtgtttgtgctcccgaatactcggcatggtttcttgtctgatgaccgtacttacgcagttggaggatgtcttttatcagcgattcttcatcttgatagatgttcaacttaggtacaccggccagttggggctgactgtcaccgcctgccaatacaattgttttaggcttgcggggaagaaagaaggaagtatgttcaaagtaaatttgagcagagatgaaatagtgtgcatacatatccggtgtatcgtccaccaattcgccaaaggaatggaagatacggataacagccgtcggaatcattccttgcagaatgttctgtaaccccaggcaagtgagggtattagggtctattatagctatttcgggatggtgcatattctttatttgctgcaaagatacatatcttttagttaaaataatatgtgaatggcagaaatgttatttggagagactgaattggtataactaactctctttcttatttattagtatatcaataatataacttgaaaccttagcataccgaagtatgatatggcaataatcggctgaggttctgccggatattttctgtattagcccgtgatatgggcatacttgttttataagggtgtcaaaacattgacaatgctgttgttttgctcgtaggggggggaggtttgctcacctgaaaacagttcgctttgtgtatagttcccaaggtcgtaactgtaggggcagacagcccctacagttgatgttttttagtattgatacgtcttcttcattttgatgatgaagctaaaaacggttttgcgggacagagagtccgaagtaagctgccaccgcttcggcacatcgctcaccgtcaatgcctgcagatacgataccgcctgcatatcctgccccttctccgcaaggaaacaatccctgcaccgtgatgtgttgcaaggtctcattgtctctgacaattctcacaggcgacgaagtgcgcgtctctactccaatcagcaccgcatcgttggttaggaagccgtggctggtcttgccaaactgttggaaacctttgcttaaacggttggctatgaaaggtggcatccagaagtgaagaggagaagaaaccaaccccggactatacgaactctcgggcaaatcgtaactcagcttttttcgggtaaagtcaaccatccgttgtgccggagctgtttgccgcatgtttccctgttgccagcaggcagcttccagtgcttcctgaaagtgcatcatcgacaatacagaatccgtatcatcggcaaatcccagctcctcgttcttcattctcaattcatcgttttgcagatcttcgggacgtatctctaccaccatgcccgagttgctccatttggaaccgcgattgcttgggctcattccgttgaccacaatctgatgaggtccgctggcggctggtacgacaaatcctccgggacacatacagaaactatacacaccgcgtccgtctacctgagttacaaaactgtattcggctgccggaaggtatttaccgcgtccgtttctgttgtgatattgaatttggtctatcagcattgaaggatgctcaaggcgcacgccgactgcaattcctttggtttctatctgcactccatgactgtgcagccagcgataaacatcgcgtgccgagtgccctgtagccagtatgacaggacctttgaatatttttccggtattcgtttcgataccgataatgcgttccttttctattatcaatgaatccatgcgtgtctcgaagtgtacttctcctccacaatcgataatggtattacgcatattctcgataaccctcggcagcttgtccgttccgatgtggggatgggcgtctactaaaatcgaggaactggcgccatgctgacaaaacacgtttaatattttatctacgttgccacgtttcttgcttcgtgtgtagagtttaccgtccgagtaagcacctgctcctccttcaccaaaactgtaattactctccgggtcgactttatgttcacggctgatgcgtgcgatatccgttttgcggtcgcgcacgttctttcctctttccaccacgatgggacgcaatcccaactctatcagccgcagtgcggcaaacagtcctccgggacctgcacccaccactattacctgggggctgttctctaccttacggtattccgtgcggacgaattcttcgtcatgaggaatttcattgatatagagacgcactttcaggttgacataaatagtacgttggcgggcatcaatacttcttttcaagacacggatggaatggatggtgcggatgtccagtcctttttcacgtccgataaattgtttgagtgcttgttcactgattgcctgttcaggcaatgctcgcagttggaattcctgtatcatatcttttttatttattgtcgggcatgagtttcttgcgataatatgaattggccgtataaagggcagcagccggattgtgtccggtgacgcggtcttttgttatcaaggtagtggaataggcatctgcatatttatagaacaggctgtcatgtcccacacaaagtccgataactacattcaggtctgtatgcgcgcggttgagcaggcgcgcctgaaggatagggttgcacatggcagctccgatggtttcacattcctgagggataccaacggatgatttgggcactcccgccactttgcatatcacggaataagcttcgaatccgttggctctcagaatccgggcaaagattcgtgcttcattgattaatccgatgcaattggcaattcctattttcttgtatcccatcttgcgtgcaaaggtcatgatttcttccacgcgggtgagccggcaatagccttcaaactccacttcggcgctggctaccataacatcgtggttttgtccttcgtcatagcgttccagtgcccactccaaatcttctgtatccaaactggtcgtcaggcagaattcgggatatgtacggtctttgaacttgcagttctgtgttccgcagtccacacaacttggggtatatgaattgtctttagtcattgatgtcgattctttagttttaaaacagttttatgtatcttatccgaataaggcccggaacgcttcttccacttttctgactggaatgagttctattttcagtttcttggtatccattccctgaaggttatgcttggggataaggatacgcttgaatccgagcttttcggcttcaccgattctctgttcgatgcggttgaccggacgtatctctccactcagtcccacttcacctgccatgcaggtgtcgcgctccacctccgcatccatgttgctggacaagatggcgctgatgacagacaggtcgatggcagggtcgttgaccttcagtccgccggctatattgagaaagacatctttctgtgccagcttgaatccgacccgtttctccaacacggcaagaagcatgttcattcttctcagatcaaagcctgtggcggagcgttgaggattgccgtagacggcagagctgaccagtgcctgtgtttcgatgaggaacggacgaaccccttcgatggcagaggcgatggctacaccgctcattccttcatggtcttggctcagcagtaactcagaggggttgctcacttgcctcaatccgtcctgccgcatctcgtagatgcctaattcggcagtgctgccgaaacggttcttgatgctgcgcaggatgcgatacatataatgttggtcgccctcgaactgcaaaacggtgtcgacaatgtgctccagtacctttggtccggctatgcttccttccttattgatatgtccgatcaggataacgggcgtgttggtctgcttggcaaatttaaggatggaggcggaacattcgcgcacttgcaccaggcttccgggagaagactcgattgtctcggttgatatcgtttgtatggagtcgatgataaccaggtcgggttgcgtgttcttgatgtttacgtaaatctgttccaaagatgtttcgcatgctatcaggcagtccgatgagttgtgacggatgcggtcggcacgcagcttcagctgccgtgcgctttcttcgccggacacataaagtatcttcttttcgggtaatctcagaacagtttgtagcacgagggtggacttgccgatgcccggttccccacccagcaacaccagcgagccgggaaccagaccgccgcccaatacacggtttaactcctcgtcgtgcatatcgatgcgtggctcatcgccacccgttatttcactgaggattaccggtttgctcttgaccggttccaatccagaaagaggacgggttccggctacgggcttgcgcaccacctcttctacatacgtgttccactcaccgcaagaagggcacttgccaatccatttgggagagtcttgtccgcagttgctacatatatatacagtcttttctttcatacagcaaaggtatggaaatatttctttatttctttcccaaattctcaaatctgttttcttctttcacttcatctctctgaacaccttcccgataatactcatcggccagggcagcatacttgcggtacatcctctgtgcggtttctatttcatcaccttgggtgatgggggtgcgtgcctttccgggagtcgacacatactgaagttcccaatcacccagcgaactgtagaagtcattggcgcggaaagcttcgcggttatgcgtgagcggcaagccctgttccgaatattccgtgcctttatccagatgttcttcaagcatggcatagaacttttcccaccgtttcaggtaataaccgtctatcagtcctgcccattctttccaaccgtaatcaaagatgaaagggtctttgtctgccccccatatcgtgaacagggcagtggcatccttctcatataagtcttgttcttcgggagtcgttccccaacggcgtgcctgagtgagccatctgtcgaagttgaattcaggacgagtgcgtaataaggtatccacatccttcaatagttccaagaagcgttggctgtggagtcggaaggccgtcttgtctttttctttaaatgcctttgccgcttgtttgtggatggcttgtcccagattggacatgatttggcgttgtatgtcgataatatcgaaacgataggggcgggaatctcccaatttgtctgcatcttgcaggagaagagcttctgcctgtatcaaatcggtcggatgataaggaatggcaaagccggcattcggtcccgactttttcacatcaagcgcggggcgtgcggcaatgatggagctgaattccgtaccgttcgtgccccgtgtgtatgccgaccggagcaaatagacagtccatgcggtctcggcattttgagagacagctccgtaacggcgacgtgcatagtctgccaaccatttttccacatcaatgctgtcacggtgcaaaggcatttcaaatgcaaggtcataataaaccggattctgctcgatggactccataaagaggcccgaaccgacgatgttcggcgagcgttttgcggcggtggcgtattggttggacgccagcaaaggcaaatcgccatgtagattgatgcgtccgccaaagttgtgcagattaccggcaatggcggagtagccccaaaaggcgctgtcctttcggcacttagccccgttaaggtcgagaattaacaagtcttctttgggaacggctttcacaatcggttcgcgcaagctccatgcctgcatagcccatacagccgatgagtcgaaatccttgaatagcttgtgaatggactttccgaccgccgacaggtattcgggagtatctatcggaggagtgctttcatggaacgggtcggcggcatataccccgtgggcaccgtaaagcttcttttgctcttccaggaagtcatgcccgatgacttggaacagcgagtcggtggggtcgagctgggcaacgccggtaaaagcgcaccatgaaggctgttgctgtattttagcatggggatatttagccttcagttcgcgtggtacgtagccggagaaaccttgttgaataggttgcatgcccagttccagctcacgctgtatgatttgtttgcccagccggatgtgagagtctatccatgatttgggaagcggtccgccatagtcctgcaggttttgcatccattgccaggcggcatgcgccggtcctgcaaggaaatgccgtgcctcttcatccgtgaaacgatgtttcagcagcgtgttgtaccacacggcttccagaccgacaacagagaggggcatgttgatggagttcattgccatatagtccagctcgcgttgccatcgttcccagtcccaccatgctgccgagtaactcacggtgcaatagttcatgtaaacacgatacttgccgttgatgatgttacgggtcgtttcggcagggagaggaagcgtttgcggcaggttgagttgatcgccgaaccaggaaacatgtgcatggcaagtatattttaaatattggttataggcggtggcaagtgctaccggattgttaccccgcaataacacctttccgttctggctgcctatttcgtagacatcttttccgttttcggaatcgataagttccagttggaactggttgccatatcccggtgtgacacgttctatcaagtcatacgcggcttgtatctgcggatggttggaatggcaggcggtacatagcagtgacacgactgttgcgataagccataaagaaataaagtaatagcgtttcattttcttattttatgtgttaatgattatagatatcagaagttggtcttatatatggcacacaaaattacgataatttattcaatcagagaactttttgttttagcttttataattaaatgtatgaagaaaaagccataattgtttgtttcttcggaatatgttttttacatttggacaatctacttaaaaatcgtactataatgaaaaagacaatgttgttgatgagtactgcaatactggcgactgcctttcttgcagcttgcggaccgtcatcgaaagatgatggcaccattacaagattagagcagaatggcaatacactcacagtatgtgattttgcgaaagtaaaggatactctgaatgtgcctctgagcgagtgggtggaagattgccggttggtgaggtttgaaaataccgatacggcattgtttaaaatgtggtggccggctattaccgacaactatatcggaatccgtcaaagcggaggtgtgtttaagctgtttgaccataaaggaaaatttctgcatgacataggagcgatgggacaggggcccggtgaatatgcaggttcgttgtatagcgaattgattgatgagaaaaataaggtgatataccttgccccgtttgccggaagcactaagatattgaagtataacctggacggaacctttgtgactgactatgatttgggggaaagactcaacaaacccaaactgtctctcaaccccgatggaagtatatcgcttgttcatctctgctttcagggtatgagtgaaatgatgggagctgttattacgccggatagcactatcaccaagtatatacctgcccccggtcaggctataaatccccgtgataaaaacggtcgtttcgttggctttaataacgagatatggagctataataatgtggaaggcttcaaatacatgatgatgcctgtcgatacattatataattataatgctgctgccaacaagatggaagcgcagtttgccttgtccaatcctcctgtgggagaagacgtattcctgatttacgatgagcttcccggtaaatatcttgctacggtttggggtaaaggaactattgtggtagacaacaagaacaataattcacactatgtgaagttggttaatgactactttggcggtcttcctgcaccgatgaatttcactaacggttggttttttgctatgtatgagccggcagtgctgatggaaaacatagaaaagcgtatggctgcatccgattgtaccgacaaagacaaagaattgctgaaaggcttgcttgaatcattggatgaaaatgataacaatgtcatgtttatcggtaaactgaagaagtgatttgactattgcttggttataatagccgtctttcacaataaaaacgcttgtgaaaggcggtttttttgcttctttttgtcttatttctgctattgaaagagtaattcttactgtttctctcaaaaaaaacgagattcgtgatagattgtaagaaatagtttttatatttgcatcgttcaaacaaaaaggaaagaacggttataaaatgacaatgtactatctgcatacaaccacttttgggatggggagcatgatgacctccatgtctgcatccacaacaatgacccctcggggttaaggatagtatatagtgtttctacgtgatacacgcttacggacgtaagcaaaaacagcatttaattttattttattgtaaacagatacggcttattccgttactgaagacgtgttatatagtgtcctgaactaaataaggagatgataatgcaggggaaaag

SEQ ID NO: 6861 - DNA, 1316 bp, Unknown
  gut microbiota DNA sequence
gtattttaaaagtcaaacagatagtagaggctgccgaagagcctgtaatcgtagtggtatctgctttgggcggcatcactgacaagttaatcaatacctcacaaatggcagccaacggcgatgcagagtatgaaaaagagtatcgtgagatagtaaaccgtcacatcgaaatggtgtataccgttattccggcgggcgaaggacgcaccgtattgctggataaggtcaatgaactgttgagtgagttgaaagatatctttcaaggtatttatctgattaaggatttgtcttccaaaacttctgcaactatcgtgagctacggtgaacgtttgtcgtctattattgcggcaacgctgataaagggagcggtgtggtatgattcgcgcaacttcatcaagaccgagaaaaaacatgccaaacatattctggattcggaactgacaacttcgttggtgaaagaaacatttgatgaaattccgcaggtagcactggtgcccggttttatatctaccgacaagaacagcggagaagtgacaaacttgggacgtggcggttcggattatacggcttccatcattgccgcatctttgaatgccgccagtctggagatatggacggatgtggacggctttatgaccgccgacccgcgtgtcatcagcactgcttataccataaacgagctgagttatgtagaagctatggagctttgcaactttggtgcgaaagtggtttatccgccgactatctatccggtgtgtcacaagaatattcccattctgataaaaaacacctttaaccccgaggctcccggaaccattatcaagcaggaagtcgattcgggctcaaaagccattaaaggtatttcttctatcaatgacaccactctgattacggttacaggtttgggcatggtgggagtgatcggcgtaaacttccgcatcttcaaggcattggcgcagaatggcatcagtgtgttcatggtgtctcaggcttcttcggagaacagcacttccatcggtgtccgtaatcaggatgctgcattggcttgtgaggtgttgaatgaagaatttgcaaaagagatagaaatgggtgaaatcagtccggtggtggctgagatgaatttggccaccattgcgattgtaggcgagaatatgaagcatacacccggcattgccggaaagcttttcggaacattgggacgtaacggcatcagtgtgatagcttgtgcgcaaggtgcttcggagaccaacatttcttttgtggtagaggctaaatcgcttcgcaaatctttgaatgtcattcatgattcattcttc

SEQ ID NO: 6862 - DNA, 1150 bp, Unknown
  gut microbiota DNA sequence
aatccgttgccagcaacaaaagttgatgcaggaacgcggcttgaagttgaaggtggtgggcattgccgacgggcaccgtgcactcttcacacgtgcgggcattgaccttgcttcttatagggaagagatggaagaaaaaggaatcccgtcttctgccgctgtgctgcatgacgagattatcggcatgaatattttcaattctgtttttgtggattgtacggcaagtgccgaagtagcctctctttataaagagttcctgatgcataatatctctgtagtggctgcgaataagattgccgcttcatcggattattccatttatagcgagctgaaacaaatagcccgcagacggggggtgaagttcttgttcgagacaaatgtaggtgcggggctgccgattatcaataccatcaatgacttgataaacagtggtgataagattctgaagatagaagcggtactcagtggaactttgaactatatctttaataagatcagcgcagacgtgcctttcagccaaaccatcaagatggcacaggaagaacgttattcggagcccgacccgcgtatcgacctgagtggaaaagacgtaatccgcaagttggttatcttggcgcgcgaggccggatacaagttggaacagacagatgtggaaaaacatcttttcgtgccgagtgacttcttcgaaggacctttggaagagttctggaagaaagtcccgtcgctggatgccgattttgaggcacgtcgccggaaactggagagcgagaacaaacgttggcgcttcgttgcgaaactggaaaacggtaaaggtagtgtgtctctgcaggaagtagacagcaaacatccgttctatggattggagggcagtaataatattattctgcttactaccgaacggtataaagaatatccaatgatgatacaaggatacggtgccggtgccagtgtaactgctgccggagtatttgccgatatcatgagtatcgcaaacatttaggcttatgaaacacattattattctgggtgacggtatggccgactggccggctgaatcattgggaaataaaacattgctgcaatatgctgctacaccctatatggacaagcttgcccgtatgggacgtaccggaaggctgatgactgttgc

SEQ ID NO: 6863 - DNA, 650 bp, Unknown
  gut microbiota DNA sequence
cactgactccggaaacgtatgacagtaccatcgtgaagaacggcactttccgctttaccttgggggaaacctcacctgaagtgtccctattggtgctgaaggcctcctccgatgacctgttccccgtaacgcttcccgtggtgactgaaaagggagttgtaaaagtggtcctgggagagctggtcctcacctcggggacggatttgaacgacaggctgcaggacttcctgctggctgtcgaccggttcggtgacgagatggccgggaaaggggaaagccacgggaaaatcaaaaaggatttctccgttttgctggaatcctccattctccagaacaaggacaacgaagtgggagtctatatcttccgcagctacggctcgcgtctgtcccccgaacagaaagcacatatcgcagagcgggcgggtgaatggttccgcaagcggctggatgaaacaaataaccaattaaaacagtagtgactatgaaagtaaaggtgattattgcagctttattactggcgggtgccggtatgagcgccaacgctcagagtacggatgacaactggttcctccagggccagcttggtgcctcctattcgctggacggcacgggtatcggcaaactgatttctccggcaggacagattgctg

SEQ ID NO: 6864 - DNA, 221 bp, Unknown
  gut microbiota DNA sequence
catccggtgttacccggacttcaacctgctcaagggtagatcacttggtttcgcgtctaccactaccgactatacgccctgttcagactcgctttcgcttcggctacaggtctcatgacccttaaccttgccggcaacggtaactcgtaggttcattatgcaaaaggcacgccgtcacagcttacgctgctccgaccgcttgtaggcgcacggtttcagga

SEQ ID NO: 6865 - DNA, 230 bp, Unknown
  gut microbiota DNA sequence
gtagcgcggagcacgaggaattctgcgtgaatcagccgggaccatccggtaaggctaaatactcccgagagaccgatagtgaaccagtaccgtgagggaaaggtgaaaagcacttcgaacagaagagtgaaatagttcctgaaaccgtgcgcctacaagcggtcggagcagcgtaagctgtgacggcgtgccttttgcataatgaacctacgagttaccgttgccggcaa

SEQ ID NO: 6866 - DNA, 332 bp, Unknown
  gut microbiota DNA sequence
atatgatcggtaggggagcattccagtcagcgtcgaaggcgtaccgtgaggtattctggagcgtctggaaaagcaaatgtaggtataagtaacgataaagggggcgggaaaccccctcgccgaaagactaaggtttcctgatcaacgctaatcggatcagggtcagtcgggtcctaaggctcagccgaacggcgatgccgatggcagaaacggttaatattccgttactaccttcaggagtgacgtggagacgcagtagtgacagtgccgccatctgacggaatagatggttgaagggtgtaggagtcgatcatggcaggcaaatccaccat

SEQ ID NO: 6867 - DNA, 221 bp, Unknown
  gut microbiota DNA sequence
ggagatactttcgaaacttgcaagagctgtatcgactcaggtttctcttctgtaatgatcgacggttctcacctgccttacgaagaaaacgttgctttgactaagaaggttgttgactacgctcatcagtttgatgtaactgtagaaggtgaattgggtgtattggccggtgtggaagatgaagtttcttctgatcatcatacttatactgaccctgaaga

SEQ ID NO: 6868 - DNA, 16734 bp, Unknown
  gut microbiota DNA sequence
taaccaacggttcttatatcgcaaccttgcgtaattatgaagctattccttgcagtgaagatatgcaaccgctgatggaccgagtgaaagaaatggccaacaaatttgacgcatgcaccaatgcggtaaaagaggcccagaatcaagagttacttgatttcgttgcacgccgtctttatgaaatggctgccgtatgtatcatgtcacatcttcttatccaagatgcgacaaaagcacctgaattgttcgccaaatcggcccatgtatatgtaaactatgcagaagccgaagtagaaaaacacttcaacttcatccgcaagtttaaagcagatgatttggctgactatcgccagtaaacacgccactccgacaccataacggtgaagcgaaaaataaggattaaaagggaagaagtatcagtttcgatactttctcccttttttcgcatccctttcacaaattttgccgttcttttataatcttttccggcttccaacgtgttggtagtaagaaaaaacaaataaaagaaccttgacttatgaaagaattagaattaaccagcaatgccgcactgacagatgtggtatacgaagctgctttaaacggtagtttactgaatgtcaaactagtaaccggagctgttggcgatgacgaaatcagaggactgatacccgaagcaaaccattatcatgtcactcacccgaaaacgagtgaagaaattttgtttgaacagccattggatgcatctgataacaaggtcccggtatatggattgggggcattgattcaatcacccgcaggtagttgtcacggcacactggcaaaaggagaaagccgcacagccacagcacgtaaagtggttgctcacggaccaatgtggatatatgttgccatagctgtcggcatggataaagaaggtacggaatcacctttcatggtagtacaaagtgccggcacgtatggctcggaaaaaacgaacgaaagtgaaatgatcggttatgtagacggtcgcatacatgaaatgactgccttgctggtacgccgtgcgcgtctcgaagcattaaatctgaccgctatccgtgtaggatataaatatttattcgtcgaacccggacagattggaaaagcgaaagtaaaagaaggataataaatacctgaatacaaatgtgtcaaaacttccttcttatcgaaatcaccctcgctacaactacctgtggcgagggtgatttctagtttatgagcgtttcgacacgccctcttcttgttgtatattattccaaatcctccaccggtaactccgtttcttttctatagcccgatgaggtaaatatagcaatcaattcgcctttctcattcgttatcttcacttctacaaaaggaatgcgatggtgattaaacacctcagcagcatctgcatacacatatcctgattttgcaggacgcaagaaagtaatattagctgtcacagacagtgtaagccggcgatgactatttgccacggcagcaaatgccagatcagccagtgtaaacaaggctcctccctggcacacccctccaccgttgagatgtcgttccgtaaccaacatacgtgcacgcgcataccccggttttatttccagcagctccacaccggtgcatgaagcgaaccggtctgtcctcagaaattcttttaatgtctgcatattaacgaatcgttaccatagtcgctccaaagccatattcgcggaaagaagcatcctgactctgataattcttatacttatattttaattcttgcaagatggctttgcgcaaaacgccatcgcccttgccatgaatgaaaacaatcttctgtcctttcttgctcttgtattcctccagagtcttacggaacacatcaagctgatagttcagaatttcaccattactcatgccggcagtagagtcgagcaactcatgggcgtgaaggtctatctctacgatatcgctctgcggaactttcgcctcaggcttacgtgccggaataacatcaacagctttctttgccaaaagcgcatctttaatatcgtccgcgtttaaaaaagtctgtcgggcaggcatatcatctttcacaatatcataaattaatgatggttcttcaaagaatatgctttcgcggaacgtatggagtttataaaacttaaccgtatctatacgaagctccaccgacacggcaggctttatcataaagctcttattatctttaaaagcaagcacttgcactgccacatgctccagttcatttaaaatgctcttgtcaaactcttcgatatagaatttagtattcggctgcacagttccccaactccgcacacgccaattatgaccttcggcacaaagataagcaaatgaaagcgtatagttactgtcattgataatataagcatcaaaaccggtgctcgaaattgctttgatatcttgtggaacaaaggccaacattacattaagcacatctcctcctttacgctcggcggcacgataagtgatgggacgttcgtcttcctcttcttccattgactttttcacggtctgcacagcccctttggatttggctgcattaggcacatccttctgcgcaacaggtttgcgctttatattataatcatcagcatctattactacacattctctaacaggcatcggaatatcaaacccatcggcatcttccaccaatgcaatgtcttttccctgaaatcctgttacaataccgcctcccacttcactgagaaaacgaactttatctcctattttcatattgtttgctttttagtttgcacaaatatcggtacttttgcgcaaactacaaaaggtttattctaatatactgtagacagcttttaaattaacatgatccgcacttatcttctcttttaccctcccccattacatgacaaccttatgaaaaacattacggaatacagcacaatcaatggttatctaccacatccatagaaagcttcctgacagttacttcccgaaccgcatcccaatatttacaatccaattcaaaaaagatagatgtgtaaggcaatgtcaaagctgttttaatgacaaccacctgatagagcttgctgacactatccaactttgaaatcagttcttcgtgaggaagaaaagtcactttctcactcccatccaatactttacttaacgaatttctgtatgccgtcacaccgggacacagttcttctgtcaaggccaactgctcacgatcctgatatatatgcgcaaagacatgctccgaccgacgaatccggtccatgacaaaagcggcaacatttccaaaagtttcaggagcatataaagtgatgatacccggatcagcctgcaagggatatgccatatctgtaacaacaatccaattacgatgccccaacaaaggcagtttttcttgcaagctttccttccaatcagccaccgacgttttttccggatgcaggacattgccagcctgttcatgacaggccggcaatataagactgatacaaaccaataaaaaataccaataacgcattaatttaccattttatagtttcggactctcctgccgtaagttgctttttcttcgttttcacagtcacatccccaatacgaaggcgttcaatgcccaaagttcctctcagtacctccaatgtggcttcaccgtcagaaatccgacacattccccatgcgtacccattgctccaaaaataggttccgggagcagacgtaaactgcatttgtttatctactgccgagtagtgaaatccactcagcgcgatcacactcgcccaactagccattgaacgggcataatgatgtccgcattccggctcactgaacggattacgcttggcaccatcaaaacggtcacggatagaacggatacaagtcaatgcctcatccgtcattccttcatatatcatacccacagcagcacaatattcaaatccggtcattacctctgcaaaataggggaagggcacttccaaacgtcctttaggccacgaagccatcagaagtcctgcttcctcacccattacgtaagaacgcatattgttaaaatgacggctgaaatcggatacatagttatatttcataatgctttccatagttgtatgaatatgctttttgtctcccaaatatcccaacccgcaaatatgtgccatatactgccccactaattggtcaaccagacaccctttgcccaactggaaagccggaattttatcatctgcaccttccatattgatgaattcaaaagtttcaggatcagtaatgtgatgttcataatattcaccgttaaacaaatgttcatccatccaccgactaccctgttcaaatagcctccgacacttcttggcaaaagatttatctttcatagcccatgccatttcctcggctgcccgcaatgcccccatataccaaaatcccatttgaggattagggccaaaataattcacatccatcgtgttatgctgcgacccttccattactccatcttgatttccatcccatcccttctctgtccaagcataagagagtacttttttaacctgtccccagtttttccggagaaaagcatagtcacccgacagttgccactcccgatacatcttcatgatacatcccatctgcccatcagccgcagccgaatttccttttgcagcttccgacaaaggcaaatcagcccgaaagttcatcaacccattctctttcgtggcatagttaaactccacatcgcgcattgtctgtgccaaaccaccgaacaaaaagggagtagccatttcataattccaaacatgagtacatgacccttgacaagaaccaaaacgatccattattccttcccaacccatcaaatgaccgctaggcaaacgaaatactgtctgcgagcgcaaagtagccaagttaaacagagctgcctctttcactgtttcaggataagaactattcaaaaatgaacgaacaaacaagagagtctcttcttccaattgcttcatacggggaatcaccttctcggccacttcccatgcatcagcaaactgtcggctataataattgcctactatggtagatgaccatcctttacggttcgggaaattccaagtcagataaaaaacaaaagtttccgtagcctgaggagcaattgttttttttactgccagagaagccatcggatcttcatctgacggctgttccctttctaccataaccccatcttcgctaaaatcgtcccaaaagttcaaaatggcattattccatgaatcagcttttgaagaagtccgataacttacttgtcctgttgaagaagtcaccaaagcgattgtcccccatgccggatcctgtttgtcaactccttcggagtataaataaatacctttccgatttccactttccctgtactcattcctgttcttctcagcacctaccggaatataatctcctttccagtctgtccgaaacttactgccgtctttcccaataaaattcctcatagagccacacacggaaacctccaaaggactatccccggtatttgtaacctcataggcaagcaccgccaccggcaacccgctgtcatcagcattccccgggagcaatgggttgaatccctttatctttacagtaaccggtaattcggcatccgaaagattcacttgcccgaacgggtaagccccatcgaaagaggcctcggcaaaacggggaaagccgtgatggttaaccggacgaccttcatagtgcaaatattcatggctgtaaagaggaccttccaacaaagtcgtcacaggaatattatcctgtgacttaacataaatagaaaagaaaggagcattattaccggtagttaccgtgctatatttcttccccggaacattcattatttcccaatcacgcaactctcctcttccaccaagagatacggtacctgttcctattccgcctaaaggaagagctatctgaaataaatgctccttatcataatgcttcaacacaggccaatcagacggtttccattcctgagcagacaatgagcccgctgccaaaagagccaacaagctccatttctgtaaatgtgtaatcatatatatttaattttatctattaccaattaggattttgagttaaattaggatttttatctcttgctgactgagggatcggccacagataatgtttttgcggatcgaatgtgcgttcctgcccaaggaatttttcctgagtataatctccgatagcagtatgctcatccttattgataccatatccgggttgattcaatacaacttctgccgttttccagcgcaaaatatcaaaataacgcttatgttcaccaacaaattcatgccttctttcttccctgataatagtacgcatccgttcctgatttccaagttgactgtcgactccgggcaaaccggcacgttttctgacctgattgaccgcccatactatttctgcattatacggctcatattcgttcaaagcctctgcataaatcaacaatgtttccgcataacgatacaggctgaaattcgtccatgaagcatcaactttctccaattccaaatcgttatatttcaaatacatatatcccgttattccgccaccctcattattaatgcgttccggattattataagccggatgaggcatatacggagtataacttccatccggtctgagaatatccacccccggcaacataaatgttttcttcaagcgcgcatcccggttctcccatgggtgttccatatcatacaaagaggattcataaatagtctttccatcagtcatctcatacgaatcaaccaaatctcgtgtcgggcaaaaactagcccatcctcgacctgtcaccccaactcccgatggtgaacataacacaggcaacatatgcgtcaattcatcctccatatactgatgggcaagaataacttctttattattattgttggctgcagctttgaacaaaaaggcaaaatcattttccaaaccatataaattaaggtcaatcaccttctttgccaacgaagcagcttccttccaaagttcttttgcctcctctccctgatgaaactttttataacttgccatatccaaatacatatcagctttcaacatcaaagcggcccccttagttatacggcccacatcatctcccgaataagtttccggcaaatattctatcgccttattcacattttcaatggcatagtccagcacctcctgcttaggagaacgaggcaatgcagcctcttccaaagaaacaggtttttccttaatgagaggaatatccccaaaatgccgcgccatcctgtaatatttcaacgctaaaataaaacgtatctctccttcaaaacgctgttttttttcttcttttatttccattccctgaagtttgtccaaacaataaagaatgcgataaatatggtcgtatttccattcttcagacaaatagcctgtagccgcattatgtattccctggcaaatatatcccaaaccattctctccccacgagtttgtcatcaaagagttgtcactctcacaatctctccaaaaatccctttcacccggcaataacggatacagggcatttactcctttctctacatctgcttctgttttccaaaaagtatttgcagaagcttgttccaacggatcacggtctaaaaaatctgcacaaccagacaatgtaagcacagcaacaaataaaatataaaaacgataatgtctcatactgttattagaattgaagatttataccaaatgaaaatgttctggacaaaggataccatccgccctccggatcaaagccatcgtagccggtaatggtcgctaaattctgtcctgacaaataaagtctcagatatttaatattcaccttttccaataatgcttttgagaaagtataaccaatctgcacattttggattttcaggtaatcggcattacgcaaccaatagctattatattgagtatcattagccgtattcgttaaagtaagccggggataagtggcatccgggttattttcactccatgcatccaaatgcatagggcgtgcattctgagataaatagaaagcccatccttcataaccggatatgtatttcttcacattcaatttaccatacatattcatggaaaaatcaaagttcttatacccaaaatgcaagttcaacccataattaatcggtaatttatcattcaagataacacggtcattaccgtcaataactccattgtcatcttgatctttaaattttatgttaccgggaagaacatttccttgctcagcatgattctttatgtcttcttcactctgaaacaatccctcggcttcataaccgaaaggtaactgatactgcccgtttaaataggtcactgcatttccctcaatccatttatccgaatttcccatttccagcactttattttttgagaagctcgcattcatatctactccccatgagaaatctcctttactgtcattataagacgccagaatatccatcccttgatttctcattctcaacaaatttgaaatcggagcagaaagtccgaattcagagggaacaggaggagtatataatatattacgacgaagattattaaaataatcaacagacagtttgatacgttgatcccacattccaaaatcaattccaatattggccaattctgaaacttcccaagtaatatcaggatttatagcgacattattatatgcaccaccaaccaatttcccattaaacgaataaattttaggatcataacttaagacttgtgcagtcggataatagcctactttttccgcatctcctaatgttccccaagatcccctgatctttaattcggacaaccaggaagatgctccttccataaatttctcacgatgaatattccatccggcagaaaatgaagggaataccccccatctatgtccctctgcaaagcgagaagaaccatctgcccttaaacttgcttcaaataagtaacgtccctgatagtcgtaattaacacgtccaaaccaagactgtatagccacatcacgagttgtcgaacttccattctgcttattatcactacctacccccaatacatcaatatcatcaaacggcatattatctctggaagcccaaaatccttcctgcttgaaatattcttgggaataaccagccaaaaatttgaaatgatgtgagtctgccaacgtaagcgcataatcagaagtaaactgcaattgtgtacggtattgataagcattagaatctttcaaagaagaaacaagattttccgtctttgccacatttccctcggcatcatataaataataagtctttacacggtcttttgtcgtctggtcatgcgtataagcagatatgtttgcttttatattccaatctttcaaaggagtataagtagcactaaatatagcaagcatctctttgtgacgttcttttgaataaccggcctcattgacaccggcaatagggtttcctcccatcgaagaaccaaccccatatagtccgttagcctcataaataggagtaacaggtgatattctcgctgcctgagtttgccaaattgttgttcctccctgcggattctttatatttgtctgtgtatattgcaaattaacctgcgcagacaagttctttaacagttggaagtgtaaatcaggtttgaatatcaaacggttataatcattgttaggtaaagtaccctcctgatagtcgttcgaaagagaaaaacgataagtaatggatttctctttacccgaaacagccacatgagtattattaatcaatgtatttttacggtatatttctttataccacttattatctgcatatttcccgttcttcaaatcctgtatgccttgttcaccaaaaaaggcagctttaccgtcattaaccattgcctcatcatacaaacgcatataatcttcggcaccgacaaaatccaatttgaactgtggattctgaattcctatattggtagaaaagtcaacaaccggccgttctgaggtttgccccttctttgttgttaccaacataaccccatttgccgcacgtgacccataaatagaggcagaagcagcatccttcaaaatagagatactttctatgtcattaggattcaatgtataaagattaccgggcacaccatctatcagaataagaacaccggagcttcctccaatcgtggaagtaccgtggatatttatagtagctccggagccaaccgcaccactacccttggttactgtcataccgggaaccgaacctgccaacaactcctgaacgttggtaacagaacgcgccttcaatgccttatctgctttaatagttccgatagaacctgtcaagttaacctttctttgtgtaccatatcctactacaacaacctcctccaatgcttgtgtatcctcctttaaagtcacaaccagcatcttgccgttttgcggtttcaactgtcgggtctcataaccaatataagagatttccaaaacagcattattcattgcattcagagtaaaattaccatcaaaatcagttattgtaccattggaagtaccttgtactatcactgttgcgccaattaccggctcaccatttacatcaatcacccttcctgtcacctcaccttgctgctcacgattcagcggttgccgggctcttttaataattacttttttatcctgaatttcataactcaaaccggactgtcctttcaaaagttgttttacaacttcttctattaccgcatcttttacagaaatggaaacacgctttttcgtatccaaatcaagggatgaaaagacaaatgaatatcctgatgatttttttatttgttcgatagcttcctttactgttatattactggctttcaatgtaatatcctgagagaaagccgataaattaaagcaaagtgctactgaggctactaaaatagccttatcaaaacatctcataattcttctgatttttaaaataaataaattagaataagattataagaattaaagatttactatatttgctacttctttaactcaacaagtgtttttgaaaagaatacttgacttgatttaatcgggagggtgtggccgcatcctccttttttatatcaagcatctcctactttacacatcaaccggtagaaattatttgcttcataaatttagatttttaggttctacaatatattaataaagtatatactttccattttcgtatcggtaattcatcctgctggtagaagctatggtttcaagcacctcttcaatggtatttttatttatcataaaatcaccataaaaacgtctatcccgcagtgagtccgcaacttcaatacgcacatcataacttcgcatcagtttttttgcaatatcctctaacaactcttcatcaaaaaacagtttattatctctccaaatatttgcatactctacattcgctttcgatttaaccatttcgccagtcaatttattcagcaccatccgttcattcggttccaaataaagttcctccatcgcttttatcccattctgcagtgctacctttccttctaccaaactaatcatcacctcctcgtcattggaatagttcttaaaattgaattttgttcccaatacacggagattcacctctttggtacaaacctcaaagggtactttctcattgtgggcaacctcaaaatagccttctccttccaatgtcaacttacggtcatctacaccaaatccctgagaataagtaactttagaaccggcatttaaccaaaccaaacttccatcaggcaaatttaattttgtatgtgtacccaatgaagcttccaccactatatccgaaaagttctgttttacagtatgttttccctgataataagtggcaaaaggaactaataataccaaaagcacagcagccacacgatataacattttccaagagaaagaacgtcttgcctgcttttcttttttcgggaatatagctgcccgctgctgaaacaaagtaaaagccgcatcttcatcaaatggttcaacacttcccgatactcccgaagaaaaccaaagttctaacttattccgaacataaatacggttagcttccgattccatagtccatttctgcaactcggaaaaagaggctttatccaaattccctgataaataagatgtaatcaatccgtctatatcgttatattcttctttcatctgcatatattaagtgctgttattatataaggcaaaaaataagttttaaagggtagtcaaaatgaagttttttttcaatttcctaaaaaaacatagagaacaagtagtttcaggtacttttccatccgttgctgaagacaggataatgctttcttcatgtggtatttaaccgtgtttaccgagatattaagttctattgctatttcttcgtattttttctgttcaaaacgattctttttgaacaccgttcgacattctaaaggaagttcttcaatattccgaatcagttcactttccaattcctgctccaataaataacccaaaggatgctcatcttcgacaaaaacccgatccagaaattccatattttccggaagaaaaaatgaagaaaccaaaagttcctcccgcctccttaacgaattcagctcattcaaacaacgattacggacggcacgcataaggtatgcacgaattgaatattcaatttcaatatcgtcccggtgctcccacaaataaaaaatcacatcatccactatttcctcagccagagcagcatcagccaacatttggttcgcaaaacggcaaagcaatacataatgctgtttatatatgtatttaaaagcatcttcgtttccttgcttcaactgctctataataagtttttccatagccatcattaaagttataaacaataaaaatcagtaactctaatacggtgtttcatcagaaatataaattacatgttccatcgtagtagattatagcatttaacttaaaaatccgtattgaacttgtgaagttcattccacgggtatgggaaaattcatgcaacaatacatagcccggtaaatgaaatggttacatcatctgataacatgataaatgacatgccaaacggtgtgtacgcataatgacgcggccaaaattcctatctacaagcactctttttgttgccatatcaggcgcaaagatacatttttagacgaaaaaaaataggattttacgacttttcccgattttgcaccgcccaacaaacaaccgttcggtgaataccatcagtgccgattacagccgccactataattacttccgatttcatcaccttcgaataaatatcccgcccatcatctgaaacagggttaccccggtagatcctcttttctcataatataaggatttgagaagaattgaaaaggataaaaaatgaaaggaggatgaatcagataaaaaataattgttacctttgtcaggttcgatgagaaacatgcacgtacgagtttggttacattaaaaaataaaaaactgatatacaatgtacagagcaaacatcggtacttttgcgcaaattatgaaacgaaatcaaatggaagatacaaaacatatcaaaataagcgaatacaattacccgctgcccgatgaacggattgcaaagtttccgctggcagtacgtgaccaatccaagctgttggtataccgccacggcgaagtaagcgaagatacattcactgcgctgcctgaatatctggagcagggcgaactgatgatattcaacaatacaaaggtgattcaggcacgcctgcactttcgcaaggaaacgggagctctgattgaagtgttctgtctggagccgatacagccgaacgattatgtactgtccttccagcaaacgaaaaaatgcagctggctctgcatgattggcaatctgaagaaatggaaagaaggagcactgagccgcatggtagacgtgaaagggaaacaggtgacactgactgccacacgcggtgaatgtcgcggcacaagccattgggtagattttgaatggaatgatgacagcatcacctttgccgacctgctggaagtggtgggcgaactgcctattcctccctacctcaaccgggacacacaagaaagcgataaagaaacttatcagacggtctattccaaaataaaagggtcggtagccgcccccaccgccggactgcacttcaccgaacgcgtattgcaagcattggatgcccacggtatcgaccgcgaagaactgaccttgcatgtaggcgcaggcaccttcaagcccgtgaaaagtgaagaaatagaaggacacgaaatgcatacggaatacatatccgtcaacaaacggaccattgagaaactgattgcacacggaggacatgccattgccgtaggaaccacttcggtgagaaccttggaaagcctgtattatataggagtagctatcagccgcaatcccgatgccaaccaggaagaactgcacgtgcagcaatggatgccttacgaagagaaaaatggcatcggcactatacaggctttacagcatatactcgattatctgaaccgtcaccacatggaaacattgcacaccagtacgcaaatcatcattgctccgggctacgaatacaagatagtgaagaagatggttaccaatttccaccaaccgcaaagcacattactgctattggtttctgcttttgtgaaaggagactggcgaaagatttatgattatgccttggagcatgatttcaggttcctaagctatggcgacagttcgttgctgataccctgaagccctatcacaggcataccatcttacttccgcagcattaagcgttttcttccctaccattaaggcgttttttacagacatttactacgtcccactacggcaggacgtacgttccaccgtagcaggacgtacgtcctattgcagtgggacgtatatcctgctatagtgggacgtagtagtattcagtatagaaaggcttaatcatccgtatgaaaagccttagctatatccaagaagcggcttggaataagacactagtaaacggaaacagatttttagtcaacaagaaaagaatttgagaataatccactatttttgcatttaagtaaaagactatacgcaatatgactaagaaacgaacaatgaaaaaaacaatatgacagcagaagaattaggccagatgatatggaacgtgaaggaactccttcgcaatgtatatgacaataaggacgtggaggatgtaattcttccgttcactctcctccgccgtctggactgcgtacttgtaggttcagaaagccgtgtggcagctaacatgaagcaactggaagaacttggtcagacctcacaagaggatatcgacaatatgatgccgatgctcatggatgctgccggctacaaattctacaatacgagcggtctgtcactctctaagttgataacagttcccgccgacctgacgaataacttcaagacctatcttgaaggcttcagtccgaacatccgtgaaattctgaaaaacttcaccggtaaaggtgaaaatgcgagcctgagcgatatcttcttaaaccttgcccgaaagaatcttctgcttcaagtgactaaagcttttgtgctgaacatcgacctcagtcccgacaaagtagacaaccacatgatgggtactgtcttcgaaattgtcattcgttatgcaaaagagtctgtaggtatcggcgccggtcaattctatactcctcgcgacatcgttcgcttgatgacagagattactctgctcggtcaagaagataagatttaccaagatggtaagataatctctgtgtatgacccctgctgtggtacgggcggcatcctgacgttgaccaaagatactatagaggaaacggcgaaggagcgtagagtggatgtaaccgtcaacctgtttggtcaggaattaaacgacaaaacatacgcactctgcaagagtgatattatcatgaagggtgacgaggcaaagggtatcgctgtaggtgatacccttctcatcgatgaattccgcgatcaaaagttcaactttatgctggcgaaccctccgtacggcgtggactggaaacgtgaatacgattctgtttctgccgaagcggaagataaaaacagtcgtttcgctccgggactgcccgacaagagcgacggccagttactattcaccttgcacatgcttcataagatggatcccaaaggcagtcgcgtaggcatcctctctaatggctcaccactgtttaacggtggtgcaggttccggttggagcaatattcgcaagcacatgcttgacaatgatttacttgacgctatcattgctttgcccggcggtttgttctatggcacaggtatcgctacctatctttggatatttgataacaagaagcccgaaagccacaagaataaagtgttactgataaatgcagcaaaagacgagtacgtccagcctatgcgcaagaacctcggtatgaagaatatcttggtcagcgattatggtcgaaatgaaatatgtcgtatctatcatgcttttgagacttgcgacaatgcaaaacttatggataaggatgatttcttctacacttacattactgttgaacgccctcttcgtcttatatataaggatgtgaagacaaagtatgctgcgctcgatgaaaagaagcggagcgaagctttggcaaacatcgttgcgttgaacgatattgat

SEQ ID NO: 6869 - DNA, 1024 bp, Unknown
  gut microbiota DNA sequence
ccttctttggtgaagtgtctgaaacagctcccgaggttcatgtcataccacttgatgatagcagcgacttggtagctgacactaatttgcgtgactatgaatcgattccattcaagacggatattcaagagtattttcaaaacgaggtgcttcgctttgctcctgatgcatggatggatagagagaaagacaagataggttgcgagttccccatttcaaaactgttttatgaatatcagccgctgcgttcagtagaggatatccttgcggatattcgggctctcgaagaagatgaggaacagagcatacaatcactgattaatgattaaaagctatcatgaaaacttacgaagaatataaagtcagcggagtaaagtggctgggtaaggtgccaaaacactgggaaatatgccgtttcaaagattttataagcctacagacacagacttcactctcagaaaataaaataggcttagaaaatattgaatgtgcgacaggaaaattcatcgaaacgaattcagaatttgagggaaatggcattgcttttgacgtaggggatgttatctatgggaaattacgcccctatttaaaaaaagtgtggttatctacttttaatggcaatgctgttggagatttttttgtatttagagcaaagaatacaaactctgcttcttatataagatatgttatgctttctgatggtttcacaaaagaagccgatggctctacatttggcacaaaaatgcctcgcgtttcttcaaacttcataatgtcaatgcggtattttcttccccctcctttcgaacaacaagctattgcagactacttggatgccaagacggaaaagatggaccaaatgattgctaaggcagaaaagaaaatagaatatcttggtgaacttaaacaatcacttattactcgtgccgtgacacgaggactgaatcccaatgcaccactcaaagatagtggggtgaaatggattggcgatattccaagagattgggaaattcctcgtcttaatttt

SEQ ID NO: 6870 - DNA, 351 bp, Unknown
  gut microbiota DNA sequence
ttctgacgtaacccgtttacgtagtaaataacaaaaggccgttccgctaaagcgatttagccggacggcttttttcaaatgagaaagatgagaaaaagaacatgttttctagcgcaaatgaccgtttttctgatagtcgtcctgtcattatgtgcgtgtacttctgttcccaaaggatgcaccatagaagggacggtaaaggacaaaagctacgaggggaagcaggtttacctgcgccacgcactgactccggaaacgtatgacagtaccatcgtgaagaacggcactttccgctttaccttgggggaaacctcacctgaagtgtccctattggtgctgaaggcctcctcc

SEQ ID NO: 6871 - DNA, 491 bp, Unknown
  gut microbiota DNA sequence
tttctcttagcggtgcaaatgtgaagggactcgggaagcacggctgaaaggagaatgagggaatattctgtcattcttaactggttgattgctaatgtgttttggctaatatgtaaggatgaacggaaaagaaggaatgaccgacttggtgagggtggttccatcttcccttacataaaaacataccgagctttttaaaaaagatggtgatgtttttaagaaacatcaccatctttttggaaaacatcaaggtctttttgcctacgcatcgggctacacatacggtggcataagtctacacgtatatacgcatcaggtcacacgtatatacgtatcgagctacacgtacgtacgcatgagcctgcacgtatatatgtcatagtgtcaggctccgtcatatcctgtacccgggtttgattaatttgtcttctctcttgacaaacgctttttcatgttgtatatttgtagttcgtcaaatctaaaaaaaagtg

SEQ ID NO: 6872 - DNA, 334 bp, Unknown
  gut microbiota DNA sequence
gataaattgcccttgccgttttcagccggaagaacctgtgacttgtccacttccttcactccgtcttcatcggacacaatgtaatggtaagtgcccgccagcgcattcccgtcggtacgcgaagtccaattcagtaccaaagccacccggccctcgcggatatccactgccaggtgcacaccggggatggtccgacaaagcggcatcagtccgttgagggcggatacgaagtcacggcgcggcgttccgtcggaaggaacaggagctgacaggaatttgcttccgaagaagactgttttgagggtggcgaatacattcatgaggcacttttttt

SEQ ID NO: 6873 - DNA, 624 bp, Unknown
  gut microbiota DNA sequence
aacctatcgcaaatagagcaatataaaaataattacgcatacgttcatgcatagaaaggaagatcaaatagaacaataaaactacgcacaatccatattggaaccaagtaatgtcaaaagggataacataatacgaaaataataaagccagcaaggtaccaccaacaccaatccctccgatataccacactaccgatgcttttttgcaataactattaactaataaagcagaaaggatgactatcagcagcaacacagaaaattcaccgatggaagtacagtcatccgccatcaattcattgccaaaacggattccaactacaaaatagaccacggcgcaaatcccggcaaacaaaatagaacccggcatcccctcccggtacagcataaaaaagaaagccagataaaccaaagccgaccccgtttcccgttgcaaaataataagcagcatgggcagcaacaccatccctaccacaggcaatgaatactttaacttactcattgtaaacccgtagacattcataaatttagccaaagccagcgccgtggcaaatttagcaaattccgccggttgcaaacttacaggtccgaattttatccatgagtaagatcccttagtatcct

SEQ ID NO: 6874 - DNA, 271 bp, Unknown
  gut microbiota DNA sequence
taaccggtttgggctcttccccgttcgctcgccactactgggggaatcattattattttcttttcctgcaggtactaagatgtttcagttccctgcgttagcctccaactgagttggataatatctcttcaagatattgggttgtcccattcggaaatctccggatcaaaggttatttgcacctccccgaagcttatcgcagcttatcacgtccttcatcgcctccgagagccaaggcatccgccatgcgcccttgcttactttctttatt

SEQ ID NO: 6875 - DNA, 300 bp, Unknown
  gut microbiota DNA sequence
actgtcttcctgcggaagcatataaaatcttccgtcgtatggaaaactcatgaccgcattcccttttcttatggcatcaacagcttccagtatttgctctttcggaagcagcacatcggtatcccatataccgacaatcgctccctcagcttcctgcatcagttggttcagatatttggttctgtggaagacgggggaggcatccctcacaaaagtcttgtgtatatgttcatcgctgattttcaattcataatgcggatgttcatcggcctcaagaattcttatctccatccggatgga

SEQ ID NO: 6876 - DNA, 221 bp, Unknown
  gut microbiota DNA sequence
gcaatggccaggatgttgacctgctggtcctcggcgatgtccgtctttgccagcccgaaggaaacgtggcttttgatgcccggcacgctcttttccacctcgggacacggaaccggttcgggacacttatggctgtcgattgcgccctgcagctcgttgatcctgtcattgagcgacttcacgtatgactcgctgtaacgttcgttcctgtacgccaccgg

SEQ ID NO: 6877 - DNA, 374 bp, Unknown
  gut microbiota DNA sequence
aagatcactttctataatctcttaataccttttaattctgatttatcttttacctctttaatgctgattgcataaccaccaccgcttgctgcgtgtaagttcagtttgcttttgttggtcacaatgcctttacggatggtatatgcctgcggattatctttccagtcggcatcttttgcgtctgcatatacagttgcgatgtattttttgtccggatcaaggaaatcaaatatcagttttgaagaatgaccgttctcatctgccgtacagccgatataccagtcgttggttcctttagctttgcgggcaatggtaatatagtctcccggttcggcttccagatatttggtttcatcccagtcaatggctacatc

SEQ ID NO: 6878 - DNA, 221 bp, Unknown
  gut microbiota DNA sequence
aataatgggaattccaccggcacattaccggaagcggagggaaaaagctgcggaaacctgttccggcctctccgggacaatggaaaactcattgggaaagaatgaaatacatcaacagcaggtcatataaatcaatgaaaccaagtcctttaaaaacgataaacaaattgagtttttaaatttataaatttaaagtttttctattatgaacaaaaaatttt

SEQ ID NO: 6879 - DNA, 551 bp, Unknown
  gut microbiota DNA sequence
gtattaaggacttggtttctcataatctcctgcatggatacgggtttggagaatatgtcctctttttccaggaaaacttgttcctcaaagaaaggcagattggtgttatcgtatacaggctctatcttgtagtgctgcagctcataccggtctatcaggctggagaccgtttccaattcatcttccgtatgcaccctgaatatccacgagacggaactgttgccggcatggggcaggtttcctgccggaatatcttccgcattcattatgattgttgccggttcattgattccgtgcctgtcattgaaagccaactccgctttcatcatccattccacgcaaccggttgcctcttcatgattttccagccatgtccgcaaggtttgaagttgtgatgcggtgtagatgatgatacataaatgcttcaggctgccggaacggacctgttcccagacctcatccatcagcgcacacaatgcttccccttccagctcttcaatatctaccgttattttatacaggtaggtaaacatcttggttcccacataacc

SEQ ID NO: 6880 - DNA, 572 bp, Unknown
  gut microbiota DNA sequence
agctgaccgtccactatattgctccgttccagcatagccatatcaatgaagttgattccagcagtgaagtaggagaatgtaaacaggtctatcaccaaacattccatgtcagacttgcctttataattgacaatcttttgaatgtcatgtttggatattgctctcttggctgtctgctgattcacctttgacaacttgtaggaactgaaaggataggcggtggtctgcttggattcaatagctctgttgaacactgcacgcaaatgtctaagtcgtgtgcctatcgtatttatggcgtaatggtttgacttcatccattgctcatatttctttaaccaagcaacatcaatatcagagaatggtatgtcaagatgcttgttgaacttgataaaagatgagtaggacacttcaaacattcctgcatatctgagcctgttctcatttttaagagcttgaatatagcttagaaatccttctccaacagatacggggggcttggattggaaggtgtctgtggattggagtagggttgtagcagtaaactctacgttattgactttcttattcaagat

SEQ ID NO: 6881 - DNA, 221 bp, Unknown
  gut microbiota DNA sequence
tacgccctgttcagactcgctttcgcttcggatacgtgtgtcgtcacacttaaccttgccggcaaaggcaactcgtaggttcattatgcaaaaggcacgccgtcactcatcaacgagctccgaccgcttgtaggcgcacggtttcaggaactatttcactcttctgttcgaagtgcttttcacctttccctcacggtactggttcgctatcggtctctcgg

SEQ ID NO: 6882 - DNA, 911 bp, Unknown
  gut microbiota DNA sequence
agaactttaatgtaaaaatgttggcggagcaattgaatatgagtcagcctaccctttatagaaaaataaagcaacgtagcgaactggctgctattgatatgattcggagtgtacggatgagcaaggctgcctctctaattatggagaacagatattccattcaagaaatagccgaaatggtaggttatagcgacacccgcacactccgaaaacatttcactgagcaattcggagtgtcgccatccaagtatattgataagcctgaaatacaagggagttagccgaaacagattcccattcgttttccttggacaatcaggtcatggttttcgtctaccagctttaatttgccggctacctcattcaaagaaacagagcctatctgagctccttgcaaggaaaccattcgtccgaattgtccggaagcaatcagttctgtggcatgtcctcccattcgggtggcaaggttacggtcgtatggagtgggggagccgccacgctggatatatcccagtacagtttcacgggtctcaaatccggtttcatattctatttcttcggctatgtattcggcagcttttttgccgttgatggtttggataccttctgccacaacgacgatggagtagggttttccttttttcagtctttcgataatggtgttgccgatgttgtggatattatagggtagttccgggatgagaataacatcaccgccgcctgccatgcctgagtaaagggcaatccatccggctttatgtcccatcacttcaataaccatgacacgctggtgcgaactggcagtcgaatgcaaacggtcgatggcatcggttgcaatcgttacggcagaatcgaatccgaaagaaacatcggttccccatacatcgttatcgatggttttaggaacagat

SEQ ID NO: 6883 - DNA, 2335 bp, Unknown
  gut microbiota DNA sequence
acattaatgccggtttgtcttcggaagcggcagacagacgctttttaaatggtttttcacgtgaagttccaagaatggttcctcctaaattaagcaaacccgataacgatttttctgttaaaggttctatatcgttgtccagtaagcctcgaaatccgcttcggattccaaatacttccatgccgtagtgatttatggctgttttacaaactcctctgatagtggcgtttattccgggacagtctcctcctgatgtcaaaattcctatcttcatagcctctgatgttaagttgtaagcgtgcgtaaagataagaaaaaataaaagtaatgcagaaatctataaaaaaaataatgttataaggcttattaatacagaaaaggttaattttgcaggatataacgaattgtatattaacggaaatgaattcgaccaaactaattagtacactattcaaacccagacaggcagctacagcattgtatgccactcaagcggaagctattcaggcaaaggtctttaaacgtcttatcaaagacgctgccaatacggaatggggattggagtatagctataaagacataaagagttatcaggattatcaacgtgttcctttgcagacttatgaggaaataaagccatacgtggagcgcatgcgccggggagaaaaaaatgtgttgtggccgggtgaagttatttggtttgcaaagtcttcgggtacgacaaatgataagagcaagtttattcctgtcagcaaggaaggattgcacgatatccattatgccggcggtatggatgccgtcgcgctttatttgcagcaaaatcccgatagccgttttttttcgggaaaagggctgattttgggaggtagtcatgcttccaattataatctgaagcggagtttggtgggtgacttgtctgccattctgattgagaatgtcaatccattggtcaaccttattcgtgtgcccgaaaagaaaatcgcattgttgagtgactttgaggaaaaggtggaaaagattgcgcgtagcacgatgaacaagaatgtgaccaatctgtcgggagtgccttcgtggatgttggctgttgtcagacatatcatggaaatcaagggcacagataatctggcggaggtatggcctaatctggaagtgttctttcatggaggagtggcatttaccccttatcgcgaacaatacaagcagattatccgcagtgataaaatgcactacatggagacttacaatgccagtgaaggtttcttcggattgcaaaatgatttcgacgaccctgccatgatgctgatgattgactacggggtgttctatgaattcattccgatggaagagatagaaaacgaaaatcctcatattattcctttggcagacgtggagctgaacaagaactatgcaatggttatcagtacgtcttgcggtttgtggcgttatatgattggcgatacggtgaagttcacgagcaagtatccttataagtttgtcatcacgggccgcaccaagcatttcattaatgcttttggtgaagaactgatggtggacaatgccgaacagggactggcaaaggcgtgtgccgctaccggagcacaaatcacagactactctgctgctcctgtttttatggatgccaatgccaaatgccgtcatcagtggttgatagaatttgcagtcaagccggactctttagagaaatttagcaaggtactcgatacctctttacaagaaattaactctgattacgaagcaaaacgacataaaaaccttaccttgcagccgttggaaattattgtggcccgtcctaacctgttccatgattggttgaaagagaaaggtaagctgggaggacaacacaaagtacctaggctgagcaatacacgtgaatatatagaagaaatgctaagcttgaacaagtaaagaaatgaattggaatagacataaattacctgctttgctgatgttgatgattgtggtgtactcatgcgccagcatgggaaaccccgatggtggtccgtatgatgaagaaccgccaaagtttatccggagtactcctaaaccatttgccatcaatagtaaagagaaaaaagtaactattgaatttgatgaatttatcaagctggaaaaggctgcggagaaagtggttgtatctcctccccagttggaacagcctgaaatcaaagccagtgggaggaaagtagtggtaggactggtggattcgttaagaccgaatactacttatactattgacttcgcggatgctattgttgacaacaacgagggtaatccactaggtaattatgcctttaccttttctaccggtacgact

SEQ ID NO: 6884 - DNA, 965 bp, Unknown
  gut microbiota DNA sequence
caccattcgagcatcctcgacgagagagagcggaaaacgagactcgaactcgcgaccctaaccttggcaaggttatgctctaccaactgagctatttccgcgttttgttttaacgggtgcaaagataagccattttataataccaaccaaactttacacccatttttttattcacaatcgtaaaattccctctatttcggtcaattctgcatcagtaaaggccaaattatccaacgcatgaagattatctgccagctgttttacagaacttgcccccacaataacagaggtcatccgttcgtctttcaagacccatgccaatgccatctcagccaaagtctgcccacggcgtacagccacctcattcagccgaagtgctttttccactttatcttctgtcacttggtctactttcaaaaacccagtagcacgagccgcacgagagtgttccggaataccatgcaaatatttattggtcagcaatccttgtgccaaaggcgaaaatgcaataaagccggagccttgttcagcggccaacggcaatacctcctcctccacagcacgatcaaacatactataacgatattggctgatcaaacacggcacaccggcacttctcaatatttcataagccacctttgcctgcataggcggatactttgaaatacccacatacaatgcttttccttgcttcactatatcaatcaacgcttgcatcgtttcctcaaccggggtcacgccatcataacggtgactataaaatatatcaaagtaatccaaaccggtacggcacaggctttggtcgatactggccattaaattcttacgcgaactgtttcccccataaggtccattccacatttcgtgtcctgcttttgaggaaataatcaattcatcacggtaaccttggaaatgctccttcagaattttaccgaaattaatctcagcacttcccggaacaggac

SEQ ID NO: 6885 - DNA, 366 bp, Unknown
  gut microbiota DNA sequence
aatccattgataacaaataagttaattaataaagtttagcagaataaaataggtcaagtagctgattttcattatctttaatggtatctcaccacacattaaagcaatgaacagaacagcacttgaccaatatgaggaaatcgtaaccgatgctttgaaaagttgttcagcaaagttacgcaaaagttttaaaacggcattcatccaaatcatgattttgtatatgatactgccaagaaagattaatttcacccaaatgggccgttactcggacagctcggaacaacgcttccggcagttgttcgaacgtgagtttgactggatgcagttcaatctcttccttatgcggcagcggtttggagaaag

SEQ ID NO: 6886 - DNA, 643 bp, Unknown
  gut microbiota DNA sequence
aaagccattgccatagacgcgagctacatttcaaagtcgggaaagaagactccttatatcggcaagttctggtcgggatgtgcttctcaggtgaaacggggactggaaattctcggcatcggcattatcgacattgacagtcgggactgcatgatgctgcgtgcggaacagacaccggacaaggcgtatctggaaaagcaaggcgaagattacaatcttgtggactggtatcttgacgtactccgcaaatacaaggacaagctgctccgcataacacgttatgtcgtcgcagatgcctggttctcaaaggcgaagttcgtgggtgaagcctgcctgctgggattccatgtcatcagccgcctgcgtgatgatgccgccttgtggtatgcacatgacggtgtccgcacaggcaagcggggacggccgcgtatcaaaggcgagaagattgattttgaaaacctcgaccttcagcgttgcgagattctcgacatcgaaggaggaagggcttactcagtcaaggcatattcaaaggcaatgaaacgcaacatcaaagtcgtggtccattatccggaatcgggaggacataaaatctatttctccaccgaccttgacatggcggccaaagacatcatcgaatactacc

SEQ ID NO: 6887 - DNA, 221 bp, Unknown
  gut microbiota DNA sequence
tggccgcaccatagtagaacccctcggcgggcctgctgccgcttccggcccttcccctccagccgctgacagccaggcgggcacccacataaggattgaagtacttgccggcagcaatctgtcctgccggagaaatcagtttgccgatacccgtgccgtccagcgaataggaggcaccaagctggccctggaggaaccagttgtcatccgtactctgagcg

SEQ ID NO: 6888 - DNA, 1323 bp, Unknown
  gut microbiota DNA sequence
ataaaactatggaataagagagcgatttttcacaaggtacatcattttgattcttatttgttcatgcttaccaaatataccgtttttaattatatcacaactaaaaaagtttcccggtttacaagcgaagataatgttcccgagatttctgatgaatatactccttatgataaattgatagcgaaagatttgcaattattaattgatatggtagtgaatgagatgcctcctaaaaggaaaatgatatataagttgagtcggataaaaggactttctaacgaacaaatagcagagaaactggggatacagaaaaaaacggtggagaatcatttgaatatcgctttaaatgaactgagagacgctttggctctttctattttagtttatttaatactgtcggtttaggtatatcataagatagaactgtcttttttatataaaatgtgaaaatgaataattatatacataagataatagactttttctttcatcatgaagtctctgatgagataacagaacgtgtttataatcgtatggtttttcctgtggaagataaagcaagagaagaagctgtttcacaaatttgggataaactggacgatgcttcttgctctgacgaaaaaatagagaaggctttttataatttggagacctctttagaatttaaaaaagaagaacagactatcgaatttgtacatcgggaacatataagaaatacgaaaagaataaattgggggagagtagctgctatttggactattcctttcattatggtgtgtgtttcggcttaccattattattctgcaaaggattatgtgaaggagacgttgtctgaagtgacttatatgcagcgctatgcagctatgggtacacgtgaagaagtggttcttcctgatgggagtaaggtttggcttaatgccggtactttgttgatatatccctccagtttcatatctgaatctcgcaatgtttatattgcgggagaagggttctttgaagtttcaaaagataaagagcatccttttattgtcactaccaaccatttagagttggaagtgcttggtacgacattcaatatttcggcgtatccggacaataatcagataatggctacattggaaaccggcaggttacaggtaaaggtaaataaacaaccggataaatattttctggaacccaatgaccagttgatatatactccttccacagggacagtacagcagcataaagtgaatgctgtttcccactccgattggcgtatgggagggttgttctttggcaatgtgccgtttaatgatgttcttcatactttggaacgtgtgt

SEQ ID NO: 6889 - DNA, 690 bp, Unknown
  gut microbiota DNA sequence
taaagccattgggtgtagtatttatttgaattgtctttctcatgtacgtacaccttatgtcgttaataaatctaatatgaaatgaacaagaaatttattcgagtgttggggcttggtgttggtttatttctggccggcagcctctctgttaatgcacagaaagtttccttcaatggggaacgtctttctttaaagcaagcgtttgagaaaattgaatctgtttcgaagtataagattgcttataacacttcacaactggatgtcaataagcaagttgtcttgaatcaaaagaatcaggatgtattgcaaattctgtcggatttgctaaaaggaactaattgtgtctatcaagtgaataacaattatattgttatcactctgaaagatgatgagaaggttaagaaaattaagggtactataaaagattcggccggggaacctattattggtgccaatgtaactttaaaaggagatgccactgtaggaagtattacagatatagatggtaactttgatttgtccgttccaagcaatgctactttgcaagtttcttatattggttataatactcaagatattccggtaggaaataaatctttccttaatattactctgaaagaagatacagaaacactagatgaagtggtggttgtaggttatggatctcaaaagaaagtgaatctaacaggt

SEQ ID NO: 6890 - DNA, 222 bp, Unknown
  gut microbiota DNA sequence
attcacttgatagacacaattagttccttttagcaaatccgacagaatttgcaatacatcctgattcttttgattcaagacaacttgcttattgacatccagttgtgaagtgttataagcaatcttatacttcgaaacagattcaattttctcaaacgcttgctttaaagaaagacgttccccattgaaggaaactttctgtgcattaacagagaggctgcc

SEQ ID NO: 6891 - DNA, 578 bp, Unknown
  gut microbiota DNA sequence
gtctcaaagatgctaacccacaagaacgtttccactactcaaatctacgcagatttggtcaatgtaaagaaacgagagacagccaataagatttcactgaaataaattacggctatgaaacgaggaatcataacaaacaacggacatggcatccatatttctgatggagaagtatggatgaccgtttgggagattgccgacttgttctatacaacagttggatcaatcaattcccgtttaaaagcaatattgaaagccaatgtcttaaaaaagtatgacatctgccaatgtataaagttggaaaatgggaatagtgccgatgtgtataatctcaacatgattatagccctatcctatcaaatagacactggacattctgcttcattcagaaaatggcttatcagtaaagttgcttccaaacaaaagggcatatctctctttattcctataagcgcagctaacatatataattgctaatacctttgctaaaagtccaacttggttttattctacgttggacttttcttttctattttggcacagttgacctagaataatgctaccttttggtgacaaat

SEQ ID NO: 6892 - DNA, 1241 bp, Unknown
  gut microbiota DNA sequence
tatataatctatttcttttcatttttatttcaatttaaatttagccaataccgggttgctgtcttctttcaaatcagggaaaggaggcttcgcaccttcttcaaagaacttgaaagcatctaccaacatatagagataaccgttcttgcaaaaaagagagcttatgttcatcggtatactgaaatcaatggaaggacaatatttgtctacatcattcttgaacaatttggaataggtcttagcttttccatcagcaggacagaaaccgtatccgcttttttcttcaccttgaaaataggcatacaataagccgctctttaatgcccatacatctgataattgcttcttattaagaagttcactcatagagtaattatttactcctgcccaacatattgtaagccattcatagtctgccgcgtctggagactgttttatgatatagaatggacgcaaatctttccagtttgttgtacaaaagaccgtatccacatgtaccggttttacccataataatgaatcacttataatgcccctataggccggagcagcttgaataacaatgcggggaccaattacttctcccttaatgtcaaaatggtgattctttaacctgaaaatgacagaatccgtatccaagtctcgaactgtgaaaaaatacagactgtctggattaactttagaatgttggtcataaggagcatttcttatataactataaagctcggcatttttccaaaaagcaaatatgtcttttgatacagcctctagttggtatggttcagttcctagaaaatcaccgtttaatgagaatttttgataatccattctaccataatctgtaaccaatacatagtttttatctatattaaaaatcgattttccaattttgaaggcaatctctcccgggccttgtccttttttgaagagtgatttcacatattgaccacttggagtatatttatgaataccatcactgctatccaaatacaaatttccttcattatcctcaaccggatatgtaagggctaaatcaggaatcaacggttcttccgaaaattttacatattctatgctttctacaaaatcggacaacagttgtggctcttccgaatactccgctttacttaaatcaatgatgcgtggtttgtattcctgctgtatagcgtcaggtttactccctttttgttggcacgaagccaccaataaaaagaagaaaatatagaatatgatttttgttt

SEQ ID NO: 6893 - DNA, 1522 bp, Unknown
  gut microbiota DNA sequence
tggataccccatcttcatctgtcattcttagttcaacaagtagcttttgattggtgattacaccatcatcatttttactaggttcatcatcatcactgcaagaagcaaaactcacacatacggctaataaagccattccaattaatctaaaagttctcatttctgtttgatatttaagttattaattatgttgattaaatcactggatatttatctttggttatagcgtctaagtattctgcttcttaatctaatatcaattattatagcaataacaccaaaaagcaatattggagaacagaatgtaaaaagcatttctataaaacttctaaggttatgtgttggaggataataaataataaacagaattgtatatatcacgaatatactccctgcaattatgccgaatttcaagtaatagttacaattcttcaaaatttcttcttctcgttcttcctcttttcttcgtcttttctggtctatctgaaattctcttatttcttttcgcctagtttcttgctgttgcaataagattcttttttcttgctgcctttcttctatatttctatgctctttgttctcaaaataagcggtaagttcttttagtgattttggatgaaaagaattgctttggctttcttctatcataaagacaaatctttctgttccgtcttgttttaaggcaaatataatatcatccttgaatgatggatgaagcatataaggttgttctttgaaagaaatcactaaggaattgttggcagaaatatattgccatgtagcatttataacactaccatttacagaggtaatgagagaaccgttttcttgaaagatatatagctccttatctccagaatcattaaatatcaaccaagacttattacatagaatagccttaacatccagattcttactgaatctgtgatatttgttaggaatatccaataagtaggttttcatcttgcttaaatccatgcttcctagtttccagatagaagcggataaaaataaggcgtggaaactttaacttattattctactgaggctctggactgccctaaccgtataataagcaaagtccacgcctaatgatatgataatcctatagctaggatataaaataccatagacgcggacgcttcttgctcattacccacggttatgaattgtccagattcagtagaggataactttgctaaacgccctttttactaatatgtccttccagtgtcttaacacattaagcccactgaaattgctgcaaagttaatgaaaggttttgaatagctaaagacaaaacgctgataaatgcagtttctagtgttccaaaacatatctgtagtaagtaattagctagtatcagcttcctttagttgtaacttcattgcagtataaaaattagaagtgggcatataaggcggcaatttctagaactcatacctactgttagttagaaagattatagctaatattgcagattggtacgaccattcaaaccttattggtagttccccaaaat

SEQ ID NO: 6894 - DNA, 1047 bp, Unknown
  gut microbiota DNA sequence
agccgtatcatgcctttttaaaaagacagtttccacttcatttcggaactggattgcataggactatcagaatgtgacaaaactttctatttctgtaaatagtccagaaatttcaaactttatcacattccaacagattagaaacttaaacagtcataagtatttagtagttcttcctgccttaaacctaagtatcttttagttatagttacactggaatgattaaacagttccataagtttaactaaggctagttctgaattttcactgttcatattataaacttgtctgccaaaagtctttctaagggaatggcaactaaagtttttaatctttaatttatacttctttttcacctcttttagtatcacattgattctttggatagtgaaaacagttcctttttggctcactaaaataggtgagttaattcctataggctttatctgttcataacattctttaatgtgctgcccaagttgggcatttatcctaatagttctcaccttatttgtctttttctctattactgtaaattcactggtatttaatatctgttgccagtgtaaggaaagtatatctgatattctcaaccctgtgaaacatcccaaagctataagaagtgaaattttgtaatttccatctttagccaatttccttattaaattcattgcatcagaccaaactagataatctgctgtagtgcttgaatattttaaactcataatgttctgttttatatgtaaataaataaaagtgaatgttttaccattaccaacatactagccaattagttaatgtgttgatttatagcaaaacattcactttgtatattagtgagtatttatgattgcaaataagtaaagattgcaataatcaatatcagcaaaaaaggattgataataccaattattattagtagtagaactaccaacgtaccccataatactagttttccattatcttccattctgtagtatttttaagttattgaaaaagaaaggacacctattaaatagatgccctttcagttagtttagcccaaga

SEQ ID NO: 6895 - DNA, 394 bp, Unknown
  gut microbiota DNA sequence
agaaccacttcgtggtgtgctatgacatcaggaagaaaaggaacggatacaggttccatatagccgaccccgcctcgcagaacgtcatatacaccgaacaggagatgaagcggtgctggctggtgacaaggacggaaggggaggaaaagggaacggcactcgccctggaaccggcgcccgaattctatgaacgggaagacgaaaaggagaaggacggcaggaacagcctctccttcttcttcaagtacctgttgccctataaaagacaaatcgctcacttacttctggggatgttggctgtgagcctcttgcagctgatattccctttccttacgcaatcattggtggatgtcgggattcgggacgggaacctgggctttatcacgctgattct

SEQ ID NO: 6896 - DNA, 476 bp, Unknown
  gut microbiota DNA sequence
cgttcctgtagaggataccatcaaggctccgaacaggattgcacttaaaaattttttgttcataatagaaaaactttaaatttataaatttaaaaactcaatttgtttattgtttttaaaggacttggtttcattgatttatatgacctgctgttgacgtatttcattctttcccaatgagttttacattgttccggagaggccggaacaggtttccgcagctttttccctccgcttccggtaatgtgccggtggaattcccattatcttaccgaatgcatcatagaacacacttctggaagtgaacccgcaacgcttgtcaagctcggtaatagcgcattcgttgtggtctatcaggtgcttggcgtgaaggatgcggtatttattcagtaagtgtttatagttgcatttaaagtaatgattgacgacatttgacaggtaggtagtattcgtgccggttgcaataagaggatatt

SEQ ID NO: 6897 - DNA, 524 bp, Unknown
  gut microbiota DNA sequence
agctgtatcaataaatcggaatgtgacaccttgtaaattgattgtatcctctattacgtcacgggtcgttccatggatatcactgacaatggctttttcttcattcagcaacgcattcagtaaggtagattttccggcattcgtttctccgataattgctacaggaatgccattcttgattgcgtttcctacactgaaagaatgagctagccgggcaataacttgttcgatatgggtagctagactgctcagttcgtcacgattggcgaattctagttcttcatgatcactgaaatccagttctaattccattaacgaagtgaaatgaagtaattggttacgcaggttagaaagttctttactgaatcctccgcgcatctggctcatggctaggcgatgggtggaggcagacgatgaggctatcagatcggcaacagcttcggcttggctcaagtccatttttccgtttagaaaagcacgttgggtgtattcacctggtagagcggcacgacatccattataga

SEQ ID NO: 6898 - DNA, 221 bp, Unknown
  gut microbiota DNA sequence
gaactgaaacatcttagtacctgcaggaaaagaaaataataatgattcccccagtagtggcgagcgaacggggaagagcccaaaccggttatgttacggcataaccggggcagtaggactacggcattgcatgaaaacagcagagaagaactttctggaaagaaagaccatagagcatgatagttgcgtattcgaatgttgtcgaagcatagtagtatcct

SEQ ID NO: 6899 - DNA, 244 bp, Unknown
  gut microbiota DNA sequence
ttctcgatgtcatcgtcgtaatccttacaagacacaaatgttcctgttgacgaaaccattaaggctccgaacaggattgcacttaaaaactttttgttcataatagaaaaactttaaatttataaatttaaaaaactaaaattggttatacataatttattgattctgagtgctgtgctctcatttcatatttcatataacgtttgggagaaacacccgtcacctttttaaaagcagcataaaa

SEQ ID NO: 6900 - DNA, 1852 bp, Unknown
  gut microbiota DNA sequence
gacatcatcttcagggtgagtaagctacgctctattatatcgttgtaaatagtgaactttcttgtacgatccgtccagttcaaccaataaaccaacgtgcggcaatactccagtttctcacgctctatatcaacaggtatcaccttttcattgtatgaaaggaggaaaaattcatctttctctaatataaattcctgatggtctacaataccttgcaacggcaaagaggaatacagatattgtctgtccttgttgttagaagaagaataggtttcaatataccgggaagttacattaaaaaacgcttttccacgagcatagtcgggagccggatggtaattgactttaatgcggggacgacctttaatccggcggatataacgatagacctcagccggacgataatattccttattatcatataactcataacaaggcataaagtcgactaccgcaaattcatcttgctctgacacaaaagtagtggaaagaatattggtatggggaacatacgattggatggtgtgatagtcttctgaaacttcaaaaccaaaagtcccgcctttttcacgatccagaagagctgcaaaaatagaaggtgagtcaaaatttggaaaacatagccattcaatacttcctttttcggaaatcagtgcggctgtgcagcaattaccgattacaccgtaattcaaattgtccatggttatttttttgtaatgttagtggtttattatccgttttaaaaaatctatagccgatgatagctgccctttcaaaccacttttcaaggctgctttcaccacgcttttatctgtcagccgttgtaaaaacggcaaggtgtctgtctgtacgggcagattgtaacgtgcactctcggatgctgtaccaatctttacagtcacagcagtaacaggcagggctttaaacatatcatcatccgtggtatcatctcccattgccaggataaaatcatatcgggtggcaagcaaaagcctgtttacttctgaacctttggtaaattcgggagattttatttctatcaccttattaccttgcatgatttgcaaattctgtttcaagcaaatagatatcaaggaattgaccaactgttgcgcacgtaatctgcccaaccatgcatcggtctcacgataatgccaggcaagtgccgtttctttgacttcaagatgggagcgaggagtcttgctgacaaataattttaatatagaaagtaatccggggctccattcctgcgcgtgtacattcttgtgccatacaccattctctttataaaaggccccatgttcggctgcaaaggaaataggtagtgcacccaaccatttctctaaagtaaaatggtcacgtccgctgtttattaccacatgattcaaggggtcggcagtcagtttctgcaatgtatccagcaattgcggagtaggagaggcatcttccggccttttctgaaaaggaaccagcgtcccgtcataatccaataaaatcaaacgctttttagcatgtaagtattgatgctgaatttcctgcatattctgtgatcctatcttcttaagaagcatggttttgtttttgtgtgccacttcctgccattcatttacaaaatcggcagcccatttattgacagtctgtacggatacaatagactgcatacggtgcatccgttctttctgttcttcaaacggcatttccaatgcccggcaaatggcattttctatctgctccgtatcattgggattaaccagcaaggcgtcggtcagttccacagcggcaccggccatttcacttaagaccaatacaccgggattgtcttgcttgacagcaacatactctttggcaacca

SEQ ID NO: 6901 - DNA, 709 bp, Unknown
  gut microbiota DNA sequence
tcattgtagaatatcgtccgttgatagaacctatttcctcgtcaatccgggttttcaattcggcataactgcctacatgatcacgtgaaggaactatgaccatagccagtgttaccttgccatgatattcgggatggtgttccaaaaaagaggcaaatccataaagacggtgcaaaatacctttactataatccaaacggtctaccgataggataagtttatgtttgccaaacaagagacgggttcgttctatagctttccaaacatttttttgttgtgacacattgtggtaaaggtcataatttatccccatcggaagtgcatcaacgcgcacaatgcgattgcctatccgggtttcatccaaactgaaatccatatggagtacccgttcggccgcgctgatgaaatgacgcatatagtcatgtgtatgaaatgcgataaaatcggctcctaacaatcctttcagtatttcggcacgttcaggcagaattcggaataactcataagatggaaacggaatgtgatggaaatagccgatatgcaaccggggaagctcttggcggagcatttccggaagtaacatcaactgataatcttgtacccagacccaatcatccggttccacaaggcggatgatttcccgacaaaacaaagcgttaacctcttggtaagattgccagaaactctttctatataatgtataggcaaa

SEQ ID NO: 6902 - DNA, 1089 bp, Unknown
  gut microbiota DNA sequence
aaagtgtatggcggcagcaatgtcgccggagacatctgttctatagattgtggcttggacaaggaaccttcgaacgaacagatgcttgaagcctttttgggacaggacggatatgcggccattctgcacgacccctaccgtaaagtgtattatcgttatttgttgagaggcatgccgaatgccactccgaagactccgatagatagcaaaaaccttgtggtggtgatgatggatgaacagttccgctatttgggagaaaccgagctgggcacgggcaaagagtggaattggaccaattcctttgtctctcctgaaggattgaacatagagaaaatcggaacggaggtagaagatgacgattaccttacgttcggcatatttagtgtaagggctattcaagaatagatgaacaatgaatgttaaacactttcttctattgcttgtcttttgcttttctatagcaggacacagccaaaacgtatctctcgaattagtctatctccagacagacaaggggatttacgagaccggtgaagacctttggttcaagacttacactctggacgctcagagccttgccctttccgaccgaagcaagacgctgtttgtggaaatgctcaatgccaaggacagcatcgtgtggcaggagaaataccccatcctttccggcattgccgaaggacacatctatgtggacaaagacttgaaagagggcgattaccgcatccatgcctatacccgcttttcttttctgaatgacacgttgcgtccggtctatcccaagaagatacgtgtggtaaagagcatagcctacaaaggaacgaacactccacaggaaaaagaccaacctgttgcccggctttccttcttccccgaaggtggttatctgattgacggaattcccaccaaggtggctttcaaagcactggatgccaaaggaatgccggcaaaagtggcaggccggttgctggagaatggcaaggacattgctaaattagagtccgtgcacgacggtatgggttttgtgtttatccttccgataaaaggagcttcatataaggcggtgttgtccgatggaagggagttccc

SEQ ID NO: 6903 - DNA, 20699 bp, Unknown
  gut microbiota DNA sequence
ggggttgtccgtccatttgcgtaaacagacggatgagtatctggagtttcttctttcccaaccgaaaggggcagcggcgcaggcaatcaagctggaaggcaaaatgcgcggcgggctttgctgcacggcgacaggtaccttgagcgagagattgaaaatccgaatcccattgaaagagtttccgatgcagggcattgccgagtttactttatacaatgccgatggtcagcccatggcggaacgcttggtgtatgtccatcccgaacggaaattgcacatcgagttgaacacggacagtgcgcgctactttacccgtggcaagggcaaactgaacgtaaaggtaacggacgagaagggcaatcctgtacaggcgcatttgggtttgagccttttcgatggtgcttatcagaatgagttgaatcccgaaaatatgctttcgtattgctacctttccaccgagataaagggtaatatccataacccggcgtattactttgatagcaacaacaaagaccgccaagctgctctcgacctgttgctgcttactcaaggatggcgcaggtatgtatgggaaaaggctgatacggcaatgttggcggactgtttcctttcagatgaaatcagaggaaaacagataataggaaaaaagaaacagaaagaactggcgaacggaggacaattgattcaggtttccggtccgagtaccaaaagccagtttatcattgtcgattctttgggaaggtttacagtgtcaaccgaccaaatgattgccttgaggggcggatatgtttatttgaagccgatgctggataaagatgaatataaaccctccatagttgtagaagagtctttttataaggcagacagcttacggaagtcttgtcagtctttctttgcttgtatgaatccctcgttggttgtttctgatttggcacttgattatccggtcatcagtcaggacagtagtattcttttatccgagataacagttacaggtaagaagggaagaatatttcgggataagatgatgggaaggttagatagcttagcgcaaatggaggttggtggagcatgggtttgtaattgccaaaaaaatactcctcatttaaatgattatgaacctgggtttactcaccatccggtaggctctccaaattcttcttattccggtaaaaggatgaagcctcaaaaaggagtaaagtatgaattaattagatatgagccgaaaggcagaaatggaagttggattgtgacaaagataaaatatcatacttggcaagggtatgattataccgaagaagaacttcttcgcatgaacaacctatggcgtgtaaaaggctattacggcacgcgtgagttctaccaacccgatgaactggatatacaaagcccgctaccggacgcgcggaacgtcttgctgtggaagccggatatcatcaccgatgaaaaaggagaagccgaagtggagttcttctgttcggatatcaatacaagctttgtgggcgtgatagaagggacagatggcttaggaaacttaggcacatctcagtgcgagtttagggtactaaaaccataaaaaatgataggatgacaaaattaaaaaatagatggctcttgtggatattgcctttggctttcttcgttttccgcaaatcggatgaaggacaatgggaaaacaagcaaatttcctttcctgacaatattgcatttacaaaagcaggaaagtatactttacagtacacaattagtacatagtaggttgtaatttattaaaaatcagaagtaaaagtattcagcatttcagtgctgtcttgtgctcccaatagtttctttgtaagacggatacgatagtacatttgcgttatcaaaaaacgaattatcatgaaaaagttttatctttgtctattcaaaaataggatgaaacaataaaatatcaagaaatgaagaacgcacaattattatttgctttttgtatctgcctcttttgcagtgtgataaaagcacagcaatctgaatctccaaggaagaagatcaactttaatcgtgaatggaaatatgcacacggagatgtgcggggagccgaaagaatcgggtataatgattcgggttgggaaacggtgggagtgccgcattcgttcagtattccttattttatgtcgaaagatttttatgtggggtatggatggtatcgcaagagttttaggttgtcggaagatgacttgaagaaatgtactttcattgagttcgacggtgtttttcaagaagctgaaatctatataaacggacaaaaggtgggaagccatgtcggaggatataccggcttctctgtcgatgtgactaaagctgtgaaggcaggtaataacgaaatggcagtgcgtgttaataatatatggaaacctgatgtggcaccgcgtgcgggagagcatgtcttcagtggggggatttatcgcaatgtaaggctcgtgcagaaatcgaagacttatattgattggtatggtacgtttgtcatcactcccgaactgaaggagaacaggggaaaagcgtctaccgttaaggtggctacggaggtgtgcaaccgctcaagtctgtcttcggagtataaattggtgactgaggttcggaaactgaatggggaggcggtgacttctgtcactacgaccgagtatgtcggggcaaatgacagtaagcaatttgtgcaggttacgcctgccgtaaatgaaccggagttgtggcatcctgctcatccgagtctttataagttggtgagtttgctatataagggaaatgaattgcttgactctgaagagactgtattcggttttcgttggtttgaatggacagcggacagaggattctttttgaatggagaacatcttttctttaaaggagcgaatgttcatcaagatcaggccgggtggggagatgcggtgacggaggctgccatgaggcgcgatgtgaagcaaatgaaggaggcaggttttgattttatcagagggtcgcattatccgcatgcacctgctttctctaaggcttgtgatgaaatgggtatgttattctgggcggaagctcctttttgggggattgggggattcggtcctgacgggtattggaactcgagcgcgtatcccgtctatgacaaacacagacccggatttgatgccagtgcgttacagcagttgggggagatgattcgcattcatcgcaatcatccttctattgtggcatggagtatgtgtaatgaggcttttttctcggcaccggaggctatggacggagtgagggagttattgaaaaagatggtggctttgtcgcatcagcttgacccgacacggcctgctgcaataggtggggcgcagcgtccgttgggagtgggaagaattgataagctgggagatatcggtggttataatggagatggagccactcagcctgattttctgaatccggggattccgggagtggtttccgaatatggcagtacgactgccgaccgaccgggagaatatatgccggggtggggagatttggaaaagaatgatggatggaaaggttatgagtggagaagcggacaggctatctggtgtgggtttgatcacggaagtattgccggaagtcagttgggcaagatggggatagtggactatttccgtattcccaagcgttcatggtattggtatcggaatgaatataatcatatagcacctcccgaatgggcaaagcccggtattccggctaaactgaagttggaagcggataagacaatggggattcgtattgatggtacggatgatgtacaactgacggtgacggtgctggatgcacagggaaaagaaatcagtaattctcccgaggtgacattaaagttggtagcaggtcccggtgagtttcctacggggacgtccattacttttaaacaagatagtgatatccgtatacaggatgggaaagcggctattgctttccgttcgtattatgccggaaagacccttatcgaggcttcttctccgggattggttccggcacgtgtggaactggtgtttgaaggggctcctcaatatgtgccgaatgtgactccacaggtgagagagcgtccgtatgttcgttacacttcagccaatagggaacgtccgttgcagactttcggacgtaataatccgacttttaccggcagtcagtctgaaggttatgtggctgcattggctgccgatggaaatgtggctacttggtggcaggctgcgaaaggggatgcttcgccttattggttacttgatacggaaaagggattggatttgcaacaaattactttggtttttccgcaaacagctgtttatcgattccgggtggaggtgtctgatgaccggaaagaatggagagtgatagaggatatgaaggagaaccggacgcctgtttcccgatatgagatacagacggatgccggaaaagtaaaagggcggtttgtccggattagtttcatggacaatactcaacagattccggcggcattggcggaagtgactgtcttgggatttgtgagggagtaactattgaacttatttgaattctttccacatttgggctactacgtccagatgttcaatttcttctttcaaaaatgaactgtagttgtgttcgtcggcttctatctcttcggggctgacgaacttacctccctcaaaatgaatttgattttcattatccaatggaagaatgtataataagactgttttagaggaagcacctttggatgagcttattatgtgtttaagactgaaacggggaagggtattcccatcgatgtatcggctatatttcttttcaatctctttggcatatttatctgtatctgttttacatgcatagatatagtcttccatcggaatatccagtttaccgggttcttcgctgtgggtattgcgcggaagtacgtaaatttttccgttgcagatgggggctatccgaagaaacggcattctttggtaactcgtaccgatggattttacaagaatgtagttgacggcaatggaaattatatatattaatggagggagaatatgcgttaatatgtagagaacaggataggacaggggattgaataataaataaatgatacatagtatgaataaatgaatgccgctgaagatggcgatgattcgagtggaccaacaattcaaaatggatattttataattgaaaaatgaaaatatcttgttgtaaacaattggctcgataagatagaacaaggaaaaactgaggattataatttccagtataatgggaacggtgcggtcaggaattaatgaatctccactgataagtttaatgactgagcatacaacaagcgccaacgtagcatgcaatagcactaagttggggcggtagatgggaggtttggccagtctgtataatacataaagcagaccggctaaactacaggcatataaaacgtatgcatcggaaaaaaaaatacataaaatcatgcatacaatagtaggaattaatcctgtagacatgattaaattcttatactctagtaatgatttcattctctctatctcttttatatctttataacaaataagatataaaataggtttgcggattagcctttaaatttaatatgtttttctgcatgataggaagaacgtaccagaggcgcactttctacttctttaaatcctttttttaatcctatttcacggtatatcctgaactgttcgggggtgatgtattctgccaccggatagtgtttgtgggtgggctgcaagtattggccgatggtcattattttacagccgtgagccaagaggtcgtccataacctgctctacttcttcttgtgtctcgcctaatcctaccataatgccggattttgccgtgatgccattgtcggctatttgcttgattaccttcaggctggtgtcataatcggcggcactgcgcaccagcgggcttatgcgccgaactgtctccatgttgtgcgaaatgatatcgggcttggcgtcgataacttgctgtatcagttcgctttttccctgaaagtcgggaatcagtacttcggaggtggtttcggggtttaatctttttatttcaagaatggttttagcccaatgggaagcacctaaatcatccaagtcatcgcggtctaccgaagtgatgacggcatgtgagagcttcattaattggatggattctgctacgtgggtgggttcttctgtgtcgaggggaagggggcggccggtctgtgtgttacagaatttgcacgaacgggtacagatatttccgcctatcataaatgtggctgttccttttccccagcattcacccatattgggacaacgaccactgctgcagatggtgtgcagtttgtgagaatctacaatatgttttgtttcggcatatcgtgcatttgcacctatgcttattttcagccagtcaggttttttaacgtgattcatggttatttgttttttcaggcacggtaacccgtgcctgatagatatctattatttcagattctcaataaagaagttgcttacacgggtgagcaagtggtggcgtgtattgccgccaaaaatgccatggttacggttggtgtaaacctgcatgtcaaattgcttgtcggcttgtaccaatgcttcactgtattcggcagcattccgcagatgtacattgtcatcggccgaaccgtgaatcaataacaattcgccgtgtaatttgttggcgcggttgatggctgatgaggcttcgtagccttccatgttttctttgggagtgcgcatgaagcgttctgtgtataccgagtcgtagaaacgccaatcggtaggggcggcaatggcgacgcctgccttgaatatcggagtgccttcgctcattgacatcaatgtgttgtagccaccgaaactccatccccagatgccgatgcggttgccgtctatatagggcagggtgctgaggtatttagcagtttctacttggtctttggcttcttttactcctaggttgaggtaggtacacttttcaaattcagcaccgcgtccgccggttccacgtccgtctacacataccatgatgaagcctttatctgccatgtaagcttcaaaaagtcctccgttacccatggctcctattccccagcggtcaagaacttgctgagagccgggaccgctgtattggtgcaagatgacaggatatttcttgttggtatcgaaatgggcgggtttcattatccaaccgttcaactctactccgtctgtggtcttgaatgtgaagaactctttgctcggcatattcagccccgacatctgttgcttcaacttttgattgtcaaccaaagtggtcagcacttttcctttgttgtcgttcagagtgatgacaggaggtatattggcactggagtatgtgttgacgaaatacttcatgtttttactaaagatggcactgttgctgccttcctgagttgaaagcttggtcttttttcctttggcatctatcttataaacggctgtgcggagagggctgccttcattgctggtaaaataaaaggtgttgtttgcctgatcccaacccaaaaagtcttttacctcaaaatttcctttggtgatttgtttgaccaggtttccgccagcggtgtaaagatataaatgattgtatccgtctttttcactcattacaacgaagtgctcagggtaaaaagtaatatttgagtaagcattttctttgatgtattgcggagcttcgtcacgaaccatcagcttgcagagtgtgctgcgcggattggcataataaaggtcaaagcggttctgatgacggttgagtgtcatgatagccaatgcattttcgtcattggtgaatttgatgcgtggaatgtagccgtcttcgtccaaaggcaaatctattttgcgggtcactttgctcttgatatcgaaggtgtgtaccgatacttttgaattgtcgatgccgggcatcggatatttatattcgtattctcccggataggtggcatattggtctaatgagggggatttgcctttatacagagggaaagaatacatggggactttgctctcgtcgaaacgaatataggcaatcattttgctgtctgcgctgaaatcgaatgcacggttgaagccgaattcttcttcatatacccagtcggggataccgtttaatacttcattgtattttccgtcggtggtaatctgtgattcgctgttgttgaacaggagtttgaccagatagatgttgttgttgcgtacaaaggcaatctggttgccgtcaggcgagaacaagggaacttgttgcggtcctcctgtagatagcggttccatcttattattctttacattgaagatataataattggctgtaaatgaatggcggtagatgggcttggtgtctgtttgaatcagaatcaggctttcattgggcgacatgatatagtcatcaaagtgcttgatggtgcagtcgcgggctgtttccacatcaaaaatagttgcgacttcttttcccgttttaaatgaatatttaacaagacgtttgccgtcactgctgatttgggtatagtgctcaccgtccagcattggtctgatacctctgattccttcagcacgataagtagcattggctacgtctttgatggttacttgttgcgcattcatcggcaacaggcacataagcagaataataaatatgcttaattttttcataataaataaattctttaaatgataactgaggacaaagttaagacttttgtttgaaaatgcgtatctttgtcgcgctaaaatcagttcatgtacaaagagatgctatacaatgatttatcaaccttcctgagtttgcactttcctttcaaggtgcagaagatttctattaatgcgggttttacttgtcctaaccgggatggttcgataggttatggaggctgtacttattgcaataaccagacgtttaacccggcttactgtcatacggataagtcggtagggcagcaattggaagaaggaaagcggttcttttccaggaaatatcctgatatgaaatatctggcttattttcaggcttataccaatacttatggtgaactggaagagttgaaacataagtatgaagaggcattgacggtggctgatgtggtaggattggtgataggaacacgcccggactgtatgcctgacgatttgctggactatctggaggaactgaataaacggatttttgtattgatagaatatggtatcgaaagtaccgatgacgagacattgaaacgaatcaaccgcggacatacatttgcgcaggcggaggaggctgttgtgagaacggcgcaaagaggaataccggtcggtgggcatgtgatattggggttgccgggagaggagagggaggctttgataagacaagcggaacgactttcacgtctgccacttactacgctgaaattgcatcaattgcagttgataaaaggtacgcggatggcaagtgaatatgaaaagacaccggaactttttcatttgtattccgtagatgaatatattgatttagtgattgattatatagagcatcttcgtcccgatttggtgttggaacgtttcgtctcgcaatcgccgaaagagttgctgattgctcctgactggggggtgaagaattatgaattcacagaaaaggtgaagaaaagaatgagagaaagaaatgcctggcaaggcaaatactataaaccataaagaagaaaatacaggtatggaaattaaaggaaaagtacattatgtaggagtgaatgaccgtaataagactctgttcgaaaatttgtggccgttgccttatggtgtgtcctacaactcttatctgattgatgacgagatggtggcactggttgatactgttgatgtttgctattttgaagtgtatttaaagaaaattcgtagtataatcggtgacagacctattaattatttgattattaatcacatggaacctgatcattccggttctatcagcttgattaagcagtattatcctaatatcgtaattgtaggcaacaagaagactttcgacatggtggaaggtttttatggtgtgggaggagaacgatatgtggtaggtgaaggggattttctggcattgggacatcataagttgagattctctttgattccgatggtgcattggcctgaaacaatggttacgtatgatgagacggaaggtattctgttctctggagatgcttttggctgcttcggagctttgaatggaggggtgattgatgcaaatatcaatacggatatttattgggacgaaatggtgaggtattactctaacattgtcggtaagtatggtgctccggttcaaaaagcattgcagaaattgcaaactttgaagattaatgcaatttgctctactcacggaccggtgtggacggaagaaattccccgcgtagtgcgtatctatgaccgcttgagccgctatgaagcggaagaaggagtggtgattgcctatggtacgatgtatggcaatacagcagagatggcagaagcaatagcggaagaattgagtaaacaaggtatccgtaatattgtgatgcataatgtttcgcatacaaaccattcttatattatagcagatgtgtttaagtatagaggtttgatagtgggttgtcctacttataatacccagatgtatcctgaaatggaagcgttgctgaacaaattgtctgcacgtgagataaagggacgctacatgggatggttcggttctttcacttgggcaagtgctgccgtaaagaagattactgaattcaatgataagttgaagtttgaaccggtgggaaatccgatagagatgaagcatagcatgaagtcagaaacttatgtgcaatgcaaggagctggcgaaggctatggcggatcgtctgaaagcggataggaaataaaacacttgtcaaaactaaaatggtctattaaatcatccgctggttcgggcagggtttacctgcccgaaccagcggtcacgaccttgggagtaatatgcaaagtaaactgtgtaggggcgaggttcactcgcccctactagcaaaaatgatagtctttcaatattaataattatgcttggtgtacagtaagttgcgggaaggggaaattgattccttctttgttgaaggtagcatataccgtttggttcatataaaagaatacatcccaataatcggaactctttacccatactcggactttgatgtttacactgctggcagccagttctcccagttcgatgaagggggccggagcagtcagtatgcgttggtctgctttaatgatattgcgcaatattttttccactttctcaaagtcttctccgtagtctactccgaagttccattcaatgcggcgggtatctaaattgctgtaattggtgatgacaccgctactcattgcaccattaggtacatataccattttgttgtccggggtaataaggatggtatggaaaatctggatttcttttaccgtacctgatgcaccggttgaagcatcaatataatctcccactttgtaaggtctgaatagcaggataatcaagccgcctgcaaagttttgcaagttgcccgacagtgccataccgatggcgacgccggcagatgctaacagggcagcaaatccggttaattcaatgcccagcttgccgatgacggccaatataagcatgatgagtagcaggatattgaccatgctttttaagaatgactggatgctggggtctactttacgcttttccaatatccgggcaaacaaacggtttagccaattaaccaggaacttacctactataaatatgataagtgctcccagtactcgttcgcctagagagattcccgaatcaataagtttttcaagtgcgttggttatttgaacgctggtttctgatgatgataacattaacatgataattatattttgataatttttatattaaacaattaaatggattattcgttcaaaattccttttccctgccgcacaatttctgcttcttcattggtgcagtccacaatagtagaaggctctatacctccgatgccgccatcgatgacaaggtcaacctgattgccgaacttttcttctatcaattcgggtgtggtgatgtattctatctcttctccttcttccaaaggtaaggtggtagtcagtatcggagcatcgagcaaccggcaaatctcacggatgatgttattgtccgggatacggatgcctacttctttacggtttctgaatattttgggcaaacgattgccggtatttaatataaaggtaaatggaccgggaaggtttcttttcattaatttgaaagtagaattgttcactttggcatattcgctgatattactcaaatcgtagcaaataattgatagattgttcttgcgtgggtctatatttttgaacttgcaaatactttcaatggcacgttcttttaacccgtgacagccgatggcatacatggtgtcggtgggataaataataagtcccccctcttgcagggtttcgataatccggtctaaatcctttggattattgttcttttcgtacagttttaacagcatgatattttaatctttagcatttttttcgcgtaatcgttcggcaatagcccattgcagggctgctgcttcttcttttcctgttctcatcagtgcatcgccgaacagttcatgaactttggcatgttcgggtttaatggatacggcacggtcgaaatcggcaagagccccttcgatattgtcaagtgccattcggttctttccacggttatatacggctttgaatagcatggggctgagacgtactgcttcattcaagcatacttctgcctcgtagtattctttattattgtataaagtgattccttttcgaatccatgcatctgtataagacggattgagttcgatggctttatcataattggcaatggcagcccgcgagtcatgtgcctgcgtgatacattcatttcccatgaggtaatattcgcgggcatatttctccagattcttgcgttgtacatataattgttctcgtaatcgttggttttcctttttctgccgattgataatctcgagcttcttgcggataaatcgtttgatgacgggcttttctatatcatatctggaatgaatggcgaggaagaactgctctaggaatccttcaaagtttccttggtcgaactgtttgaccgcttctacatattgcacatccgcttgtgcctgtttcaatgctttttctatggctggacggttgttgaacctttgagcaaaactgacaatttccgggcggacgaatatatcaccccgggtaatttgtttttttagttggatgccatccagagaggtgcaacggcttaaagctacgtatgcctgccctccggcaaatactcctccggtaaagtcaacgactacacggctgaaagtaagaccttggcttttgtgtatggttattgcccatgccagacgaatgggatattggatgaatacgcctaactcttcttcttctatctttttttctttgtcgttatagcgatagcgtatgttgcgccaactgtcttttttaacatcgacttcttttccatcttctgtgatgacatagagtgtttcatcttcgtctatgcctgctatggtcccgatggttccgttaacccatcgacgctcataatcatttttgataaaaataatctgtgcaccgggttttacctccaattccatttgggtgggtaagctgttttctgggaattctccttttatttcaccggtgaatatggttgagtctccgggaagttcggcaagctttttctcgttgataaaatcaacagtgtcccgccgtgtggctagtgtgatatacatatcactttcgttttcttttatttgggtattatatcgtgtgttgagcagttgcaaatcagcggctccggccgtatttgtacgaatatggtccagtacatttacaaatactttgtctgtctggcgataaactttggtcagttcgatggaaaccaactcaatttcattgaatacgcgtgccgaaaagaagtaaggagtggggtagaaacggttgatgatttctcgttcatcgtttttgagaactggttccagttggtatacatctcccactaaaagaatttgctttccaccgaagggttcacgcatattttgtgaatacacgcgcaatatcttgtcgatgaaatcaataatatctgctctcaccatagatatttcatcaataatgaccagttccacttcttttattaatttgcggtgagcggaagtatattttaagaaactatgcagtttcccgcctttcaaactgaagttcgggtcatccggcaataggggataaaagggtaacttaaagaaactgtgcagggtacttccacctgcattgatagctgctatgccggtgggagccaatacaatatgtttcttctttgttatttcgcatacatattttaagaaggtagacttgcctgtacccgcctttccggttagaaaaacggactggcgcgtatattgaatcagtttcaaggcatcttgaaattctttgttttgggtatctacctgcatgtatgtctactattaatatgatgaatggcaaagatagcggaaatcccataaaaagacataaaaaaggcggttaaaaaaaggaggttgtcaattacaatatgaagagacggacttgctctgccgtttattctgttttaaaatatacatttgctgttgtctaacatgttgtcgcatttgtcttttcagtattttattgtttgatttgtgatatcaaaataatatcaaatcaatgtactatggaaacaaaagaaaaaacttacaacggaatggtaatcaatggattttctgccatcttatttaatttggtgatgttgccggcactggctttcctgaacttttatctgctggaggaagttgtttggctggctgttccgatattgcttgtgcttattctggcatttgtattgatgttgccggggtatttttctcaagagcctaatgaagctcgtgttatggttttctttggtaagtatgaaggaactttcaagagaacaggtttttactgggtgaatccttttatgaataagaaaaagctttccttgcgggcgcgtaatctggatgttgaacctatcaaggtaaatgataagataggtaatccggttcttatcggtcttgtgttggtatggaaactgaaggatacttataaagccatgttcgagattgatgcacagacaatggctgaaaaggggaacggtcaggtgtccgtaacggtggccggacggatgaatgctttcgaagcttttgtacgtgtacagagtgatgcggcattgcgtcaagtggctggagaatatgcttatgacgataatgaacatgataaaaatgaattgactttgcgtggtggaggggaagagataaacaatcagctagaacatcaattgaatgagcgcttggcgatggcgggcatggaggtggttgaggcgcgtatcaattatttggcttatgcacccgaaattgcagcggtgatgcttcgccggcaacaggctagtgctattattactgcccgcgaaaagattgtggaaggggcggtgtcaatggttaaaatggcactggataaactttcggaagaagaaatcgttgagttggatgaagagaagaaggcggcaatggtcagcaatttattagtcgtattgtgtgcggatgagcctgcacaacctgtcatcaattcgggtacgttgaatcattaagtgtattgaggagcggaatggcaaaaaaggagactgtaaaaagctttgtgcttcgtgtggatgccgaaacaatggaggcaatcgaaaagtgggcggcagatgagttccgctccactaacgggcagcttcaatggattatagcggaggcattgcggaaaagcggaaggatgaaaaagaagagaactgttgcaaaagaaagggggataacagaataataataaaaaaatattcttatcttcatagggtatttgagggctgaaccatcttaaagatagaaagtgagattagtatttaccttttaataccttatgaagatgaaaaagcagaataaacatttggtgaaactgatactggcggtacttctttggtcggttgttattccaatgtggggacaagacgaaagtgctgcagggtatattactgtgagcggtgtagtaaaagataaacagagcaggaaagacttggagtatgtcaatgtatcagtgcctggcagtaatatcggaacggtaactaattctgatggtgcctttactttgaaattggatagtgcaaagtatattccgtatttggaaatttcgcatgtcggctatcggaatgtgcaggtgaatcttaaaccggggaatcttgacaacctgaaaattctattgactccttatactaatctattgggggaagtgattgtgtatgccaatgatccccgatatattgtagaggaggctattcgtaagatatctcttaattatagcggtaagagtaatatgctgacaggattctatcgggagactgttcagaaagggcgccgttatatcaatatttccgaagctgtgattcatacttataaaacttcttatgaaagtagggagacggctcgtgatagggtgcaggtcttgaaggggaggcgtttgcttagtcagaagcggaacgatacgctggcggtgaagttggcgggtggtcctacgttgtctgtctatgtggacattgtgaagaatcaggacgcattattggatatggagggcttggacttctatcagtttaatatggaagaacctgttcaattggataaccgcttgcaatatgtgataagttttcgtcccaaagttatattaccttatgctttgtattatggcaaactgtatgtagattatgaaaaattgtcatttacccgtgccgaattcagtctcagtatggataataaggcgaaggctgttcaggctatattagagaagaaaccttatggattgcgctttaagcctcaggaagtttcttatctggtcacttataaagagcaaaatggaaaaacctacttgaattatattcgtaatagtatccggtttaagtgtgactggaaacgtaaactgttctctacggggtatacggtgctttctgaaatggtagttactgatcgtgaagagaataatgtaacccctatctccaataaactttcatttggtcagaaagatccgttttatgataaggtttatgaatattggaatgaggacttttggggaacttataatattattgaaccgactgaatcgttggaacatgcggtgcataaattgaagaaacaatctcgataatttttactcataagttgcggtatgctgaatgaactgttcatcctgtctaagataaaggagggcgatataaaggcgttcgaagaagtctttcatcgttattattcccctctttgctggtatgctgccggtattatcggtcagatggaagtagcggaagagatagtagaggagttgttttatgtcttttggcgggagagagaaaacctgcagatcttttgctctgttaaaagctatttgtatggagcagtgcgcaatgaggttcttcaatattgtgaacatcgggaggtgaggaacaggtatcgtgaggctatgcaggcatcgggtgaatcgggcatttcttccggtcctgaagagcagatggaatataaagaattggaggagttgataaatagaacgctggaaaaactaccggaacgtagacgctgtatcttcaaaatgcatcggatggaagggaaaaagtatgccgaaatagcctctttgcttactgtttctgttaagacagtagaagctgaaatgactaaagctctaaaaacattgcgaaaagaagttgaaaaatatatcgaatgaatatgaatcgtacagaaagaaatagaatcaaaacagacagggcatggagtaaactttatcagcgtttggaagaagatcgactgattcctgcaaaagaagataagaaacttcgtatgtctcctttgtggaaatggggcgcagtggcagcagctttgctggcagcattggtttatgccggagtgcgctatttttcagaagtgaaaactcctgttttatactctttggtggtgcaacaaaataaggagacctctacgttggtgactacgctggaggatggctctattgtctatttggggggggagactttgttacaatatcccgagcattttttaccggaaaaacgtgaagtgaagttgcaggggaatgcactgtttgatgtggtggggagccgtagccgtcctttcctgattgagacggatttggtgcgtattgaagtgttgggaactgcttttaatgtgaaaagtgatgagttgaggccttttgaattgtcggtgcaaagagggagggtgaaggtaacgtttaaaaagaattgtcaggagatgtatgttcaggcgggtgaaacggttacgctcagaaaagaagggtttcatttgagcatgaacagagatgacgctcagttttcctgttatctgaaacatattcgttttaaagatgagccattggcaaatattcttcgagttatcaatttgcattcaccggagatgcaattaaaagtaactccatctcttgagcataggaagctgactgttgctttttccggggaatccccggatgtcatggctgaattgattggtatggcgatgaatctaaggtgtactcgtgaaggaaatacattcattttatcagaataattaggatgacaaaacatatctttccatatcagttatgtatttttcttttctgttggttgacttgtatgacaacagcagtgagggcggagggagatgtgttgaaccgtattgtgtatttgtcaaagagtaaaggtacggtatacgttttgcttggaatggtgtcggaacgtacagactttctgtttatttatgacagtaaggtcgtggataatgaacgtcttgtaaagatagagaaaggctctcgtacccttcgtcaggctattactgaaatagttggaatacaagatttggaacttcgtgtggttggcaatcatatcttaatcaatgctccggtgaagagagaatatccgatggaataggtcgttgatactctggctcatttcgttcttgaagggacattgcttgataaaaagaatggggtgcctattgtctatgctacggtaggagtagagggaacttctataggcagtataaccaatcaggccggtgaattccgcttgcatctggccgactctttgaggcggaaaagtctcgttttttctcatgttggctatgtggctcagaaaattgatattccattgctgactgccgggcagcattttacattgacgttggaaccaagaattttccctttacaggaagtggtaattcgtgtggtacatcctatccgacttatgcgggagatgttggagaagcgtatgataaattattctcagaaaccggtgtatttcactactttttatcgggagggggttcagtataagcagaagtttcgcagcctgacagaagctgtttttaaaatatacaaatcccctgtacagtctttgtatgctagagaacaagtgaaattactgaaaatgagtcgtatcacggatgggcttgagcaagatactttgatagccagaatgagtggggggattgatgcttgcctgcaattggatatcattaatcatttgcctgattttcttttggctgatgcgcataaagatgtatatgcttatacatctgctgatgtaacgattgtcggtgaccatttggtgaatgtaatctcattcgaacaaaaaaaagaagtcaaagaacctttgtattgcggtgagctgtatatagactcggacaatggtgctttattgcaggcgcagataaggattcatcctcgttatatgaagcaagcgacagatatggtggtacagcgtcaggcgcggaggatgaagattgttttgcaagaattgacttataccatatcttataagccgtggaatggtacttattatattaatcatgttcgtggtgaccttcatttcaaggtcaaacaaaaacgccagtggttgggcagttcatcccttcatacttggtttgagatggtgacttgtaaaatagatacggtgggagtgactcggtttcagcggaatgagcggattcctacgcggacggtttttgctgatacgcatttcaaatacgattctgatttttgggagaattttaatgttattccatgggaaaaacaattagttgaagtcatagaacaactgacttctaaaatagaaaaaatagaatatgaatagttaagtgcttttcttctttggattaagacattttattcggatgattattatgttctattgcggtaggatgtacgtttcattgcagcaggacgtatatttcattatagtaggacatataaatagtactcacaagtttccttaatttgccgtttaagagagcttagctgtagttggaggaagcttaactcttcttttgcttgcggtaaacaatttctgatagactacttttcattaatatatataataatgtgtatgctttgttttcctattgtttatgttttgttatttatgttctacaacaggtttataaatcagttagttagcataagtcggttcagaaattaataaaaaagtgtttgat

SEQ ID NO: 6904 - DNA, 363 bp, Unknown
  gut microbiota DNA sequence
tcttatctccggaaaaggtgatatggaatactgcaaaagtaaatttgcttatcattttatcattctgaacaatagtgaagaatctgttagcagcatactttatgtatgtatattcttcgcaaagttcagaatgataaaaatgaaatgatagcatttcagagtcttgatatactcttttgtatttatttatttattaatgatttccatttgttgccttacgctttcttcgtggatggcttcgaatacttttttaatgaattctgaatccatgccgcacaatgaaccttgtgcaccgcgcttgtccagaatctcattgtaacgacctgtctgtagaatggtcatatcatgttctttcttgaatgt

SEQ ID NO: 6905 - DNA, 393 bp, Unknown
  gut microbiota DNA sequence
ttaagtcagttgtgaaagtttgcggctcaaccgtaaaattgcagttgatactggtttccttgagtgcagttgaggcaggcggaattcgtggtgtagcggtgaaatgcttagatatcacgaagaaccccgattgcgaaggcagcttgctaaactgtaactgacgttcatgctcgaaagtgtgggtatcaaacaggattagataccctggtagtccacacggtaaacgatggatactcgctgttggcgatatactgtcagcggccaagcgaaagcattaagtatcccacctggggagtacgccggcaacggtgaaactcaaaggaattgacgggggcccgcacaagcggaggaacatgtggtttaattcgatgatacgcgaggaaccttacccgg

SEQ ID NO: 6906 - DNA, 420 bp, Unknown
  gut microbiota DNA sequence
cccatgaacgcctctccatcgtagaccctcaaagcggagggcagcccctatacagtcccgaccggaaacaaatccttgccgtgaacggagaaatctacaaccatcgggatgttcgtgcaaagtacgccggaaaatatgatttccaaaccggaagcgactgcgaagtcatccttgccctttaccgtgacaaaggtattcacttcctcgaagacctgaacggcatcttcgccttcgccctttatgatgaggagaaagacgatttcctcattgcccgcgaccccatcggagtcatacctttatatataggtaaggataaggacggcaaaatatactgcgccagcgagttgaaagccctcgaagggttctgtgatgaatacgaacccttccttcccggccattactattggggaaaagaaggca

SEQ ID NO: 6907 - DNA, 394 bp, Unknown
  gut microbiota DNA sequence
tacagttcttgtgacactcctattctgatgcgatatgacgccacactgactgcccataccacagagccttatttggaggtgggtgttccggtctgttatctgaatgaacggggcgataccattgtgccatacggcaagtacagatactgtcaaacagatactatcaaaaaaataggttttgtttatgagaacaagccaaaggacgctcgaataatctgcatcaatgatgcgggcaaagaacttttctatgtattcaaatatgataatggtcccgactacatacaagaagggcttttccgtataatggacgaggatggattggtaggttttgccgattcattgggtaatgtaataattgaacctcaatttaagtttgcctacccatttaaaggag

SEQ ID NO: 6908 - DNA, 979 bp, Unknown
  gut microbiota DNA sequence
agttaaattgccctagagtaaatttatatgacaaataaatatattttaagctttaagtacaagaaagacagttaccagttcattcacctttaaccatgtttaagcaaaggagagcaatattattacatttaaacaaatgaaaagtttatgaggattcttctaaatcataagacatggagaatttctcatcaagaaaatacaaaaaaatcttttttttgatttgcaccttaaataaaagtattacttttgccctcaaatttagaacaaaaagaaatcaggcttatgaatttgtttacttatacatattattcttattattacttttacttcggcaagaaagtagagtgggagtttgtatgtatgaaataacagataataaatactgaaattgaaaaagatacgttggatcccgctcctaaaatggatgcgggatttttttgtaacactataaatttaggacattaataaataaacatagaaagattatgagaattctaattttaggagccggtaaaatgggctccttctttaccgatgtattgagcttccagcacgaaaccgctgtatttgatgtagacccgaaacgccttcgtttcgtttacaacacctaccgatataccacactcgaagagattgaagaattcaagcccgaactggttatcaatgcggcaaccgtgaaatatacgctggatgcttttcaccaagtattgcccgctctccccaaggattgcatcatcagcgatattgcctcggtaaagaccggactgaaagagttttatgaccaatgcggattccgttatgtatctacccaccccatgttcggtcccacatttgccaaccttgacaaactgagcaccgaaaatgccatcatcatcagcgaaggcgaccatctgggtaaaatcttcttcaaggacttataccaaaaccttggtctgaacatctttgaatatacctttgaagagcacgatgagacagtggc

SEQ ID NO: 6909 - DNA, 1462 bp, Unknown
  gut microbiota DNA sequence
agaaggtatccgtacagaattaaatgagctgttggatatcatcaacaagaaagatgctgcggggatgcgtgcctatcttagcaagattcgagaaaagattaaataacgcatcagtataacatagaagaggatgtcaaagcttcaacaagacttttggcatcctcttttttatttcatccgtaaagatggcttatcaacatgcggcacaacacgtcaccgcccaagatgccgacaagtaccactgcccacaaatgccaccccttcaggttgcacgacactttcagagcattgaacaaccacacaagggtgagcaacagaaacggaatgcccaacaacgacagaatcacagccggcaagataaaagactgtgccaatagttcctgaggagacatactcatatccatgtttgccatcatctgcatgggaggcgtcagatagattaaagtcatgccgagcaaaggcagctctgcaaacaatacggttcccaacacatcgattgcccgaatgcgggagtgcgagaataccttgccgcccaaataaaacaacaaagcaggtatcagccacacaatcagatgctctgctgcatagcaccaccacgcaggattggacgccggaccgaaatgaagcaacccatgataatgatagccggcataataacatatcacagtagaaaccagcaatcccaacgctccccatgccaatgcccgcgcaccggcaatctgtataaacggattcaccgctttgtctatcatcttatttcccattactcattcattttagaaagtttatcaattaaatcgtccaagatatttctcaccgtaggataactgacacccatacttttcgccatgtccttcaagcttccgctcgatttgacaaaagcaagaataaactgctgctctttatccgaaagccgtaccagcacaggcagttcaaaatccccgcacacctccgtgcggcactcttcgcagaaaagcctgcccaccctcaacggtgcatcacacgcagggcattgcaacggcaaacgtttctttatttctcccatatcatttcagtttttccacaaatgtactgacagaagctatcaaagtactgttcaccggcagagaaggattcccgtaagtaagcatctgctgctgtacggtctttgattcacaatctttcagcacatggttcatcttatcaatcaaaagcagttcggcagtcgggcaaccctttttcagaaattcggcatcctccaccgatacctgaatatcatttttaccctgaacaatgaggaccggcactttgacggaagcaatcaccgtccggggattatacttgaaccaggaaatcatgtaaggctgaacagaagcccgatacaatgattgcagataagccggcacgtcactcacttccttgccgtttttcaaggactcgttaatggatgccacctccttccgcaccgcttccggattctgtt

SEQ ID NO: 6910 - DNA, 221 bp, Unknown
  gut microbiota DNA sequence
aaaattttttgttcataatagaaaaactttaaatttataaatttaaaaactcaatttgtttatcgtttttaaaggacttggtttcattgatttatatgacctgctgttgacgtatttcattctttcccaatgagttttccattgtcccggagaggccggaacaggtttccgcagctttttccctccgcttccggtaatgtgccggtggaattcccattatt

SEQ ID NO: 6911 - DNA, 221 bp, Unknown
  gut microbiota DNA sequence
gaaatcccctcacgtaccactttcaggcgttccacctgattattttgcttctgcaagtaatccgacagggccagataaacctcagctccggcttcctcatcgggatatccagctatccaagagcgtaattccttttggcaatcctcattggaaaagttctgattgaacgtgttgaacagataatccaacgctccgatgccggtcaccatccatgccgaacg

SEQ ID NO: 6912 - DNA, 608 bp, Unknown
  gut microbiota DNA sequence
gtcaatccgggtgatcaggtattggttcccaatccggggtatcctacctacacctctttaaataaaatattgggcagtgagattgtgaactacaacctgcgcgaagacaaccattggcaacccgattttgatgaactggagaagatggacttgagccgcgtcaagattatgtggaccaactatcccaatatgccgaccggagcgaacgccacgatggaactgtatgaaaagctggtaaactttgcacgccgccataatattgtgattgtaaacgacaacccatacagttttatcctgaacaagaaaccactgagtattctcaatgtgcccggagccaaagaatgctgcatcgagttcaactctatgagcaagagccacaatatgcccggctggcgtgtgggaatgctcgccaccaatgcgcagtttgtacaatggatattgaaaataaagagtaatattgactcaggaactttccgccccatgcaactggccgccgcacaagcttacaacaacagtgtggaatggcacgaagaagcgaacgtcaatgtatatagccgtcgccgccaactggcagaagagattatgaaagtactcggttgtagctttga

SEQ ID NO: 6913 - DNA, 359 bp, Unknown
  gut microbiota DNA sequence
ataaagaattaatcatgagtctatgaactgtataaaaccataaaacgcatgaagaccttcccccactacctccagttggatgcgatggactgcggccccacctgcctgcgtatgatagccagatattacggcaagaactattcgctgcagacgctccgcgaacgctccttcatcacacgcgagggggtatccatgctgggcatcagtgacgcggcggaatccatcggtttccgcacatcgggagtgcgtattaccctgaagcaactggaggaagacgtgccgcttccgtgcatcctgcactggaaccagaaccacttcgtggtgtgctatgacatcaggaagaaaaggaacggatacag

SEQ ID NO: 6914 - DNA, 27075 bp, Unknown
  gut microbiota DNA sequence
aaagtaaaacaaaactaagaaagaaaatgaatttaagaacctttatagaacgccccatcctatcggctgttatttctatttcgatagtggtagtgggtatcatcgggctgtttactttgcccgtcgaacaatatcctgatattgctccgcccaccattcaggtaagtacctcttattttggtgccagtgcggaaactcttcagaagagtgttatcgctccgttggaggaagcgattaacggtgtggaaaacatgacttatatgacttctacggcttccaatgccggcgtggtggatatcacagtgtatttcaaacaggggacagatcccgatatggcagcggtcaatgtgcagaaccgtgtatcgaaggcaaccggacagttgccggcggaagtaacgcaggtgggtgtgactacttccaagcgtcagaccagtatcttgcagatgttttccttgtacagtcccgacgattcgtatgacgagaagtttctgtccaactatatcagtatcaatctgaaaccttccatccttcgtattcagggtgtgggcgatatgatgattatgggtggcgactacagcatgcgtatttggatgaagcccgatgtgatggctcagtacaaactgattccgtcggatgtggcacaggtgctgtccgaacagaatatcgagtcggctaccggctcgtttggtgagaactcagatgagacgtatcagtataccatgaaatataaaggtcgtttgataactccagaagaatttggtgagattgtcattcgctctactgatgacggtgaggtgctgaaactgaaagatattgccgatatagagatgggtgaagaaagttacgcctttcatggtgctatgaatggacatccggggatttcatgcatgatttttcagaccgcaggttccaatgcgactgaagtaaacaaccatatcgatgcgtttttggaagaggcggcgaaagacctgccgaaaggagtggagctgacgaaagtgatgagttccaatgactttctgtacgcttctattcacgaagtagtgaagacattgttcgaagctgtcttcctggtcatcttgatagtgtatgtgttcttgcaagatatccgctctactgttattccgttggtaggtatcattgtatctttgattggtaccttcgcttttatgtcgttggccgggttcagcatcaacctgatcaccttgtttgctttggtattggtcatcggtacggtagtggatgatgccatagtcgtcgttgaggcggtgcaagctcgttttgatgtgggttatcgttcttcgtatatggcaagtattgacgcgatgaagggtatcagtaatgcagttatttcttcttcactggtatttatggccgtgtttattccggtatcgtttatgagcggtacttccggtacgttctatacccagtttggtctgactatggcggtggctgtaggtatctcagctgtcaatgcattgacattgagtccggcattgtgtgctttgttcctgaaaccgtatatcaacgaagatggtacagagaaaaacaattttgcagctcgttttcgtaaagcgttcaatgcggccttcgatgcaatgattgaaaggtataagaaaggagtattgttctttatcaaacgcaaatggatggtatggacacttcttgcggcttcggtagtactattggctttcctgatgaataccaccaaaaccagtttggtgcctgatgaagaccagggtgtggtgtttgtcaatgtcagcacggctgcaggtagttcattgaagacaaccaatgacgtgatgatgcgtattgaaaagcgtatgatggatatcccgcaggtattgcatgtgcagcgcgtagccggttacggtctgttggcggggcagggtaattcattcggtatgctgattctgaagctgaaaccttgggatgaacgtaaaggaaaagagaatgatgtgcaagcggtcatcgggcaagtatatggtcgtacggcagacatcaaagatgccagtatatttgccatttctccgggtatgattccgggttatggtatgggtaatgcattggagctgcacatgcaggataaactgggaggagatatcggtacattctttaatactactcagcaatatctgggtgcgttgaaccaacgtcctgaaattgcgatggcatactctactttcgatatccgttatccgcaatggacagtagaagtggatgcttccaaatgtaagcgtgccggtattacgccggatgcggtgttaagcactctgtcagggtattatggcggacagtacgtttccaactttaatcgtttctctaaagtgtataaggttatgattcaggcagatcctaaataccgtgtggatgaggcttcgctgaacaatatatttgtgcgtatgtctaatggcgagatggcaccgcttagtcagttcgtacatttgacacgtagttacggtgccgagtctctgagccgcttcaatatgttcaactccattgcagtgaatgcaatgcctgccgaagggtatagtacaggtgacgcgatccgtgcggtgcaggagactgctgtacaagcacttccgaaaggctttggatatgatttcggtggtattactcgtgaagagactgaccagggaggtactaccatcatcatttttggtatctgcttcctgatgatttaccttattttgagcgctctttatgaaagttttcttattccatttgcagtgttgttatctgtaccattcggtttgatgggcagtttcttgtttgccaagatgatgggactggaaaataatatttatttgcagaccggattgattatgttgattggtctgcttgccaagaccgctatcttgctgactgagtatgctaccgagcgccgtaaggcaggtatgagtctgacttctgctgccctttctgctgccaaggctcgtttgcgtcctatcctgatgacggcgttgaccatgattttcggtttatttccgttgatggtcgccagtggtgtaggagccaacggtaacagttcactgggtacgggtacggtcggtggtatggtgattggtacactggcattactgtttatcgtgccttctttgtttatcgtattccaatatttgcaggagaaggtacgtcccattcagtttcagccggcgtccgattggcagattcaggaggaatatgcagaagctgtcgaggaaagacaacatcacattgaaagcaaaaaagaagagaaaaaatgaaaaaacaaatcatcactctaaccgtcgcagcactcacactgagtagctgcggcatatatactaaatataaacctgcaaccgaggttcccataaacctgtatggggaagaggttgtagttacagatactttggataatatgggaaatctgagttggcgggaagtttttactgacccgcaactgcagattttgattgaaaagggattacagaataatacagacttgcagtctgcccaatggcgtgtaaaggaagcagaagctacattgttatctgcaaagttggcttatctgccttcgtttgcattgtctccgcaagggactgtgagtagttttgataaatccaaagcaatgcagacttataccttgccggttacagctagttgggagatcgatattttcggtcaaatccgtaatgccaagcgtcaggcaaaggcattattggagcagatccgcgattataaacaggctgtccggactcagctcatagccggtatagccaatacttattatactttgttgatgttggatgcccaatttgaaatttcggtccggacacaacattcatggaaagaaacagtagatgccacccgtgctttgatggaagcaggtatggcaaacgaagcggctgtttcgcaaatggaagctacttattatactatatgtacttcagtgcttgacttgaaagaacagataaaccaggtggaaaatagtttgtcattattgttggctgaaactcctcatactattgagagggcggacacatggaacttcccctatggaatgcaggaacgtttctcggtaggtattcctgtgcagatgctttccaatcgtccggatgtgcgtagtgcggaacgttcgctggaagcagctttttatgtgactaaccaggcacgttctgctttctatccttctattgtactgagtggtagtgccggatggacaaactctgccggaagtatgattgtcaatccggggaaattcatagcaacggctatcggttcgttgacgcaacccttatttaatagaggcacaaatattgcccggttgaagatagctaaagcccaacaggaagaagctaagctgggttttcaacagacattgctgaatgccggtagtgaagtaaatgaggctttggtaaaatatcagacagcgaaagagaaagcggcttattacgataaacaaatcatgtcgctgaataaggctttcgaaagtacttctttattgatgcaacatggaaatactacctacttggaagtactgactgcacaacagactttgctcagtgcacaattgaatcaagtagccaaccgttttgcagaaatacaaggtgtaataaacctctatcaggcattggggggaggacgtgattaatttaacatactgttatcgttaaaaagttgagaaaaagctgcctgagtagtgatactttgggcagcttttttatttatggttctacaatgacacagacagggttggaatcttcatttatcttttttaagaagtttagcttaccttctttgacagtttcagggtgttcgtctaaccattcctgaatatctcctatttccaatacagaagcgtattctccctgttgggagcttgtttccgggaagaaaggcataaaccggctcaggtcatcggtaaatccggcctcgtctttattcatgtaagttgttccggttgctttgttatatattcctgtgaaagttacgctacggctatatattccttgtatgcactggaacaggatactttgcggagtctccatcacataggagatagtgatatactcttgtgttccttcggtttctccaattttatcggccgggaaagtccatttgcctgtattgaatgtaagataaggctgcatggtatttccattgatggtatatatagtatctttcagtgcttctttgaagtgaagagcatctccgctgttccatatggtagggtgattgagtgggaagataccttttttattatctttgtacgttatgtaaatgagaccattgtagccaagcattccgaaggcttcttttccggagcctcctttgaatacactgatggatgcaatatcattgggagtaatggttgggatgttacgagagaaattgcttatggagtctgttgcttttccttcttcatttgaatatatcaatttgctttcgaatggggaagttccgattcctccaccataatggccgataatgagtgaatcggcaaaagctgcacagaatccttgtaacagacttttgggttgtatggtttctcccaagaattctccgtcttgattgtatttgaccaatttattgggttggcgatgaaaataaagaattccggtttgaggatggatgtaatatactacttcgctgtatccttccggatcacctcctttgtgccctatggtacctaaatactttcctgtttgtttgtcgaatgccagacaactaccttctgtagctaccaggattttatctttcagaagcttgatgttgtgagagtttcctattaaagatgaatcggtagtttctagtggtacataacgtatattctttcctagctgagaaacctttaactcagtgaggtgttcaaaactaccggcaatgtcgattgcatttaaattgttcgttgtttttgtgggtgtgcaggaacttagtaataaaagaagtgaagcacttaaaattgttgttttcatgatattagaaggctagaagaaagagaagttgctttatagtgaaagcaacttctctttctattatacaataaattatcgggcagcaaagaatacagaacttccggctgctactcttacagctgctacaccttgagcatcgggggtgacagtcatagaggtaccattctgcatactgacagttgccgttccgtcttcattcatttttaccagctcgaaactttgtccgtcggctaccgcattccaggtattgttgtccttgttgtaaaccaaatcaaccgatttttcttctccctttttagtgatggtgtaaccgtctgtgtttgtcttcaccaaatattcaccgttttcgccttttacttctttcacttcaccgatagaagctgtcgggttggaaccgctccaaaactcgatagagttgagtaccaaaacatctgcaagataagcgatctcgtaaacaggtacaatgtgaaaagcaacgaaaataagctcgtttacaaatttgttgctgactccttggttccaatccttcagattattccataatccaaaagaaccgatacatgatgagaacatgatgcttccacccaacatggcacaaacaaccaatgttttacttcttttcataattacataagttaagtttataaaagtcatttacccgatgataattcgggactatttgtcttgcaaagatagaacttttttatggaaatgttcttctctccttaaaaatctgtatctttgcccattcgaatatgaaaaactattaatcaaaaatcttataaaagaaatgaaagaacagattcaaaaaaaaatcaacgactctaaagcgcttcggtggggagtgttggtgctggtggctttcaccatgttatgcggttattttctgacggatgtgatgtctcccctcaaaacaatgcttgaaaaagaattattatgggatagccttgattacggcatctttacaagtgcttatggttggtttaatgtttttgctttcatgctgattattggggggattatccttgataagatgggagttcgtttcaccggaatgggagcatgtattctgatggtgttaggctgcggattaaaatattatgcaatttcaacaacttttcctgtgggtgatacattctttggtatgaaaacacaggttggtttggctgctttaggatatgctattttcggggtcggtgtggagattgccggtatcactgtctcaaaaattattgtaaaatggtttaaggggaaagaaatggcgttggctatggggatggaaatggctacagcacgtttaggcaccatgttggctttagctgttacagttcctattgctactttttttggtgtaaccgataccgagggcgttttgcatcctaatattccggctcccttgctgctttgtcttattatgctttgcattggcacgatagccttctttatttatactttctatgataagaaactggacgcttcgttggaggaagagggtatagaaccggaagagcctttccgtatgaaagatatttggctgattatcactaataagggattttggttgattgccatgctttgtgtattgttttattcagctgtattccccttcttgaaatatgctactgatctgatggtacagaaatatcatgtggaccctgaacttgctgggacaattccaagtcttttgcctttgggaactttgttcttgactccattttttggaaatatatacgaccgtattggtaaaggagctactttaatgattataggttctattctcttgatcttcgtgcataccatgtttgcattgccgatacttaatatttggtggtttgctactgttgtaatgatagtattgggtattggcttttcattggttccgtcggctatgtggccctctgtgcctaaaattattcctgaaaaacaattgggtactgcttatgctcttattttttgggtacagaattggggattgatgggtgttcctgctttgattggttatgtgctgaacaaatattgcaaggggccggttgtagatggtatgcagacttatgattatactttgcctatgtgtatttttgcttgttttggcgtggcggccttactctttgctgtttggctgaaagcagaaaataagaaaaaaggatatggattggaagaagccaatataaagaaataggcatatttcctgcttaatttcctaaaagaaactgctgcaaaggattgttgttgtcaatcgattgcagcagtttctttttcagcctgtcggtcttatgcaaaggctgcagtcaataacagaataaaaattgcttcggctgctgtagctatcataaatacctttttcacatttttcaggcttgctgtttgagtagttgtattcatactttcatctttttaagttagtaaaactaatatcttttctgttgttttgttattgcaaaaatcagaaattattctggtagtctactgttctaaatggcttttatagtgttcaaaaaatgcttgttaaacttatttatatcaactattaacaagtgtatataggaagtcgtttaggaggatggtataaagaaaaatactacctttatccataggacagtatgctgtaaatggataaaggtagtatatagagtaaattggagttatcagtctttgtctatctttacaatttttccgttattggggtcgaaaagtactcgtgtgtttatttttttattgaataagttatctactaatacttcggtggttccaaattgtgtaatgaggagttcacccttaaagtaccgtttggtggggctggcaacagtgactaatgctttgcccggaatattataaataaccccgtctacttttcttttgtcttttgccttctcgtctgccggaggtagtgtttcctgattagtgacagatagataaatgggttctcctgccaagttctcgtcacttactacacccaacttttttgaaaatcggaaagcgactttatctttcatgtcttctgtgggagttactcggatagtaagggttttgtcttcacgattggttatacccgcaaacatttgcatcatggcttgttcctgctcgtccaaattgtccagcatcagtttcagtgctgcaccgtctttgggcatataatcagcttgtccgcgggtaaggctgtttttgctttctcggatattatagatttctttagctaccagttcggccatctttgcggtggaggcagtactaagaatctcttcagtcataaaactacgtggatctatacgtttcttggctgtatttgtaatcggagtagcaggtgttttttctatcggtgaagtagtattgatagctttgataataccatcattggtcagctccacttgcgaagcggcacttttatcttttagttttactacatatgcattatccgggtcggggataccgatagctttcgctttgatactttttatttcccagtaggtttccggttgggccgagatgtttgtcatacgcagatatctgtttgcatattggcataactctcccggagtataggtcactttggtggccactacttccagttctatttcagtcttgggtaagtaataaactacaccttctcccatggttcccggagtatatttactgaaatcttgtgcagcgctactcaatgaagtcagtatacttgctgcaattattaatcctcttttcataatttccttttcttgtataggtgagggcaaatatagctattcttttgtaaatccggcttttgtttcgcttaatttcttccaagcgatgggaagtgcttctacaatatcgcttgaagtcattcctatttctcctttttgctgggcagcaatgtctcctgccaggccatgtacatagacacctagtcgggaagcatcttcttgagagtacccttgtgacaataatgagagtaggataccggtcaatacatcaccacttccggctgttgccataccgggattaccggtgggattgaaataacaatttccttccggagtaacgacggcactccaagagccttttactataatgtagctttgcaaataagcagccagttctttagtcttgactaaacgttcataggtatccatacactttccgatgaggcgttccaactcacccaaatgaggagtgagaatacaacgtttcggcagtcggcttaaccaactgcggtgagtgcttagaatattcagggcgtcggcatccaatactagcggtagcggacaattttgtatctgttccatcatagcgagggcggtatcttcttcttggcccagcccgggaccgatagctattgcttgatagcggtcaatgtcggttggctctgcaaaataacgttcatgtatatcggtatgtacaatagcttcgggtacagtggattgcattaaatcgtgattatggataggaacatgtactgtcagcaatccgataccagaacgcagacatgcacgggccgataggatagaagctcctgccatgccgtacgagcctgcaattaatagcccatgaccgaatgctcccttgtgtgcaaatcgttttcgtggtttgataaggttgcgtatttctgcttcttcagtggtgaagaaagaactttctactgttcctataaattcagtctttaaaccgatatttaataactcccattcacctacaatatcttcgttctcagggaagaaaaacgaaagtttaggcagttggatgctgagagtcacatctgcacgcatgatattttgccttatattataggtattgtcttctcccattaatcccgagggaatatcgatggctactaccggtgacttggaagcattgatatatttcactacagcggcaaatccgccgtttaatggcttgttgaggccggaaccgaataatccgtctactacgagatgcttctctgtcagtacaggcgggtcaaattttgtacttacttccgtaaagtagatagaaccgcattctttcaggcggttaagattgatttggcattcttcggataattttcctttggtattgaacaggaaaacttctacccgataattctgttgtgacagtagtcgtgctacggccaatgcatctcctccattatttccgggaccggcaaaaacaacgatatggaaagaggcgtcccaacgacgcataatggtgcgtgtcagttcatgggcagcccgttccatcaaatcgatggaagttatgggttcattggctatagtgtatttgtccagctcttttagatgggtgctcgaaataattttcatattcaatctcttttgtttgaatgtgcaaagataacactatttactaaaagaggttgtgagaaaacttcgatacttagaataaaaatgctaagtttgcaagcagtattagctgtcaatgctttaatagtagctattttagtccttatacttaaaggtcatcattctcattttaagcagagataaatatcttctttaaatatccatatatctttggttttcgacttgttttaaaaacagattattatcctctttcttagcactatttattgcctttttacaaaaaatggcaataatatgctagagttagttttcatatttgtatatttgcacctgaaatactaattgtgtttaaaaaataatcaatttattaatcttaaatttggatatgtgtaaaggcaaaaacttacccaggggcaggcgtcaacaaacgcattctattcaattaacagtaaatacatccttaaattaaaatctatgagaagagagcaatttaaattagtaagtgcgatactacttttatctggtttttctaccggatatatgcaagcagcacctcatgcagcagctacgggagtatctatcgtacagcaggataatacctgtaaaggtgttgtattagatcaaaatggtgaatccgttatcggagcttcagttgttgtaaaaggaacaactaatggaggtattacaggtatggacggagattttatcatttctaatgtgaagaaaggcgatattatcgttatttcatttgtgggttatgcagaacaagaaattgtgtgggacggtaagccgatgaaagtgactttgcaagaagacaccgagactttggatgaagtagtggtggtaggttacggtgtacagcgtaagagttctattaccggttctatcgcttctgtaaaatcagacaaattgaagacggttaccactccgagcgtggccaatatgctgcaaggtaaagttgccggtgtagtagttacacctacttccggtcggccgggtgccggtgtaagtatccgggtacgtggtaccggttcattgcgtggtaatacagagcctctttgggttattgacggtgtggtaggtgatgccatggctgatttgaacccgaatgatattgaaagtatctctatcttgaaagatggttcggctacagcgctttatggttctcgtggtgctaacggtgtagtgcaggttacaacgaagcgcgccacaaccggaggttcttctttcgatgcttctgtgaagtttggtatttctcaactgcaaaagggtaatcttgagatgatgaacggtgctgaatattatgattatctggttaccgcttataccaatgccggaacattacaagaccaacagtggcttcagccttatttgaaggaacaaaactttgattggtgggattttgctacgcagaatgctttgacacagaactacaacatcggatataagtatggtaatgaccgaattaaatcttatatttctgctgactattatacagaagaaggtgcaatcaaaggatacgattatgaccgttttactttaagagtgaacacagactatattgttaatgaccgtttgacattgagagcaaaattgtctaccagttataaggagacatttgaccagcaatatggtttgtctcacaccagctatacgccgtgggatactccgtatgactctcagggtaatataaaaatcggaacagaaggtcgaccgagcaaagaagatgccgccactgcagatccacgcgattactggtattccgacggaagctccaactggctgtataacaaccaattgaactggggtaaatcacgttctaatgctatggatatcggtgctggttttgattataagatttttgattggttgacttttgtttctaataacaaagtgggcttgagcaatagttatggtgagaattattatgacccgaaggctgtgggacaagaatcacttcaaggtacgatttacaacagtaattccaacgttcgtaccatttataccagtcagttacttcgtttcttgaagactttcaatgatgtacacgaaatcaacgcgtatttgggttatgactacgatgaatatcgttattatagcatgaccggtcaggcttcacaaatgtttcagggtaatgaaattctgaacggtggtgtagctaatcctaaagtaggtggtaccaaagttgaaaagaagaatgccgcttattattttaacggtaactactcttacgataataaatacctctttcaggtgatgttccgtgtagatggttcgtcacaattcggttccaataaacgttgggctcctttctggtctgtcggtggtggttggagtatgcataaggaagaattcatgagtaatcttaaatgggtgaatgaattgaaaccccgtatttcttatggtatttccggtaacttgcctggtggtgcttatgaatgggctactatgctggccagtactacacaatatggtggtaaggtaggattgtattccaattacttgggaaatcctgatctttcttgggaagaaacggctactttagactttggtttggatgtacgtttgtttgaccgtttaagtattgtatttgattactatcacaagaacgtaaagaatcttatttatttgaagcatttacctgcggttacaggttataaccgccagactgccaataatggtaaaatgacgaatcaaggttttgaagtaactgttactcctgaaatcatcagaactaaagacctttattgggatgttagcttcaacttaggctataataagaatgaaattacttatcttcctgacggtgatgaacttacatcacaagctactgctgtgggctacccttacagaaattggtatttgcgcgaatgggcaggtgtagattcacaaacaggaactccgttgtggtttaaagtagatgaaaatggtaagaaaactgtaaccggtgactacaacgaggcaacccgtgtattgttggatgaagtgcctactcctaaatttaatggtgctatcagcacgaacttgacatggaaaggtttcactctgaacgctaactttacatttgctaccggcgctatgatttataatggacagcgtgccggtgcgattgaccgtgactgcggacgtaactctcagcctcctatgaaattgaaagacggatggagccgttgggaaaagccgggtgatatcgctacacatcctcagttgatcgatggtggtaataacggtgccgatagagaatccacacgttatctggaaaacggtgactatttcaaactgaaatctctttcattggcttatagcttcccgaagcgttggttggaaccactgggtgtaaagtcggctaatttgagtgttggtggtgagaacttatttaccattaccagcttctcaggacaagacccggaaatcctgtattctgcagattataatggtagtgcgggaagcttcggatatcctacagtaagacgttttaccttaggattgaatgtccaattctaatttctaatatctaaatgaaaacattatgaaaataaaatatatactaggtgccatgggaatggcgttcggaatgaccggatgcaacctggacattaccatgtatgatggtgtgatggaggaacaattcgacaataagaaccttcttgaattatctcagggaagttatcgtttgttgaaaaatgacggtggattgatagacaacggatattatttttgggcttttggtgctgatgatgtcacttggaacggaacttcaaccggttcaacttttaaattgtatgattatagccgaaacattgccagttccactacagaatatacttgggagctcggctatcgtgtgattggtaactgtaataaaattattgaaattattcagggactgggtaatgaaagtactcgtgagcaaaccatcatgatgggtgaaaactactatttgcgtgcattgagctatttcttgctggtcaatgagtttgcacagccttattctaacaacccgacacagaaccccggcttgcctttgaagttgacaagtgatccgaatgatttacctcaaagtcgttctactgttgccgaagtttacgaccaagtggttctcgacttgaaagatgccatcacttatctgacacttcagcaaggagagactcccaaatcaaacatttatgctaccaaggaagctgctgaagctttgttggccagagtttatctctatatggagaactgggacggtgcatgggaaatggctaacaaggtaatcacatctggccgctttgagttggaaagaggaaaccgttttgctacttattcacaacttattccggaagacaacaaggaaaccatttttgcagtacgtcgtacacttgacaaagatgatgatggatacagccgtatgggtagtatgtacatccgtatcgatggttcgggttgggaagaaatgtctccttcttcaagatatttggagcttttggaattgcatttgaatgctaatgatatgcctcaggacttacgtagtaaatttatcgtgaaaagatacgtagaagatggtgtagccgattatactccggttggatatccaaataatgtatatgaagactggacgtttgcttatgctgttaagcaagctaatacagccaattatgaatacaaacagttggatgtagaaaaacaagctgacggtacattccttattaccaaagacgcttctaaatttcaaagcgctaccattcaagaagaagcctataacacaggtactcgttactatgtagtaggacaggacggtaacaagtatataggtcgtatcgaacctaaagtatttgatgcttctactaagcgtggtaaatcttctcttttccttgtgtatgctatcaacaaatgttcttaccaggaacagagcaaacatttgtggtcacctatcatttcccgtttggcagaaatgtatctgatacgtgccgaagctaattatgaaaagggtggttccgtacaggctactttggatgatatcaatatccttcgtgaaagagctggtataccggagtggacaatggaaaacatagctactgctgaaagcggaaatccgaaagatgttcataagattatcgaagaagaacgtatgttggaacttgcatgggaaggtcatcgtcgtttcgatgtattccgctggcgccatactatggatagaagatatccgggaggacataccattgctcagggtgataagttctatgaaattccatataactctccatcagtatgtgagtttattccacagcttcaatatgatgcttatccttacaaattggaacagaacccctaacaaaaacagatttactaatttaaaatggatatacaaatgaaaaaaatatcatatttacttttgctctttttctcggccattgtttgtggatgttccgaatatgagcaaccgtatgtcggttacatcgttgtagagcgtgccgtattggatgctgctgccaattccagtactactgtgattgcagatacagatatctcttctgatattgttgttgacaatgtagacgcagattggtgtcaggtttcggtaaacggtaaggaaattaccgtgactgcaacatctgccaatacagacagcagttatcgtacagctactgtcagtgtaacatccggttaccgccaggctactttcactgtattgcagaagtatgatggccaagaatttttgcagtatgattggactcgttggactgctaccggtaatggtgttgaagccagtgatggtggtggttatcccagcttgtttaaggaagaacgtacgaacttctggcatagtccgtacagttattctgtgcctcttccttatattttggaaattgatatgaaagaggaactggagtgcgctatgttccacatcggtagaagacactatgcaccgaatggcaacaattatggtactgtaaagaccatgaatatttatgccagcacggataatgagaactacgaaaaggtagctgattttactttcgcattgccgtggactgctcctgatggaactgtggtaaaaagctataccagtccgctgattccggcgtatgaagaattggtgttgtcttcacctgtcaaggcccgttatttccgtttggaaattacagaaaccaatacgtcgaataatgcatgccaagtggcatactttaaagtatttgaaagaatctagttaagatttgatgaacttttaataccgactctcttttgtggaggatgtttggagatttatttccggcatcctccttttttgtatattacaaaacgtatggatagatttcataaaatcgaattaaaacactatttttgcaccgatttaataaaaatacggttatggataccattcagataaaagacaagcgtttcacgactttcattcccgaagagcggatattgagagaagtagaacgggtagcgagtgaaattaaccgggatttagaaggtacgaatcccctgtttctaagtgtgctcaacggttcgttcatgtttgcagccgatttaatgcgtaaccttaccatccccagtgagatatcttttgtaaaactagcttcttatgccggcacatcgtctaccggtaaagtgaaagagttggttggtttgaatgacgatatcgaaggtcgtacagtggtgattgtggaagatatcgtggatacgggagtcacaatgaaacatttattggagacacttcaagcaaagaacccgaaggaaattcgtattgccacattgctgttgaagcctgataaactgaaggtagatttgaatatacattatatagctatgcgtattcctaatgattttattgtcggttatggacttgattatgacggcttggggcgcaattaccgtgatatctatactgtaatagagtaagaattatacaactaaatataataataaaaggtaaaacaagatgttgaacattgtaattttcggtgctccgggttcgggaaaaggtactcagagtgaacgtattgtagagaaattcggtattaatcacatttcaacaggagatgtgcttcgtgcagaaataaagaatggtacagaactgggcaaaactgctaaaggttatattgaccagggtcagttacttcctgatgagctgattatcgacatcctggctagcacattggatagtttcaaggatagcaaaggagttattttcgacggtttccccagaacgattgctcaggctgaagcgttgaagaagatgttgtcggaacgcggacaggaagtttctattatgttggaccttgatgttcccgaagacgaactgatgacgcgtctgattaaacgtggacaggagtcaggtcgtgcagatgataatgaagagactatcaagaaacgccttactgtttaccattcgcagacagctccgctgattgactggtataaaaaggaaggcaaatatcagcatattaacggattgggtaatttagaaacaattacgcaagacatctgtaaggctgttgatgcagtgaagtaagttatattttatcgtatagaataaaaagaggctcaacaatggatagaaatatcttttgttgagcctctttgttatggggacccggttttttccgatatgtttgtgaagcatatagataagacatgccaagaaatggaaaaagaataaatatttgtttctgttaaaaaacttgaggaaatcgactgaaatcattacttttgcactcattatctcaaacaatagaagaaaatggctgaatcgaattttgttgattacgtgaaaatatattgccgttcgggaaaaggcggacgaggctctacacacatgcgtcgtgaaaaatacgtacccaatggtggccccgacggtggcgatggtggtagaggaggtcatgttattttgcggggaaaccgcaattattggacattacttcacttgaaatatgaccgtcatgtgtttgctactcatggcggaaatggttccaaaaataagagttttggtaaggatggtgaagataaagtcatcgaagtaccttgtggtacagtggtttataatgctgagaccggtgaatatatttgtgatattaccgaagacggacaagaagttgtcctgctgaaaggcggacgaggaggcctgggtaactggcatttccgcactgctactcgtcaagcaccgcgttttgcacaaccgggagaaccgatgcaggaacttacggttattctagaattgaaattactggcagatgtcggtttggtaggttttcccaatgccggtaaatcgactttgctttccaccgtgtcggctgcacgtcccaagatagccaattatccgtttactacgcttgaacccaatctgggtattgtgtcttatcgcgaagggaaatctttcgttatggcagatattcccggtattattgagggagccagtgaaggcaaaggattgggactccgtttcttgcgacacattgagcgtaattcattattactttttatggtgcccggagatacagacgatatccgcaaagaatatgatatattgctgaatgaactggctacctttaatcccgaaatgctggacaaacagcgcgtgttggctatcacaaaatccgatatgctggatgaggagttgattaatatgcttgaaccgactcttccgaaaaatgttccacatatcttcatatcttctgtcactggcatgggcatccaacaactgaaggatatgctgtggacagagctgaataaggacagcaaccgtttagaaggtgtccgtaccgaaacaattgtccatcgtgccaaagatgtagccaaattgcaagaagagctaaaggctatgggtgaagacgaagactttgaatttgaatatgaggacgatgacgatgatgattttgattatgaatacgaggaagaagattgggacgaagaaaagaaatgaaacggctgacatcagataataaaatgttgggatatgagctgatgaaggcatatcccaacatttcttgtttttctactacccgtcatggagggtgcagcgagggaaattatgcttcttttaattgcaccggatattgtggggatgaggcagagcatgtgcagaaaaatcgtgaaatattgtgtgaacttttgccacagaaacctttggaattaattattccccatcaaacgcacagcaccaatatcggtgtaattgatgatgcctgtatcagagcgaacaaggagaatcggttggaagatattgatgccattataacggaacttcccggctattgcctttgtatttcaacggccgactgcatcccggtgttgctttatgacccgacaaagcaggtcattgccgctgctcatgccggttggcggggtacggtgggaaagattgtggcaaaaactcttgcagtaatgaaagaacggtatgcttcagaggaaaaggatataaaggcctgtatcggtccgggcatctcacttgctgcttttgaagtaggtgatgaggtatacgagacctttcgtactgccggttttgacatgcggcgcattgcccgtaaagaagaaaaatggcatattgatttgtgggaggccaaccgtttgcagttgctcggccacggtgtaaaagcagagaatatagaggtggcgggtatttgtacctatcaaaattacctcgatttcttttcagcccgtcggttaggaatccgttcagggcgaatcttatcgggaatcatgctgcatcgctgacgtagcggcggattgaaatttaaaagaaaaaatggattatgaaaatagaagtatcatcggaaataagaacagcttgtccggcttttgccggggttgccatctctgccaaggtggttaatacggcgtacaatgaagaattgtggaagaagataaatgaatttactgttcgttatcgtgaaatgtatacgacggattccatcaaagatatgacgactattcatgctactcgcgaggcttataagaaatgtggcaaggaccccagccgttaccgtccttcgggagaagcactatgccgcaggatacttcgcggaatttcactctatcagatagatacattggtagaccttataaatctggtatctatccgttttggttattctatcggaggctttgatgcggataagatagtcggcgacgctcttgttttgggtatcggcaaagccggagaaccgtatgaaggcattgggcgcggtgaactgaacatagaaggaatgcctgtttatcgcgatgcggttggcggaatcgggacacctaccagtgacaatgaacgtacaaaactggaattgggtacaactcatctgcttaccattattaatggttatagtggaaaagagggacttcgggatgctgccgactatatgattgagttgctgaaagagtttgcatcggcagaagatatcaaacagattgaattttaactcctgaaacaagccatgaaaagagccacatctatcctgttattggtaatcctgacgattgcagcttggggaggagaaccggcaaagaattttaccgctatggaaatcaaccatatacgtgtaaaaacaccggggctgttctctgcgcacaaaagtttcagccttcatttggacagcctgcaagataatgagttctgctttccgctgccgggtggaaagttgatttcttcctatgggggacgtcgcgggcacagtggggtcgatatcaagacaaaagcaaatgatacaattcggtgcatatttgatggtgtcgtaagaatggcaaaaccttatgccgcttatggaaatgtggtggtagtgcgtcataccaacggattggaaagtgtttatagtcataattcaaggaatctggtgaaatcgggggatgtagtaaaagccggaacaccacttgctcttaccggcagaacaggcagagctaccacagaacatcttcatctggagtttcggatagacggccaacacttcaatccgagtcttgttcttgatttaaaagaccgtactttgcgtaaagataaacttatctgtacaaaactcggtaacagaataacagtaaaatctaaattaataaataaacaataagaggatggacatagaaaaagcaattaccgatggaatcgttttcaaaggtggaaagtcgtcgggtagaaagaatgaagagaaagtgaaaacgaaagcgaagaagaaaagttatatcaccggacttcatggctcgggttcggccaaaatgaaagccgatatccgaaaaaaacgtgctaatcgccataaaggaaagtaaaatagttagtgctttgttaattattagatattaacgatttatcccttatttcataataaatcttttgaaaaaggaagtatttatgttgcataacataaatataaacgatacctttgcgccgcacaatacagaagggtgctgattccttctatgtaacaaataggttaatgtttaattttgagaacaaaagaaagatgaaaaagattgtattggtgtgtattgtggctattatggctactgctgcacaggcgcagatttatgtaggtggaactttgggtttcagttctgttaagactgaaaatagtgatgccgaattaaagactactactatcaagctcttgcctgaaataggttatgaactggatgagaattggtcgattggtacagttgtggggtatcagtatagcaaaacgggcgatttgaagaccaacacttttaccattgctccttatgctcgctattcttttctgcagagtgatttaatcaaattatttgtagatggaggattcggcttttctacagctaaagtaaagggaagcgatgctgcaaattcttggaacattggtttgaagccgggattggcaattaagctgtctgaccgtttttgtttggttgctaagtatggtttcttaggatattcacaggatgaaactcccatgggaactaaaacgaaaaacttcggtttggatttagatactgatgagctgagcttcggtttccactatattttctaatcgatttttagacataggtttaaaacttgtcgggagggggattgtgtcaaaacgttgataatgatgtcattttgttagtaggaaagaggtttgcttgcccgaaaatgttttgtgtattatttccaaggtcgtgaccgttggttcgggcaggcaaatcctgcccctacagttgacgatttgtagaccattttagttttgataccctccccctttctttattttttcaataattaatggtggaacaagcggacacctgtaaatgccatggtaattccatatttgtcacaagtatcgataacgtgatcatcgcgtacggaacctccggcttgtgcaatgtactccactccgcttttatgtgcgcgttctatgttgtcgccaaatgggaagaaagcgtccgaccccagtgaaactcctttcattgtatccagccatgcgcgtttttcttcacgcgtcagtacttcaggtttttcggtaaagaattgttgccaaactccgtcagccaatacgtcatcgtggtcttcgctgatatacacatcaatagtattgtcgcggtcggcacggcggattttttctatccatggcaagttcattactttagggtgttggcgcagataccagatgtcagccttgttgcctgccagtcgggtgcaatggatacggctttgctgtccggcaccgataccgatagcttgaccgtctttcacataacatacagaattactttgtgtatattttaaggtgataagggcgataatcaggtcgcgtttggcctcttccgtgaagtgttggttctttgtcggaatattagtcagcaagctttcgtccagtttgatttcgttacgtccttgttcaaaagtaataccaaacacatccttgtgttcaatgggggcaggacggtaagacgggtcaatcttgatgacgttataagtacctttacgtttgtttttcaagatttcgagcgcttcaggcgtatagtcgggagcaatgacaccatccgatacttcacggttgatgagccgtgcggttgcttcatcgcatgtatcgcttaaagcaatgaaatctccgtaagaagacatacggtcggcgcctcgtgcacgcgcgtatgctgttgccaatggggtgagaggaaggtcgtctacaaaataaattttcttcagtgtttcactcatttctatgccgacagcagctccggcggggctgacgtgtttgaaagatgcagccgaaggtagtccggtggcttctttgagttcctttactaactgccagctattgaatgcatccagaaaattaatatatccggggcgtccgttcaatacctcgatgggcaattctccttcttgcataaagatgcgtgacggcttttgattgggattgcagccgtactttaattctaattcttttgccatagttttatgtatttcagtctattggattttcatttggacaaagataaagtttttttgaagaaaaatattgcttttaataaaactttcatatctttgcctcttgatgaaggcatgtttagttttcatattattcattgggataagtctgtcattggggtgttcgcgccactatcggtcttatccgcttttcatggagcaagcccaaagctgtgtggaaacagcccccgacagcgccctgcattatctctctttactgaaagacagcatcgggtgtgaacccgaagaaacgcaaatgtactatcatttgctcaccatcaaggcaaaagacaaactgtatatcctccatacctccgattcgcttatcaaccttattgtaaaattctacaatgagcatggcgacaagaacaaactgatagaggcatactattatcaaggcagtgtatatcgcgacctgcatgatgccccgagtgctttggatgcctttcgtgaagtgattagccggagcaaggaactgtcggccgccgacaagaagcaatccgccgatttaatggcacgaacctataatcaaatgggaaccttgtttgcttatcaagggctttacgatgaatcattgcaagccaacagggaatcggtaaactgttatctggcacaagggaaagaaaataaaatcttttatgcactaagagatattgcacgcatgtatgatgccaagcatcaaaaggacagtgcgcttcattattatcaaaaagcataccgcactgcattatccactcacagtcctcataaagcatacattatttggggggaattaggcagtttttactattatagtttgggaaaagccgattccgccaaacaaatgcttattaccgccctcaatcatcaaccggacatggcaaacgccctgttggtattaggcgatgtctatcggggtgaagcccggtgggactccgcctgttattacctgcatcaagccatcgaatatggtgatattcaaaaacagcatagtgcctaccgacatttatcatccattgagattcaaaagcacaattatccccaagccataacctatatccggcgggctcaactgttggcagactccattaagaagattacccgaacagaagcgattgccaaaataaactccctgtataattatcagcacatccagaaagagaactatacactcctgttggaaaatgaaaagaagaatactttcttatggatacttggctgtatatctgtggtcatcatgggggtagctatcagtgtctatttccattataaaaagaaagtacaaaacactcgcctacaaatgcacaagcttagcaaactaaaagaagaacaagaagcaaaaagcatgaaagcccatgaagaaaacatctgcaaaataaaagaattagagcaaaaacaaatagaaacagaaccacgagtaaaagaattagagcaaaaactagtcgagcaagaaggggaaataacagaaaaggaaacactattgaaagcgcaaaaggaagaattagagcaagcaaaagccctgcaaaacttgctcctggctcaaaaagaggaactggaagctaaaaacaaagaaattatcgcctgtctaaaaaaacaaaaagttttacaagactccctgcgtcagacttccatctatcattttttccatcaggcatgtaccaaggcagacagcaaaataactgaagagaagtggtcagagctacaaaaagaggttgataccgcctatcccaacttcagcaagcacctatatgagttatctccaaaattatcagtcatcgaactgcgaatatgctatctaatgaagatttcaattccaccaacccatattgccattttcaccaatcgcaccaaagctgccataagtaatgctcgcacccgccttgcaaagagactactgggagaacaaaactctaccgagaaactggatgcttttatctctgatttacagtagattataacctgtagtgtactaattgtgtactttagaaagtacaagaagtcatctgtgtactaaaagtgtaccagttcttgatgatacattaaaatcttttttcatatttgcctaaactttaaaacgaaatgcaaaatatgaaaaatgcagtattagtattaacagcttttctttttctctttccatataagttaatggcagagaacacactggtctctattgaaggtacatgggacattgaagacgaacgttctatttcatttgcccctcagctatccatagacgaacagaacatctatatctattccgaaaaggaattaaatgatttggaagtgataataaaagactctttgggtaatgttatttattataatgtaactaccgtttccggatataccacttatcccattcttattgataattggaataaaggagagtatactatacaactaaaaaaagggagtcgttatatgcaggggattatccgcatagaatgataacattccaataaagaaaatatgagtcatg

SEQ ID NO: 6915 - DNA, 421 bp, Unknown
  gut microbiota DNA sequence
cactaattgtgtactttagaaagtacaagaagtcatctgtgtactaaaagtgtaccagttcttgatgatacattaaaatctttttctcatatttgcctaaactttaaaacgaaatgcaaaatatgaaaaacgcagtattagtattaacagcttttcttcttctctttccatataagttaatggcagagaataaagtaatctctattgaagatggatggaatattgaaaatgatcgttctatttcatttgcccctcaactatccatagacgaacagaacatctatatctattccgaaaaggaattaaatgatttggaagtgataataaaagactctttgggcaatgttatttattataatgtaactaccgtttccgagtataccacttatcccattaatataacagactttagaacaggaaa

SEQ ID NO: 6916 - DNA, 414 bp, Unknown
  gut microbiota DNA sequence
gtaaggaagaattttgcaagaaatgcacttcaagccaccggatcaagtgcgacggcctacctttgcatctggtaaaaccaaaccggtgatggaaagaagaaaagacgggagatatacgaaagaccggggtcggtataaaaggcggatattgctccgtgagtagtgataaaaaggaatggagctgattataaaaggagacggttctgtgtttcgcccattcgataaaggataccgcaaccatctctggcggatgcgttgcggtattttgtggacagcattttatgcggccttgtccggcttgcgctgccttgttttccagccgtacacggcggctacatacggatagagggaacgtgttctccggcggaaaccttcttcgtcgatttcacggttgtaaatcttatcggcgatacg

SEQ ID NO: 6917 - DNA, 336 bp, Unknown
  gut microbiota DNA sequence
aacgaaaaacaacgatcttttttagatgaaaaacgtttttttatttgacagtataacattagtgtgaggattgtatgcctctttcgttttactctgataacatcccatttcttcccttgcctgttaatattatttcttttgatgaaattgtggaatacctccaatgcttatatggaatctatacaaaataagggataaatcccgaattgcctctcctttttaaataccactgataatcaacgtaatatcctcttattgcaaccggcacgaatactacctacctgtcgaatgtcgtcaatcattactttaaatgcaactttaagacattggtgaaca

SEQ ID NO: 6918 - DNA, 351 bp, Unknown
  gut microbiota DNA sequence
ggaggaggccttcagcaccaatagggacacttcaggtgaggtttcccccaaggtaaagcggaaagtgccgttcttcacgatggtactgtcatacgtttccggagtcagtgtgtggcgcaggtaaacctgcttcccctcgtagcttttgtcctttaccgtcccttctatggtgcatcctttgggaacagaagtacacgcacatactgtcagaacgagcatcagcaggacacctgcctgtggcagaaaacatgttctttttctcatctttctcatttgaaaaaagccgtccggctaaatcgctttagcggaacggccttttgttatttactacgtaaacgggttacgtcagaa

SEQ ID NO: 6919 - DNA, 529 bp, Unknown
  gut microbiota DNA sequence
aaacgaatccacgtgtggatttttgcatgtaccgtatgaataaggatcggctaactccgtgccagcagccgcggtaatacggaggatccgagcgttatccggatttattgggtttaaagggagcgtagatgggttgttaagtcagttgtgaaagtttgcggctcaaccgtaaaattgcaattgatactggcagtcttgagtacagttgaggtaggcggaattcgtggtgtagcggtgaaatgcttagatatcacgaagaactccgattgcgaaggcagcttactaacctgtaactgacattgatgctcgaaagtgtgggtatcaaacaggattagataccctggtagtccacacggtaaacgatgaatactcgctgtaggcgatatacagtctgcggccaagcgaaagcattaagtattccacctggggagtacgccggcaacggtgaaactcaaaggaattgacgggggcccgcacaagcggaggaacatgtggtttaattcgatgatacgcgaggaaccttacccgg

SEQ ID NO: 6920 - DNA, 251 bp, Unknown
  gut microbiota DNA sequence
ttcccgccccctttatcgttacttatacctacatttgcttttccagacgctccagaatacctcacggtacgccttcgacgctgactggaatgctcccctaccgatcatataaatgatcccactgcttcggtagacaacttaatacccgattattatccacgcccgactcctcgactagtgagctgttacgcactctttaaatgaatggctgcttccaagccaacatcctagctgtcttagcagtcagactt

SEQ ID NO: 6921 - DNA, 606 bp, Unknown
  gut microbiota DNA sequence
atcttccggttgtagtccgtatttggtttgcaatacttttgagatttcaggttctttgatcccatgaatgttaaatcgttgggtacggctttggatcgtttgcaaaatggcatcaggctcttcggatactaataaaaagacagtcatggcaggaggctcttccagtaacttcagcagtttgttgctgcattccacgttcatcttttcgggaagccatataatcatgattttgtaaccgccttgactggatttcaagctgagctttcgtacaatctcatcgctctcttttacaaagatttgcgcctgttggttttctgctcccatctctttcagccaatggttcagattaaaatatgggttctgcaggacaaagttgcgccagtctgctatgaaatcatcgcatacggtatcctttccggcttttttcttgataacaggaaaaacgaaatgcaggtcgggatgtatcagcttattgaatttcacacaagtggggcaaattccgcaggcatcttgttcaccacggttttcacagcagatgtaacgggcataagctattgccaaaggcaactttcctgtaccttcgggaccgcaaatcagttgtgcatg

SEQ ID NO: 6922 - DNA, 423 bp, Unknown
  gut microbiota DNA sequence
ctctgtgtcagcttggagcacgccattgactgcaccactcctgtggagcatgaacagctgtacgcccaactcaaagcggaactcctgtccggtgaacgcagctggttcaacaaggaagaagagcaggccatacagcaacacaacgccctgttctacaaacatatacccgaagaagaggtgttccgcctctgtttccgctttgccacggaagcggaccatccgcaggaagtgctgaccttttccgccacccaattattcgagcgaatgaaatctgcccatccttcggtcatgagaggcatgaccgcctacagtctgagtcgcatcctgcctcagctgggcgaacgggtgcataccgccaagggaaatgtgtatcgggtggtggcatgctaggagtatttagcaataatggaagctttatcagct

SEQ ID NO: 6923 - DNA, 251 bp, Unknown
  gut microbiota DNA sequence
aacgagctccgaccgcttgtaggcgcacggtttcaggaactatttcactcttctgttcgaagtgcttttcacctttccctcacggtactggttcgctatcggtctctcgggagtatttagccttaccggatggtcccggcagattcacgcagaattcctcgtgctccgcgctactcaggatactactatgcttcgacaacattcgaatacgcaactgtcatgctctatggtctttctttccagaaagttct

SEQ ID NO: 6924 - DNA, 251 bp, Unknown
  gut microbiota DNA sequence
ttcccgccccctttatcgttacttatacctacatttgcttttccagacgctccagaatacctcacggtacgccttcgacgctgactggaatgctcccctaccgatcatatcaatgatcccactgcttcggtagacaacttgatacccgattattatccacgcccgactcctcgactagtgagctgttacgcactctttaaatgaatggctgcttccaagccaacatcctagctgtcttagcagtcagactt

SEQ ID NO: 6925 - DNA, 221 bp, Unknown
  gut microbiota DNA sequence
tgagctataggactgtcaggttcaacctagtctacctctgtttagactcggcttcttctttctctttataatgaataaacaaagcgcgtagtacaaggacaaaaacctcagatggtcctctccagaaaggaggtgttccagccgcaccttccggtacggctaccttgttacgacttagccccagtcaccagttttaccctagggcgctccttgcggttacg

SEQ ID NO: 6926 - DNA, 221 bp, Unknown
  gut microbiota DNA sequence
ccgagagaccgatagcgaaccagtaccgtgagggaaaggtgaaaagcacttcgaacagaagagtgaaatagttcctgaaaccgtgcgcctacaagcggtcggagctcgttaatgagtgacggcgtgccttttgcataatgaacctacgagttgcctttgccggcaaggttaagtgtgacgacacacgtatccgaagcgaaagcgagtctgaacagggcgta

SEQ ID NO: 6927 - DNA, 15184 bp, Unknown
  gut microbiota DNA sequence
aagatgtgtatttatttgaaatagagacgataaaaagagagtacaatggactacctgtttctacaccgcgacaagcgcacttttacttccgaaaggcagaagaatctgctcttccgggctgcccggctttattgggagcagaagtatgcggacagcgaagtggttccgaaaaggaaagtcgattgtgagctatataaatatgtattgtattatttggaagtgcgccaagtgtttcttgacccgaagctttcactgaagaagctgagcgatatgattgaaacgaaccagacttatctgtcgaacgtggtcaaccgctacttcggttgccatctgaaagagttggtgaacatgtatcgggtggaatatgccaaggaactgctccgttcgggcaagtgtctgccggaggagctgccccaacgctgcgggtttctgtcgcgaagtgcgttttatgctgcttttaaaaaggtgacgggcgcctctcccaaacgttatatgaaatatggacagagagaaaagctctcggaaccaacagaatatgtataaccaattttagttttttaaatttataaatttaaagtttttctattatgaacaaaaagtttttaagtgcaatcctgttcggagccttgatggttacctcgacaggaacatttgtgtcttgtaaggattacgacgatgatatcgacgaaatcaacggcaagattgacaagattgaaaccacactgtctgaattggagtcaaagattggcgacaagggtgtgaccagtgtgactttcgacgaaaagacaggtgtattgactgtggtagacggtacaggctctcatacttataccatcaaaacaacggctcccagtgtggaaaaaacagtggtgacagttgacggtaaagacctgaaagtagacggaaaagtaatcggtcagttgggtgacactgtagaagtgaaagacaacgaactgtatgtgaacggcaaggcaacaggcatcaaggttggaaaatatgccatcctggaaaatgatgctgacggtatgtacaccatcacattgcccgatgccaacggtgaaatgaagactatcaaattgccgaaagcaacttcgggaatgatgagtgtaactgccaatgaagctacatttaccgcaaaatcaattgcctcttctgctcccgatggtattgcttggggaaaagcagacaaagcaatcacctggaaaggtgctaaaggaaacattgccaaaggacaacttttgttgggacgctatacagaaggagaagttacggtagttccttcaagctacaacttgggtgcacagacattgaaactggttgcttctgacggttctgtagctcctgtaactgtcactgcaacagcaaacaatgatcttatctatggtgaaagagctgcatcagccaatggcaactggacagtagccatcacaatggatgaaacggttacagccgacaatatcgctactgcttttgcaacagaagttgaaagccaggctaagaacgtgaaatatgcattgtctgtaaacggcgacttggtaacaggctatgaatttgttatcgataccgatgaaacagctgaaacaactgctctcgcagcaacaaagattaaagtgggaggagtagaaggaacagatgatgcaaagactgcaagcaaccctcttactatcagcaacttcaaattaggtactaacgaaatcatcattgaagacaaagacgcaagcaatgcagacgcccacaaagtttatgatgcatatcttgaaatcggtgacatcgacaaagccggcagatatggtgtaacagtaaacggtatgaagattacagctgctgacaaagctgccaagcaagaaatacctttcattgtgcatatcctggacgtaacaggtactgaaaccaagcaatatatcaacgttaccttcgtggctgctacagtagaagacgaaccgattgcagaccagacttataagttgatgcccgaaaagaacttcgttatcgacttgggtaatacatttaccggattgacagacgaacaggctgacaaagttcagggtaacattacttgggctactgacggtaacttctttaaagaagatatcacagaatctaatgtaacatattacacagatgctgcatgcaagaaacaagtaacagacttgtcttctgctgcaaccatcaagactatcaagtatgccaagattgcagatagcgaaattgcagatgctccaaaggcaggtgcaaccaagttgaccatcactttgtctgatgatgccgctgccggtaatgaaatcaagaaagtaagtgcaaactacactatcacattgccttcattcgatgaattggcagtagttaacaccaatgctttgtggaatgaagcaggtactactcttactgcacgtatgggatacagtagcaatgcaactctttctttggctaaagcatacacagtaaaagatggcgtgaaaggtcttgctattggcgacatcgaatatgttgctacatacactactaatgacggtgatgtaacaaaacttactgtaacagccggtgaaattgcagatgccggtggactgatagttgataacaaggttaagtataacacgcttgctgcaaccgcttccatcgaattagcaacagacttgacagtatctaaagactttaccgtaaccgtcaagagtatctttgaagatgctaaaatcgtttactacaaagcaggtgctgctcaaagcattgccacagtaggagctgacaactatatcgcaccgttgacaggcgctgctgataagagaacaggtttggcattggtattcaatggtaaagaaattgctgtagcaggtactgatatgaagattgacggtatcaaactgactacaagcgatccaagcgatgctactgaagtaaaagtagaatacgacaacactgaagcttccaaaggaactgttgttgctccgacaggaacagcagccgacaaagatgcaaagggtgtaagtattaccggtatgaagagcggtgaaaagggtacattggtagttaccttcactgataagaatgacgtagtaacaacatccactatcgactatcagtataactaataacaatcgcatctgacgaccctcagaacgggttcagactaaataaagaggctgtagtgcaccaagcattacagcctttttttggaggggcacattgttcttttaaggatttaaatatcatatcacaaacaaagggaagaataagcggtttcttaggatcagccaaggccttttgaacagaagattattacagtctgcggcaatggactgtacagtccactgtagcagactgtacggtccactgcaatgaatcatacagtccgctgccggagactgtagtaatccgactgacagacgggcataaccgaaaggacgaaaacgcttggtccggctaatgaaacgacttaggaagctcaaaagcgcatgcaggggttgaaaaccggaagagacaacaccgggggacaggtgtttgcttgaggtgttaaatccacaagaacaatgactgccccttgctactcgaacagaactgccgaaagagaaatgccccctaccggcagaacaatgggaagacaccgccggacaaatccgaggcatgccggaggaaacaaagcgcagcaacactgtatagagactcacctccatgagggtatgtcgaaactaaaagacctatcccatcgtcaactgtagggcaggatttgcctgcccgaagacacaaagcaaactgttttcgggcgagcgaacctcgcccctacagattaaacgacagcattatccacgttttgacacactccccatttcgataaaaaggaagttttgatacatccccattctgcggatgggaactgaaaagcatggaggaaagctgaaaagaatgtattattgcgggtgatacacctgcaaaggcagctcccctttcaatgcccccaaagcattgaatgccagcgaacccatttcatcctccccgggaatcagtacaacaggagccagatagtctatctgttcacgaagagcacctacacaataatcgctatgggctattcctcctgtcagaataatggcatccactttcccgcgaagcgaaacatacatcgccccgacctgtttggcaaccgtataaagcatggcatccagcactcctttatagggctcctcgcctgcttcggctttatgggcaatagaagcaacatcgtttgtcccgagatgggctatcaaaccacccttaccgttcaacatcttcttcacctgacgcaaggtatatttcccgctgaaacacagttcggcaaactgatcggcaggaatagtaccggcacgctccgggctgaaagggccttcaccgttcaacgcattgtttacatcaattaccctgccctgacagtgtgctccgaccgagatgccacctcccaggtgaaccacaatcaaattcaattcttcataatgctttccgatggaagcggcatatttacgggaaaccgccttactgtttaatgcatggaaaatagaaatacgttctatctcggggataccggtataacgcgctgccggctgcaactcatccaccacttccgggtcggcaatataagcggggcaaccgcatttttttgccatttcatcggcaattaaagcccccaaattacaggcatgctccatacgtgcgtgaagcaaatcatatttcatctgttcgttaatggcatacactccccccggagtcggtttcaacaagccgccccgcgcaatcacagcgtcaaactcaataggaataccggcctcggccaacaatcggaatataaaatccctgcgatactcatattgctcattcacatgatgaaaatgttgcaagtcttctgaggaatggtgagcacctgccgcccatattactttttcattttcaaaaagagccaacttcgtggaagtagagcctgggttaatgacaaatatcttcatataactttaaggttttatccggccacgcaagccaatgctaaactataatatttcgagtttcccgaatcggcacgtgaagggacaacaaccggagctatggttccgcgcagcatacctgccatattagcatcgccgaataaggatactgttttataaaatgtattgcctgattcgatattgggaaatatcaacaggtcagcatgccccactacaggcgaacttatgcctttcacctcaccactatgagcatcgcaagccgtctttacatccatcggcccgtccagaaacatggagccgtaagcaccggatgcggcacgttcctttaaaacagcatagtcaagggtatggggaaacttttcatttatcttctcggtgcaatgaataagtgccacccgaggttcggaaatacccaaacggcgacaaacttccaaatcgtatttcagcatagcctcaaactgagccaatgtaggtcgggggattactgccgcatccgagaaaaacaataatttattataagtaggtatctgagccactgttatatggctcaatacatttccctgaggaagcaaaccatgttccttattaagaaccgcacgcagcaggttatcggtgttgattattcctttcatcaacacatcggcatgtccttctctgaccaatgccactccttcttgagcagctttgtcgggacttgtcgcctcatacacttttacatgctccgggtactgcaaccggatatattcggcattcaataaatggggagtatcagccaccaacaggaaatcggcaaacccttcgtgcaagctacgggtaataacatactccgtatgcgggtcgttagggcaaaccactgcaactcgtttacgctccttttgcgcacgcagacggctgattaatcgggcaaagtcctgtataggttccataatcattagatttttagcaaatatgaaaaataaatctggatttatccctatctttgcttagtttctatgaataatttaacttatgaaaacctttcaaacatttgacatttcagcagcgtacgatgatatacaccgcacattcccctgttacaaaaaagcaccggttatcggactgaccggaaacttcagggatggggaatgcaccttggcagaaggttactttacttccattctgaaagcaggcggagtgccattcattctcccttcattcgatgacactgacagtttgataaatgcactcgaatcgctggacggaatcctgctgacgggaggtgcggatatcaatcctcttttcatggatgaagaaccggtaaaggaactccacagcatcaacccacaccgtgacaggcaggaactcttattgacaaagctggctgccgacagacaaatcccgatactgggtatctgccggggcatacagatgatgaatgccgccctcggaggcagcttgtatcaggatatccactcacaaatggaaggaacgcgcataaagcacgaccaagacctggaaagaagttacgcatcacattcggttcggatagaaaaagattcattgctacatcgtctgtttgaaaaagatgtcctgccggtaaattctttccaccatcaggctgtaaaagaagttgcaccgggtttccgcgtgtgtgcccgggctgcggacggagtgatagaagcgatggaatccaccgaatataaatcaatgctgggagttcaatggcatcccgaatgtttcatcttacggggtgacgaatgcatgatgccactcttccactggctgataaaagaagctgcttcttttcaggaagcaaaacgtctgcacagccgtatgattacgctggattcgcattgcgatacgccgatgtttttcgaccggggcattgactttgcttcccgcgacaaaaagatattggtggacttacataagatgacggaaggcagactggatgccacaatcatggtagcctacctgaaacaatcggaacgtaccgacgaggcattgccggctgctactgcaaaagccgaccgcattctgaacgaaatagaagaaatggttgccaagaactgtacggccgttgatttggcttatacgccaaacgatttatggcggctgaaaatggaagggaagaaagccattatgctgggaatagagaatggttatgccattggcaaggatataagtaatgtggagcgtttccgaaaacgcggagtggtgtatatgacactctgccacaatgggaataatgacatttgcggttcggcacgtgataatgccgaaggactgggagtcagtgctttcggagaagacgtaattaaagaaatgaaccgtgtaggcatgatggtagatatctcgcatgccggagaaaaaagtttttatgatgcgttggaaatcagcacgaagccgattgttgcctcgcattcttccgcacgtgcattgtgcgaccatccgcgtaacctgacagacgcccaactgaaggctcttgccgccaaaggaggagtagcccaagtaacgttatacgacggcttcctgcggaaagaaggccatgcaaccattaaagatgccatcaatcatctgaaccacatggtgaatatcatgggaatagaacatgtgggtatcggtaccgactttgacggtgacggaggcatcaccggttgtgcttctgcatcggaactgataaacttcacccgtcaactattgttagaaagatacagcgaagaaagtatccggcttatctggggaggaaacttcctgcgggtaatggaagaagtacaaagaaaataatgtaactttgcaaccgaacaaagtggaagatttaaaagagaaatatatgaagaataagaacattttaaccatcctgttcctgatgcttgtactgaccgttatttcttgcggaaacagcaataagaaaagtgaccgaatagatgcagtggaaaaagaagtagtcaaagcacccgaattcaatgcagacagtgcttatgcatacgtcggggcacaagcggatttcggtccgagagtgccgaatacaaaagcacatgaagaatgcggagagtatttagctcaacaactggaaaagtttggagccaaggtttataaccaacgtgcagacctcatagcttgggacggaaccatactgaaagcacggaatatcatcggagcctataaacccgaaagcaaaaaacgcatcatgctttgtgcgcattgggacagccggccgtatgccgacaatgatcccgaccccaagaatcaccacacgcatattctcggagtaaatgatggcgcaagcggtgtaggcgtattgctggaaatcgcccgtcaaattcaacagaaagaaccggcactgggcattgacattatcttctttgatgcggaagactacggaacgccggaattttatacaggacaacccaaacaggatacatggtgtctggggtcacagttctgggcacgcactccccacgtacagaattataatgcccgctacggaattctgcttgatatggtaggcggtaaagatgcaactttctattatgagggttattcctcggaaacggcacgttccgaaatgaaaaagatttggaaaaaggcacatgagctgggctatggcaagtattttgtgaaagcggacggcattcctgtaaccgatgaccacttgtatgtacaccaactggcacgtatcccgtgtgtggacatcatcaattatgatgccaataacgaacgttcttctttcggctctacctggcatacgataaacgatacgatggacaatatagaccgcaatacactgaaagctgtcggtcaaacagtgatggatgtaatttataatgagaaataaaattcaaaacaatgaaaacaataaacgaacttcaagacgaggttatcgaggaattcagtgactttgacgattggatggacaaataccaattactgattgacttgggaaatgagcaagagccactcgaccctcaatataaaacggaacaaaacctgattgacggttgccaaagccgtgtatggttacaggctgacctgacagacggcaaagtggttttccaggcagaaagcgatgcattgatagtaaaaggtatcatcgcattgctcattaaagtcgtatcaggacacactcccgacgaaatattgaacagcgatttctactttatagagaaaatcggcctgaaagaacatttgtctcccacgcgcagcaacggtttgctggccatggtaaagcagatgcgcatgtatgccttggcattcaaaacaaaaatggaaggctgaaaccgtttgaacggtaaactaccgacggatttactccatttatttcaggtacagactttacggacaaacgcggactttttctattccgcgctgtccgtacctaaagtatcaatgtcccaatcggctcgtatccacttccttacgcttcttttccttatagccgccaaatttataaaggaatgacagagttatattccgattggatttattaaactttgtacgactatgttgattggcatagtcaattcttaaatccatccggttacggctgtcaaagaggtcattgccggtcaatgtcaactgtgccttcttgtcgggcgatgtccacttcaccgaagtcgtcacatcgcaatagttgcctaaatcatagattccctgacgcgctttggtctgcaagaaagcacttacgttcattaccacatcaggttgcttcgacagggtgagcgtattactcgtccgaaagacgaatacccactttttgcggtcaaacggaatatcataaaaatcatccgccttgtcacggttccgcatcgctatcaacatgccgttgcccgaccaccatttgccaatcttataaggagccatcattcgtatccccatttgccgctggaaattataattgatgaacttgttcacctcggccaagcggtcgggcaatttataaggtaactgggcaaaatggtcaggtttctcttcatagaaaagagcaaaaacatacttactcttcaatatataagccaagacagccagatagtcggatgagggtttcagcaccggattgccatgcacctctgtataactatccacatactgcactgtgggttgtgtactccaatagtcaggataagaacgattactgctgaaagacagctgaaacatatgtccgtcttttgcccgataattggcattcaatgtgggataaagcatccattcatgccacgtttgcgagttataaagctcggcagccagtgaaaagtcaaaagagaaacgtttgccgaagtttttgctgaagcccgcataaccgttaaaggtatattccgtccggcgtgacttcaacgagttgtctgtcagcaagtctcccgtctcgccatcgtagtaaaactggtaactgttatcatgcgcagtcctatatttcgcaccataattcaactcccacccgttattcaaagcatgttcctgattaagataaaagagcaggcggttgatacgttgattactcttatagaagaatgatttcttttcctcttccatcacaccggtcagtaccgtcgtgccgggagaatcaaaataggtaaaatccattccggccgtaagtccgaaagaagattgataatccaacttcacattatgaagccgacggtctccgtcatctgccttatcactgtttcccgttccgtgcatcgacgtacggtcttgcccgtacccgagttgggaagtatataccatgctcaacacattctttttcccaaaatcataatccgtccccaaacggatattatgccgtcctccgtatccgctactcaaggtattcaaggtaagctcatgcatgccgtcggccagttcatgctccgaccacttttctgtctcattcttagtatgcccgaaagagtaggtatacatcaagtccgccgcaaagcggcctgatgtataaagcaatgtggctctttcattgatgtgttcgcgtcgtgactgttcgtaggaggaaaagagttctcctttcaaagaagaccgttgccctaagtttgattttaatattaaatttatcatcggtccgcgcacctgataacgggcaggggcggcatacatgatttctgctttctcaatgcggctcacaggagtaccttcgagcatggcacgcaactgctccttatccaatgtggtcactttgccgttgaccaccaccgtaaccctcagtcctcccaaactcagggttccgttttgctcggtcactccgggcagttctttcaagacttcataagcatttgtcaccggcagtttttcgataatacgcggcacatcataaatcagtttgcccttttcagctttaatcaccggtctctcaccccgtaccagcacttcgggaagttgctggaacagactgtccatataaaggaatgtggtatcctgttgcccccataccgaaagagcaaaccaacaaaaacaaatggtaagtaagtttttcatcatgcaacaaagtaagcaggaaaagcgattccttcatgttaccatccgcttacaaagtcttatttagtgttatcaaaaagaagaagttggccgatttctctctattttcgtagataaatgagaaaaacagtacaatgaaaataccgtttaaggccatagccgtattaattatcctttcattgataggcgtatttgcttatcaggcatattggctgacaggactctacagctcgatgaaaaaagatatggataactgtctggcagagaccctgcaagtaagtgactacaacgaaatgatggctcgttgcgactcactaaaaagaaacagtaacattgataagtatatcaaatcgagctttgaagtagacagcatcatgacccatgcaggcaactcttatggaatccatatccctaacagaatcggactggaaatcaatgaacctctgtcaagcactgtcgataaaaacgggacactggagttgctcaccaagtattttcaacgcggcatacacagccagcttgatttgtttaccgaaatcaacctatccactttcgacagccttttcaatcgcacactcgctatgcggggaatcatcttcctgccccaccgtatagaaatgctgaagctgcacgacaaggacacgaccattgtacgaagtctgaattatccgcccggcttcattccaagcaagaaagccgattctttttattacaattatgatttatataataaaagatactaccgtttgtgggtggaaccgacagatatgctcgtattccggcaaatgaaaggtattctctacacttccttctttatcattatcatattgggaatctccttttggtatctcacccgaatcattttacgccaaaagagtgtggaagaaatgaaagaggatttcactcataacatcactcatgagctcaagaccccgatagccgtagcctacgctgccaatgatgccatgctgaacttcaagggagccgagaacccggaaaaaagacacacttatctgcaaatcatccaagcacaactcaagcaactcagtggcttggtggaacagattctgtccatgagcatggaacaacgtaagaacttccggctcaattatgaagagatagatttgaaaccgatgttggaaacacttatcaggcagcaccaacttaaagcggacaaaccaatggattgccacctggcaatgatggacaacaccaccatatatgcagaccgcacccatctctacaacatgataagcaacctgatagacaatgcagtgaaatactccggtgaaaaggcggatatttgcatttccgtaacggtgtgtaatggttatgtaacggttaaggtgagtgacaaaggcatcggcatacccggtgacaaacaaaaacacttatttgataagttttatcgggttccgacaggaaatttacataatgtaaaaggatacggattaggactctattatgtcaagacaatggcagaacaacacaaaggaagcatcaccgtagaaagcagcataggaaaaggaagtacatttattcttcaaatacccggcaaataatggaaaagatacacgttttattggtagaagatgaattgacacttgcaatgattatcaaagacacattggaagaacaggagtttattatcaccacagcttcggatggcgaagaagggttacgtaccttctttgcacagaaaccggatatcgtagtggcagatgtaatgatgccccgcatggatggtttcgagatggttcgccgcatcaggcagacagacaaactgacccctgtactgttcctcacggcacgctcggccatcaatgatgtagtggaaggattcgagctgggggcaaacgactatttgaagaaacctttcggaatgcaggaattgatagtacgactcaaagcattgatgcataaggcattcatagaaaaagaagtcagtcattcttatgaaataggagactatcagttcaacccggttacccaacagctcacctttgcgggagcgacacaggagttatcacatcgtgaatcggagatattgaaacggctatgcaataaccgcaatgaagtggtaagcagtcaaagcattctgctggagctatggggtgatgacagctttttcaactcccgcagcctgcacgtattcattaccaagctaaggcataagttggcaaaagacagccgagtcaggattgtgaatgtcaggggaataggctacaaacttatcctcggcttataaagaatgagaagaattcacttttctgcctcttatcaagaccttttgttcatccgataaggtagtagcaaagatataatcttccccaccctctttcagcttcaggcgtttccgcagttcggccaccgaagaaggaaagtttcgcacggtgagattggcttttcccatatcctgcaaaaaggctttcagctcttttttaccaaaacccgtcaccgactctaccttgaactttcttccggggaagtcagccacaaaagaggaagaggtatatagatgactattcacatgcaactttcttaccggatatgcctgagtcaaagaacgaaaagctccggctttcaggatagacgcattcggttcatacaaataggtttccacttgtccggcaagagggcacggtgacagcctttcctgcttctgagtaaacacataatgctgactctctcctatgtgtgtactcagttcacaatgaataaaaacatctgatgaaatggggcttttttgcaatacaagcagtagttccttacactcattgcccacagacacgatatgtacttcactaacggttttcaactctttcagagccaaagacaagtccagcatcggtgagagttttaccattaccttatccgctttctcaaccagcaaggactctaatacgccaatatccggttcacagtccgaaatggcaaccgtcttgcctccatgcccatccctacgtgccgggtccagaaaaagacagtccacatgagacatgttatgcaggtaatcgaccccgtccatattgtggatacggacatgctccaatcccaataaaggaaagttatgtgcagccagcgcacataattcatcttgccgctccacataatcggcatacttaaaacggcgggaaataaaagcacaatctatgccaaagcctccggttaaatcggcaaaagactctccctccaacaaatgagccttatactttgccgtcaactcggacgagcactgttccattgacaaatgccggggataaagcaatccggacaatgcataccacgaaggtatcttctgctctgcaatttgcctgccggatatttgtgtcacagccaaagccatatccacacccggatacttcttcccctgcaaggcaagagttcgaacatcatcatgcctatgttcctcgatgaaatggagcgtttctgccgataaattcatgctatgccttatttattataatacggattttacataatgtgtccatatcttattcttttgaacagctattgcacaaaaatacttattttttcaatagcaactcatcaatggccttcttaaaagcttctttgggaagagctccctgtgccatttccggctttccgttcatcggtataaacagaatggaaggaatactgcggataccgaaagcacgcgccaattccgtttctttatccgtgtctaccttataaataacaatctgtccgtcatactcttttgcaagctcgtccaaaataggagctaccattttacatggaccgcaccaagtagcata

SEQ ID NO: 6928 - DNA, 374 bp, Unknown
  gut microbiota DNA sequence
gataaattgcccttgccgttttcagccggaagaacctgtgacttgtccacttccttcactccgtcttcatcggacacaatgtaatggtaagtgcccgccagcgcattcccatcggtgcgcggagtccagtccaccaccagagccacccggccttcgcggatatccactgccagatgcacaccggggatggtccgacaaagcggcatcagtccgttgagggcggatacgaagtcacggcgcggcgttccgtcggagggaacaggggctgacaggaatttgcttccgaagaagactgttttgagggtggcgaatacattcatgaggcactttttttagatttgacgaactacaaatatacaacatgaaaaagcgtt

SEQ ID NO: 6929 - DNA, 221 bp, Unknown
  gut microbiota DNA sequence
gttagtaactatcggcaagggttgcgctcgttatggcacttaagccgacacctcacggcacgagctgacgacaaccatgcagcaccttcacaaccgctattgctagctatggcgtttccgccatattcggttgcaatttaagcccgggtaaggttcctcgcgtatcatcgaattaaaccacatgttcctccgcttgtgcgggcccccgtcaattcctttga

SEQ ID NO: 6930 - DNA, 221 bp, Unknown
  gut microbiota DNA sequence
ccggtggcgtacaggaacgaacgttacagcgagtcatacgtgaagtcgctcaatgacaggatcaacgagctgcagggcgcaatcgacagccataagtgtcccgaaccggtcccgtgtcccgaggtggaaaagagcgtgccgggcatcaaaagccacgtttccttcgggctggcaaagacggacatcgccgaggaccagcaggtcaacatcctggccattgc

SEQ ID NO: 6931 - DNA, 388 bp, Unknown
  gut microbiota DNA sequence
gttttttcaattaagactgccgggcatccgggagcttcgttcctgctttccgataaattgcccttgccgttttcagccggaagaacctgtgacttgtccacttccttcacgccgtcttcatcggacacaatgtaatggtaaacgcccgccagcgcattcccgtcggtacgcgaagtccagttcagtaccaaagccacccggccttcgcggatatccactgccaggtgcacaccggggatggtccgacaaagcggcatcagtccgttgagggcggatatgaagtcacggcgcggcgttccgtcggaaggaacaggagctgacaggaatttgcttccgaagaagactgttttgagggtggcgaatacattcatgaggcacttttttttag

SEQ ID NO: 6932 - DNA, 26042 bp, Unknown
  gut microbiota DNA sequence
tttagagacatttactgaatatccctaatgactccgttcctgttgttttcttcgaatatcttttcattggcgctcatgtcttttttggtggaagcagctttatgatggatatggtattctatagctttgaattttatgaaacgcttttttatacctaaacgacgcaaacgtgccggaagatcaatgtcctcatatccataccccaagaagcgttcatcatagccattgacatttaaaaggtcctgcttccaaaatgagatattacatcctctctctttctgattctgtttgtaaaaaaagaatagaggcgtaagccacggcaagcgcaatacattcagtttccggcacacgccttgagtgaaaatagataaccgataatcttgccgttgaagtagccgcttcaacagtttctcatttattttgccccggcttccaactaaaaaacatcccggagtagcttcggtaacatggtcttcgatgaaatgcgaatgcatgatgatatctccatcaatctctattatatagtcaccttcgcaaactgcaaatgctttattcatgataatgcacttacgccatccattatcttcgtgccatacatgtttgatgggacaaggaaaatgattcttaaattcttcaatcagcaacttggtatccgaacgtgaaccatcatcagctattataacttctgtgggtattacagtctgttgcgttacacttaacagacacaaacctagtgcttctttccaattataagttgaaataactaaacttactttcatgcttttattgttttatcgagccattaaccttatagcaacatactattaaccttggagtattggcatgactaaagaatttaaataattactattcaaaacaaatatatccaacttacgtcactacaaacatccacgatatacgaagaagttctacacataagccccctttttcatcatctactctttgaataccaacagcaacaaagttatcaataaaaaacaactaaaccattatttaccattattttttatatagaaacgtatccataaacgccgacatgccctgttgcatcccgttccgccgcgttatcctccgggattcctatccctaagcactccgttccatatccctaagtactttcacttactatctctcaacggttgagagatagaacatggggcagaaaaaggcttaggggaaagcaaacgggagcttaatgggagggagaggaaggcttaacaggcaatgcagtgcatcagtgatgctgcgtatgcatacgaatacataaatatgccaagattcattcatcggtgctattttagggatggaagaacctacagatgaacaacttcatgtactgatggaacgattggaatagctgcgcatgaaagttctcgtcgtgcagaactagagcttaagcgtaggatgagctgtcaaaaaaattattgaaagcatatactaattaaacatggaaaaagttcttccattggttgatagaactcatgcttatgataattctgttgaaaacccaacacctctattgttattccgcacaatagatggttctctttacaagcaatatgtagaagaaattcccgagtgagcaccgttcttattgaaataagattcaaaccactcatacatccgttgtatcccatcttgtatctccgtgctgggagcatattggaaatcttcttccagacgggtggtgtctgcatacgtgcaagtcacatcacccggctgcatctcttcgtaccggcaaacagcctctttgcccgtggcacgctctatgcagtgtataaagtccatcagctctaccggacgggaatgtccgatattataaaccctaaagggaacttccgcttcgtaaggcttacttccgatgatgcgtaccactgcctgaataatgtcatcgatgtaggtgaaatcacggcgcatttttccatgattgaacacgcggatgggctctcccttcgtaattgatttcataaagagatacggcgccatatccggtcgaccccacggcccgtagacggtgaagaagcgaagaccggtggcgggaatatgataaagattgctgtaagcatgcgccatcagttcattcgacttcttagtggcagcatacagactgaccggagtatcggtcatatcagtttcgcagaaaggcactttctcattcataccatacacactgctggagctggcatagaccaaatgctctatatggtgatgacgacaggcttccagaatattaaggaaccccatcaggttgctttctgcgtatgcatagggattgacaagggaataacgcactcccgcctgtgccgccagattacatacaatgtcgaagtgttccgcatcaaacagcgcagccagcaagtcacggtctgtgatatcgcctttcacaaaacgatagttggaatataatgtgctgacagtaagtcggccttcctctatattctcccgctggatgccacataactctttcagacggccatacttcagattgacatcataataatcgttcagattatcaatgcccaccacttcattgccttgctctgccaatgccttcaccagaaaagagccgatgaagccggctgctcctgtcactaatattcttttcatcatcttattcttttattttctgacttttatgaccaatcatcaagttgcggatataggacaagaacccaaaggattgtcccaaaatcaaaatggggtcatggcgcagcacaccataaatcactatcatgcaagatcctacgaggctgattacccaaaaggtaggcggaagcgccgatacctgtttacggctggaataaatccactgatagatgaaacggaaagtaaaaataaactgtcccgcagtgccgaatacaatcagccacacaggtatatcttcatttttcaaaaagttctcaacaaaatggctgctgtcctgcaatgtaccgatagctgccaataaaggagtgactgccaacagtatcctgaacaggacgggaatacgccgccacacgcctttcagacgcaaattgccgatatagatataaaacgaaatgaactgccccacgatgatagaaaaatcattgcgcaaccagccataataaaacatcaaataggagcctatcaaactgaacacccaaaacagtgtcggcgaaatgacctcatgtttcttttccgaaagaaaccattgtatcaggatacgggcggaaaaacaagcctgagccaataagccgatacagaaaatcagtatactcataggttattctctcccacttggtagttgatatatcgatgtgccatccagcggaaagcaaaacagtccttgaacggcgaaaccagtcgattccacagatgatacttcgacacgcctgcctgacgcggataatgcctcaccggtatctcataaaacttgcctccgtcctgcaactgtatcaatgccggaaggaaacggtgcatgccggtaaagaacggaacacgctttgcatagtcggtatgaaggattttcagcggacagcccgtatcggtcgctccgtcgtgcgtcatcatacggcggaaggagttggctatcttggactgcatccgcttgaacgcagaatccttgcgccgggcacgaatccccatcaccaagggatactcaggagcatacttcaataacaggtcaaaatcacgcacatcggtctgcatatcggcatccatataaccgacatactttgattcggccgtatcgatacctgctttcatggcggcagacaagcctctgttttgtttcagactgatataataaaaatgcggagtgtccttgcacgcttcctgaataagttccaagcttctgtccttagagccgtcattcacaaaaagtgcacatgcaggcacgggacatgccggcagataagcaccaactacttcctgcaaacgttttatattgtcttcctcattataaacaggaataacaatagtcaatgaataatttgctgtcttgttcattttttcttcaataaagttatatgataaacaaacttatcgttgtagcggctactgctttttgcccagcgattatcatcatattgtccaatatatattgtatcaatacttctcaaaagttttaccggcaattcttcttccgctctgccgtgagtgagtatggcacaaggcagaaccgattttacagaatccgcatgtgccatatccaacggacgaatcttccgtccggcggcataaacgagctctattcttaattcatccttttgattataatagaaaggaacatctttcagttcttccaaatcccgcgtccgggagacactcttcatctccgggttgttaatgacatttcccaataaaggaagcataaagcattctgccgacaagaacagaatcagcactccgccaaccagtttaatcggctgtaatcttactgccgaccggataaggcaggcagctatcccccaaatcagaaccgaaagtacagccagcgtcggcaaggagacatagccgggacgatagacaaaccaatatccggctatcggcaaaacagccaccaccactgccaccagccatgcattgacccgatacaccgctttatcggctttcgatgcttgcggagagcgcaaccggtctgcccagactataatcagataccccattgtataagcagccgacattaataccggtaacaaatacctgtttttcttttccggcaacaacgacagcaggacaacggtggagagcatccatagcaaagggaaaagatattctttcctttttctgtcttctttagaccataacgggagaaacagggaggaaagcaatagtattgcccatactccggtttcgaggaaaaagctccaatagtaataccacggacggacattccggttaatccatgctgccgactccttatctgccacgtatgacatggcatcgccatgaaacagatagataaacgcataccaccagcaaccaacaatcagacaaacggcaatcatcaccgcaagagctttccacttccctttcatcgacggccggtagatataacaataagaaatgaggaacggcaacaacaaggcatagaaggagacaggacctttactcataaacgacagccccataaatacgcctgcccaagtaaagtctttccaagaacaggctttggccgcaaatgccctgataaggaaataaatcgcccccatcataaatgcatggcaataaatgtcccacgaggccgtacgccccatcagaataatattgtaacaggtgcaaagcaaaatggtggaaataaaggcataacgcttattacgcatcacttgcacagccgtgagatagaagaaggcaaccagcaagatggctgcaaaacctgccatcgcacgctgaagagccagattgtcgggcgaaatcatctccgccactgcagtcagccacgtcggtaaaggtggtttctccaaacgcaaatctccgttcatggtcggtaccagccaattgccgtcatgtaccatttcacgggcggttaccatgttgcgtgcttccatgatatccggcacaacaacccgattattaataaaaaaggagatgatacatatcaataatatcacccatccttgcttgcttagcaatttatctttcatgctctaaatcaagttccaagttgagatgggtacaaaattaagtaaaaatacagagacttctcaatagtctgcctagaaaataagatagaataacaatcagacggataagtcctttatcagacggtacattctctctttggtataaagcgacaaaagtatctgcctgtttttcaacttcgtttcacggtctaagggtgtatccagctctttttgtgacagtttctccaattcataaacagtcagcccgtgagactgtgcccattcataaaccggatttacatgcgaaaggaatacttttgctcccaaatagagtgctacaataatatttccgatagcttcctgccgccaattgccgaacaaggcaacactgacatccgactgaagacgattatactcgtccaacggcataaaatccaataacggcgaaaaattctcacccaaaagcaatctgcctgattgaagaacatggtccacatatcctttcttacccgaataactcaacggaacaatcactcgtcgcgaaccgatatccaacttagacagaatacgcatcacatactcatggttgttagtgccggaagcggagttgccaatcatgatgctgttgccgcagacttcgctattcatcagctctttacccaaaataatgtccaaaggatagtaaaagaaatctttccaaggctttgattgcaattccggataatagcgcattaaatactgataatcgttttctgtcgtatcagtaacaatataatccactttctgcttgatgaagcgtattgtctttcgggcattccattgctgtttccatctgtcaaacggacgccacaacatattctgccgattttttcttttataataggaagtagtgggatcaatcatacggaaacctttggggaccaacagcttattatacaaatccatcccccatacaatccaatagacaaccgctccctgcaaatccagtttattaagaacatccatcttacgcttattgagcagatgaatatagacctcagagaacgaaaactcatccttgcgggcaaaaaattctgtccgcgaaagtacattggtttcctttcttacccatttaaaggaagaagtgcgattggtcacaacaaacagattctctcccggaaacacttcttcgaaggcatcaatcgtacgattgataatcttctcatcgttcaccaaatgaagcttcatctctctctgatgtataaaaagacttgatttgttcacagatatacttcacttcatcgggctccaaagcataaaacaacggaaaacgcaccaggcagtctgtgtatttatctgcctgtggcaactcttctacctcccacttttgattcttcacaaaatcacttttgtgcagactcaaataatggaatacagaatagacaccatgagatttcagataacggattaatgccgttctttcttcgggagtggcacacacagcataaaaggcatgggcattatttgttgcataatcgggcaacacaggcaacgacaagctcgaaatgccttgcaggttctgataatacatattccaaatctctttccgcttctgctggatggagtccaatgcttccagctgtgcccacaagaaagcagccacatactcgggcggaagaaaagaagagcctgtatccacccagccgtatttattaatctcaccccggaaaaattcggcacggttcgttcctttctcccaaaggatttcggaacgcttcacaaagcggggatcattaatggccaataagccaccttcgccgcactggatattctttgtttcatggaatgagaaagcggccaaatgacctatactgcctaacggacgccctttatagaaactatctattgcctgcgccgcatcttctatcaccagcaaattatggcgttcggccactgccagaataacatccatatcgcaagctattccggcataatgtacaggaacaatggcacgggtacgaggagttaccagggcttccagcttctgctcgtcaatacaggggttatccatacggctatcggcaaaaacaatcctggctccctgtctcacaaaggcaagggctgtagaaacgaaagtataagagggcacaataacttcatcaccgggctgaatgccggccagcatagcacacatttcaagtgcatcagtacaagaggtggtcagtaaacatttacaacttccaagcttttcctcaaagaaagactgacatttatgagtaaagttaccattgccacatgtttttccttctgataatgcctgagttatataatttttttcattaccggtcagccataccttattaaaagaaatagttttcattatatctttttctagtttattagttctcccatattggcttacaggcaacaaaagtagtaaaaataagtagaaccctttattcttttcaaagaaataatctatctttgtccacattatatcataacaataaatcatgaagcaaacttctgcctacagtatcggagtaattatctctacttacaacaacccggcatggcttgaaaaagtcctctggggctatctttttcaaacacatcctgcggatgaaattgtcattgccgacgatggttccaaagaagacacccgccggctgatagaaagttttaaagacaaactgcctatcaagcatgtatggcatgaagataacggcttccagaaatcacgaatcctgaacagtgctattctggcttccgaatctgattatctgatattcacggatcaggactgcattccgcgcaaagactttatagccacacatgccgcatacgccgaaaagggttatttcctgtcgggaggctacttcaaattgccgatggatatcagcaaacagcttacttataacgatataaagagtgagaatgccttctctctctcctggctgaaagaacagcacatgaaatgcaacttcaaatgtaccaagcttattaagaataagacttttacgcgttttatgaacgccatcaccccgaccaaagccacatggaacggttgcaacgcctccggatggagagaagatatattcaccgtcaatggatttaacgaagaaatgcattatggcggacaggacagggagttcggagaacggatgttcaacttgggaatcaaatccaaacagatacgctattctgccatcgtactccatctggatcataaacgcccttacaagacaaaggaatcgatagaaaagaatatcaatatccgtcgtaatacacgtaaaacaggtatcacggagacaccgttcggaatcaaacaattacattaaaaaagctgccgggccctcatgtcctacacatgggtaccggcactccggagaaggaggagaaaggataacaaaccgtttatcgtcttcccaaatcgtcgtatacactttgaagaattgctttgcctttgtctatacgggtattggttccggcaggttcctccagcaatatatttcccgaattattatcaaccactgtcactcccgtactgtcacggaaagcaaagccattattgaaactataaaaagcaaacgggtaggtgtaatcactgcccaacacattacggctgaagttgaaagaagaatgatccaaacccagttgccccaacaaagtagcggctaaatcggcctgattcataatcttgtctatttttaccggttgcttcactgctcctccaagccacagcatgggtatgtgatagaaccggggggaagtgttcagcccttcacggggataataaaaaccatgatcgggcaaacagataaccagtaaatctttccacaccggagtctgtttcaatttctctataaatttgcccaggcaatcatctgtaaaggcaaaggcattgggaatctgttcgtccaagcgatgataaggaacttcaaacggttcgtgactgctcagagtaagaaaagccgtgtgccacggagtttcttttctatctttcaattgattgtacagatactcaaatgtaatatcatcatttactccccatgcattactggtctgttcggctaaagagaaatctttgtcggcagtaagacgctgatagcccttactcaacaaatagctcttcatattggtaaagttgatatctcctccataaagaaaatcggtcttataccccgctttcaccaattcctctgcaatggaaggcaaagtgcggctctttgccgggattttcatgaccgaggccgtcggaagtcccagatatccactgaaggtacagacagtaccgcggtcagtccgaaaactgttggcataacagttggtaaagaaaacaccctcttctgtcaagcggttgaaatgaggagctacatcgggaataccgcccagaggttcgataaaagtacctccataactctccatcaaaatgataagaatattggggcgctttgtattcaacacctcaatgatactgtctccatctgtcgaaggataaagcccgtcaaacaacccggcgcgtttttcttcttcgaagaaattaaattcagaagcaaagtcctgcgatttccccatagaagaaagcaaactgaaatcaggattgacagccgaatgattcaaaaactgctcgctgctgaaatacacctgaccgacgttggaagtcgactcggtaactcccccacggataatgataaacaatacgccgcctatcagcaacatggctcctgtggctgccaccctcttccgcgcagcagttaataccgaaggagttattttcagcaatatccacgtattcagcacaataagcaatactatcgccagcacccgcagcaggatgaaaccaatcgaaacacttgccaaagcctctttgggagaatcaatataaaggaaaacagaggcatccagtttaaagccccagaaaggataaagccccatgtctgccacaaatataacagagacaagagtggcaacaaacgcataatatccccaaaggattttctttaacggaaaccgccgaaaccaaatactaattaatataagaaggaaaggaaatgcggtcagataaccggtcatggccgcatcaagaccggccccgtgaatcatcacgtgcagaaaatcagtaaagccgaatcctttttcaatagcgccattataaagcataaataatggcttctgcaaaataaatatcagtaagaccgtaaagaaatacaggctgatataagcaatccgtttcttcatatccttaaattattatagatatctttatttccgcccgaagtctgcgggaacctctccccaccggtcggtctcccatttcaacaagggagtggtataagcattatttttcaaccaattctcggcccgctctatcatctgaaatagttcctcggtctttggcgtacgttcgagcttggtcttgcattttttctgtttcacccaactcagggcattccggctatctgagtaaacaggcatattgatgtttttttgcttcatcaatgccaatgcatgcacaatggcaagaaactcaccgatattgttggttccatatacaggaccgaaatgaaaaatttcctgtccggtaagaagataaaccccacgatattccataggaccgggatttccgctgcaagcggcatcgacagccaaacaattcatatcaaagttctcgggaagttgccggggagtttcttctttcttcaccgcattctttcccacataatggaacgcagaggaagcaaatgcctgttctgcttcttcccgggtgtcaaaggatttgtagagtgcaccttcataacccttaatctgtaactggcaatcagtccaggaatgatatacccccggactgactcctttccatactacatagtatttttgtttttttgccatctgctttgagattacaccctgcgtgtgagctgcttacatgcgctccggcacttcaatacccaacagacccatcgcactctttacaatcttacccacattggcgctcaatgccagacggaaaatcttaagtgcttcgtcttcttcacgcaaaatgctgaaatcatgatagaactgattatactccttcaccaaatcgtatgtatagttggcaataatagatgggttataatccgtacctgcttgcttcacaactgtcttaaagtcagccaacatctgaatcaagccttcttcttttgtactcagttgcaatcctgccggaatcacttcgggaatagcgatacctgattcggctgctttacgcaacaccgaccgaatacgggcataagtatattggatgaaaggtcctgtattgccattgaaatcaatggattccttcggattaaacgtcatgttcttacgtgcatccactttcaggataaaatacttcaaagctcccaagcctacaatgcgggcaatatcatcggcttcttctttagacaagccatccagcttacccagctcggctgaagtttctttcgcagtctcaatcatagcttccatcaaatcatcggcatccaccacggttccttcacggctcttcatcttaccttccggcaattctaccataccgtatgagaagtgaaccaatcctttgccccattcaaagcccagcttatcaagcaagatggacaatacctgaaaatgataattctgctcatttcccactacatatatcatcttatcgataggatagtcctgaaaacgaagtttggcagtaccgatatcctgagtcatatacaccgaagttccgtctccacggagcagcagcttgtgatccaatccttccgcagtaaggtcggcccataccgaattgtcttctttgcgatagaagaagcccttttcaagaccttccatcactttatcctttccttccagataggtattcgattcgtagtaaatcttatcaaaaccaacccccatcatcttataggtctcatcaaaaccggcatacacccaatcattcatctttttccaaagcgcacggatttcggggtcgttagcttcccacttacgcagcatttcgcgggcttcctgcatcaaaggtgactcagcctcagcttttgctttagcttcttcctcgttcatcccttctgcctgatattgagccatcagctcttttacttccgctttgtaatgcttgtcaaaagccacataataatcgccaatcaggtggtcgcctttcttgcctgacgattcgggagtttcgccattaccatatttcagccaagccagcatagacttgcagatatggattccacgatcgttcacaatattggttttcaccaccttattgccatttgccgccattacatttgccaacgcattacccaacagattattgcggacgtgtcccaagtgtaaaggcttgttcgtattcggagaagaatactcaatcatcaccagcggagagttttcagtagctttctcgatgccatattccggttgagcctgaatggaattcaacagctcaatccagcaatccgaggcaatagtcaggttcaagaatccttttaccgcattataagcagatatcagctcaggagcattttggcacaaatatgcaccgatttcctgtgcagtctgttcagggcctttcttagacattttcaagaaagggaaaacaaccaatgtgaggtgtccttcaaactctttcttggtcttctggagctgtaccatttttgctggtacttcctgtccgtacagcatgttgatagcgctgataatggacgcggtaagtttttcttctatattcatagcgtgtaagtacttatttgttattgagttgcaaagataaacattttagatgaaatcttttctatcatcctctatttactataccaacgttgataaacccgttcagttcttcttcaaactttcgggagataccaacttataaagcttgtcgctgggacgtatcttttcgggaactttaaatgaaacatgctgacctttccgcaccacatctaccggcttcaaatcgactcttgcctcatccaatgtgaagaatacggcacctgtggtaggccctgttatcaacaacttgtcacccaccttcatttcggccgcctccaccagaaactcagccacaccgatattggagaagtatttaatgccttttcccacatatactttacgttcggtggcttcggaaccataattcctgctccattcacccaatcgctgtcccagataataaccattccagaatccgcggttaaagactgttttcaggcgctcatcccacttctgtttcttttcctctgtaaacgtaccttccagataagaacggatagcatctttataacattccaccaccgtgcgtacatactcagggccgcgggcgcgcccttcaatcttgaacacacgcacaccggcctcaatcatttcatccatgaaatgaatggtcttcaagtctttgggagacatgatatatttattgtctacttccagctctatatcactttctttatccttcacttcgtatgcacggcggcaaatctgcatgcaagcgccacgattggcagacgcattcatctcatgcagactgagatagcacttgcccgacactgccatgcataacgctccgtgacagaacatttctatccggaccaactcacctttcggcccttttatctgttcattccggatagtatcataaatcactttcacctgtttcagattcaattcacgtgccagcaccaccacatcggcaaagcgggcatagaatttcagagcctctgcattgctgatattcaactgagtggagagatgtacctcctgtccaatctcattacaataagccatcaccgcaacatcggcagcaatcacagcactgattccggcttcttttgccgcctccacaattgtacgcatcaaggcaatatcctcgtcataaataatagtattgatggtcagataactcttgatggcatgtgcatcacaaatctgcgctatctcgcgcaaatcattaatagtaaatgtattggcagaccgggcacgcatattcaggctttcaataccaaaataaatggagtccgcacctgcctgtatagcggcagccaacgactcacgcgagccgacaggagccattatttcaaagtcttttatagaaggtttcattattcttttgattatgtgtgtgcaaaggtaggcttttttccgtatttttgcagccaaataactgttagaatatgaaaatacgccatatagacttgggagaacaccccgttttattagctccgatggaggatgtgaccgacccggctttccgcctgatgtgcaaaaagttcggtgccgacatggtatataccgaattcgtgtcggccgatgccctgatacgttcggtagggaaaaccatgcaaaagctgaacatcaatgacgaagaacgccccgtagccatccagatttacggaaaagatacggcaacaatggtagaggccgccaagatagtggaagaagcacgtcctgacattctggacattaacttcggctgccccgtgaagcgcgtcgcaggcaaaggagcaggcgcaggcatgttgcagaatattccgctgatgctggaaattacccgcgccgtggtggatgcagtaaagattcccgtcaccgtgaagacacgcttgggatgggacaacgaccataaaatcattgtcagcctggccgagcagttgcaggattgcggcatcgaagcgttaaccatccacggacgcacacgtgcacagatgtataccggtgaagcggattggaccttgataggcgaggtaaagaagaatccgcgcatacatattcctgtcatcggcaatggagatgtaaccacaccgcaacgtgccaaagagtgttttgacctctatggagtagatgccatcatgatcggacgtgccagcttcggacgcccctggatattcaaagaagtgaagcattatatagaaaccggcgaagaactcccacctctgtctttcgactggaaaatggatgtcctccgccgggaagtgttggacagcgtcaatctgctggacgaacgccgcggtatattgcatgtacgccgccatctggctgcatctcccatatttaaaggaattcccaactttaaggaaacgcgtatcgccatgcttcgtgccgaaacagtaaaggagcttttcagtatccttgactatataaaaggcaactatactctttaatcatcattggaatgccgatggtgtctgcccttcgtgctgttcttttctacagtacgggggtttccgctgtaagacacatcgctattcttgccttctttattgatgattatcttttcggaagcatagcacgaaatgtcgccggtactacgcggagacgtataaaccgtagcttgttttgctttcaagtaagaacccgcaatgtcaccggaaccgcttaacgaatagttagctttcgcacatttgcccgataacgtaacatcgcccgaaccattgacagtaccattcacttcatcagccgaaataccttttatattcacatcacccgaaccgttgacagcactattcactctatcggccgaaatgctcttcacagcaacatcacccgaaccattgacagccatattcatttccactcccgaaacatcacctaaggcaatatcgcccgaaccgttgacagcgacattcatcttacggcatttcaccttgtcggcgtcaatgtcaccactgccattcaccgtccagtcaatgccatggttcacgtcaactccattttcaaagataatatcacccgaaccattgatcactgcacttctcaccatgggtgcagctacacgtagttccaggctggcgccattctcaaaagaaacggaatatccttttttcaactcaataatcaaggtacgattttttacatacacttgcacaatatcctgcaagttatccggtacagagagctcaagttcctgtttccccgaagtttgggtataaataatcttgctgcttccattcaggcagaccgcatcaaaaccgcccacattcacttcctttgtcacattgttcttacttgctctgattctctcactcaaagattctgcccataccgttgtagatactaacgccaaggcaaataacataaaaatagatactgtttttttcataatattatcgtttttatatatgttagacgtatctgaccgggcaaacgttgcatcctttatgcactttttttaaatcaatttgctccgacatcagtcggaacaagcattcccgcccttcagattaagcctttccataagtcggattactacagactgccacaatggaccgtacagtctgctacggtagaccgtacggtctgctacagtggactgtacagtccattgccgtagactgtaataatcttccgtttaaaaagccttagccgacaataagaaaccgcctgcctctctatccgtttctatctggccaccaattggaacaccaccgaagcgaaccagcgtttatacatccacgtagccgcaatataaatacaaacagcagaaacccaaccggcaatcacatctatcagataatgtgcctgaatataaaccgtggcgcagcaaagaagcacataaaagggtgccaggaaacagcataacttcttatttacccgataggccataatcatgatgatagtggaaataccgacatgcgaactggggaaagccgcggtaggacgttcgcccacctcctgagaagcctctacaagattataaaagaaaccatgatcgaaaccgggaccgggcaacagaatatcattgtgattaaaataatctccaatcgccggaaagtgttgcgccatcacgttatccatgccgatggcgggaaagtaaaactgcggaccggctacagggaccaatatataaataagataatagatgaaaaatgaggtaaccaatacaaaagataccttttcaaaccattcaaaacggaaaaggaaataatagattgtcactatcgcaatcatcggataataagcaaaatagcctagattaaagggctcgctgaaccacatggacgggcaaagttcgctgaactccaccgatggctggcaacggaacaggaattgttctgcagaggcaaagaaattatccagattcgggaacaagcggttgaactcgaaggtatcgggataccaataagccaaaaatgccatttgtacagccatacgaatgaatgcggataatttacaaggatatttatgatacaaatatatcaatgcaaaagtgataaccacaatacctgcacgttccagcaacattgtgccgggatgatccatgcgcggccacaatatcaaaaccataatcgtagtgagagcattatatatcaagctgatactctcgacggcaaacaatccttttacactgtctacacgtttgaataaatttaaagccatccttctttcttataccaggcaataatctcttttactcccctttccagcggatattcgggacgatatcccaattcatccgtcaaaggagtaatgtcgcattgccagttgcgttgtttcattattttatatttatcacgattcagcgtgcttacctttcccaagcaacgcgctgaaaattcagcgagcaaagatacaacttttaaaataaatagcggacatttaaagtgtataacccacggattaccaagctctttttgtattaaatcggagaaagcacggctggaatatacatttccgtcacttacaaaataggcacgatgcttcactttatgctctatagccagatagactgcctgcaccaagtccttcacatagataaaggtaaggtcctgacgtttgaagccggcggcaaagtctacgtgctgtttgattgatttggccatcaggaaataatctctctctcgagggccatagactccggtcggccggaaaatcacaaccgggaaaccggacaatgattgcaggtaatgttccgacttcagtttactgactccataagcggtattgggcatcgccgtatcatgttcattaatgggcgtataattctcttcacgtataggtccgaagatactaagcgaactgatatagataaattgttcgggaaccatatccaatgcttgcagcgcctctacgaaattacgggtataaatataatttccttgttcaaactcttctttatgacgacatttagtcacacccgcacaatgaatgatataatcccatcctccatgcatttgtttgtgaaccgtcaattgctccaccagccttccgggatgagcaaaatccagttcggcaaaccggatacgggaatccttcaaatacttgcggctactgcttttacgcactcctgcccatacctgcatgcctctttccaagccgccttccaccagaaaactgccgataaacccgcttgctccggttaccaatattcttttttccattcttccttatcacattttacttcaccggttccacatgaatacccacatgggtatcttctccatatttttctttcaatttccgttcgattgccgtagctgtctcatgagctttatataacggtatatccccattcatacggacatgaatctctatggcatagttattcccgatacgccgtgtgcgcaaatgatgaggctctgttaccccgtcgaaagccagaaccgtctgctcaatctcgtgttccacgctttcgggcaatgatttttccagcagttcatcaatacaagggaccaagagcttgacagacactttcattataaagaaactgactatcacggcggcaatagggtcgagcaccacccaatgaggaccgagcagaatagctccgccaatacctgaagccgttccgatagaagacaatgcatcgctccgatgatgccatgcattggcaatcactgcttgagagttgtactttctgcccatacggacagtgtattgatacaatatctccttcaataagatagagacaagagccgcaatcaatgcaagcactccgggcgcacgcaactgttctccgcgcataaaggccaagatttcgccggcaccgttccataagattccgcagcctactcccaaaagtgccactccaatcaaggcagtagccaaagtctcatacttgccgtggccgtaatcatgtcccttgtcctgaggcttattggaaatacgaacaaacagtatgaccaccacatccgttacgaaatcggaaagagaatgtacggcatctgccatcatagcagcactatgccctgctatcccggccagaaatttaaaaataaccagcaggaaattagcaaagctgccccataaagtaactttatagattcctttttctctagctcttttctcaagttcagccataatcgtcatttttgaacggacaaagatagcacgtttcattcatattcaaccaaatttaatgcatctattgaaccgctattccaattattttgtttactttgtagcacataatacattaaaatacccatttatggctaaaaagaaagaaaaaaaagcaggaaaacgcatgaagaagagtgaactggcagaacgcctcatcaactatttccgtgccaagccgaatgaaacattcagcctcaaacagctctcaagcgggttaaacttaactactcatcctcttaaaatgctttgcgccgacatcatcctcgaaatgatagcggatgatttcttacaagaagttgaaaaagggcaatataagctgaacgaccacggactgattatgacgggtatttttcagcgtaaaagcaatggtaagaactctttcatcccggaggacggaggagagaccatctttatagccgaaagaaactcggcacacgccatgaacaacgacaaagtcaaaattgccttgtttgcaaaacgcaagaaccgcaaccccgaaggagaagtaattgaaatcatcgaacgggcaaacgatacattcgtcggaacgttgaaagtcgacaaattctatgctttccttgttaccgaaaaccgtacgctggcaaatgacattttcattcccaaagataaattgaaaggagggaaaaatggcgataaagctgtcgtaaaaataatagaatggccgaaagaagccaaaaacccaatcgggcaagttatggacatcttgggcaaggcaggcgaaaacaccactgagatgcatgccattctagcagaatacggactgccgtatgtatatcccaaaaacgtagaggccgccgccgaaaagattccggccgagataacggaagccgactatgccgaacgggaagatttccgggccgtaacgacctttaccatcgaccccaaagatgcaaaagactttgacgatgctctgtccatccggcttatcaaaccgggactgtgggaagtcggagtacatattgccgatgttacacactatgtaaaagaaggaagtacaatagacaaagaagcagaaaaacgtgcaacttccgtttacttggtagaccgcaccattccgatgttgcccgaacgcctgtgtaacttcatctgctctctccgccccaatgaggaaaagctggcattctctgtcattttcgatatgaacgaaaaaggtgaagtgaagaattcacgcatcaaacatacagtgattaagagtgaccgccgttttacctatgaggaagcacagcaagtcatcgagaccggtgaaggtgattacaaggaagaaattctggaattgaacaagttagctcaaatcctgcgcaaacaacgattggcggcaggcgccatcgactttgaccgcattgaagtaaaatttgagattgacgaaacaggaaaaccgttaagtgtttatttcaaagagtccaaagaagccaacaagctgattgaagagtttatgcttcttgccaaccgtaccgtggctgaaacaatcggcaaagtgcccaaaaataaaaaagcaaaagtattcccctatcgtatccatgaccttcccgaccccgacaaactggaaaacctgaattggtttattaaccgcttcggttataaaatacgcacttcgggctcaaagtcagaggtttccaaatccatcaaccgcctgctggatgacataaaggacaagaaagaacaaaacctgatagaaactgtttctttgcgtgccatgcagaaagcacgttattcaacagttaatataggccattatggattagcttttgatttctatacccactttacatctcccatccgccgtttcccggacatgatggtacatcgcttgctcacccgctatctggcaggaggacgaacggcacaaaaggataaatacgaagatttgtgcgaccatagttctgaaatggagcaaattgcatcaaacgcagaacgcgcttcggtgaagtataaacaagtagagttcatgagtgaacgtgtaggcttggagtttgaaggagttatttcgggagtaacggaatggggactctatgttgaaatcaatgagaataagtgcgaaggcatggttcctatgcgcgacttaggcgatgattattatgactttgacgaaaagaactattgcttaatagggcgacgtcatcataagaaattcagcctgggtgaccctgtcaccattaaagtggcacgtgccaacctggagaagaaacagctggactttgcattggtggagaaataaggagagtcactccgttcgtgagggtgccaaaacaaaaccggcctatcccatcgtcagctgtaggggcagggtttgcctgcccgaagacacaaaacaaactgttttcgggcgagcaaacctcgcccctacgaactaaacgacagcattatccacgttttgacacacccccataagaaacgaaaacgctcttccacatcataaatgaacgcttattttacccgtctattcaactgattattcgctttatccggttttgacttcccaatccgtttgccactcggcttttttttattcccttgctttaccttgcctgcgaaaggattcttcttatttgccataaaacatcttcttttttctgcaaaaataaactataaaacccaatattccttccatttattggcaatgatatagaatttctttacttttgtcctcattaacaatgatatatatgacttcattcgactataccggcatattgacccaagcagtagatgaactttccgacagccaatcttataaaggactgtttcatcaacacaaagacggagaccctctgccttccgctaaatcactatataaaattgtagagttagcccgttccatcctcttccccggatattttggtaattctactatcaacagtcataccattacttatcacataggagtaaatgtagaaaacctattcgacctgttgacggaccaaatacaagccggtttgtgtttcgggcaagaaaataataacaacgaaaacacgaacaacaatgaaccgtgccgtgaaacagcagcattgcttgccgctcgttttataagtaagttgcccgaaatgcgccgcattctggctaccgatgtagaagcagcctattacggagaccctgccgctacctgttttggtgaaataatcagctgctatcctgccatccgtgccatcagtaactaccgaatagcccatgaattgttgatattaggtgtacctctgattcccagatacattacagaaatggcacactcggaaaccggaatagatatccacccgggagcaaaaataggacatcatttcacaatagaccacggaacaggcgtggtgattggtgcaaccagtatcattggcaataacgtaaaactctatcaaggtgtcacgctgggagccaaaagcttcccgttggacaacaatggcaatcccatcaaaggtattccccgacaccctattctggaagatgatgtaatcgtttattccaatgctaccattttgggacgcgtgaccataggtaagggtgcaaccgtaggaggaaatatatgggtgaccgaaaatgttcctgccggagcacgcatcgtgcaacgcaaaacaaaagaaggagagaaaatttaaacctcaatcagcgggagagtcagaataaaacggcagcccactgtatattctttatcaataaccagtgttccacccagcttttcagcaatcaaccggcagataggaagccccaaccctgttccctgagtaaagtcatccaacttggtgaaacgttcaaaaacatattcctgcttatctgccggaataccttttcctgtatccgtaatgcgataaatgatttcccgctcatttctgtttagttcataatctaacacaatagaacctttatcggtaaacttagccgcattttgcaaaagatgaatcaatatttgtgagaccctgcccggattggtcttaatcaaacacctctctaccgaaggacgaaattccaattctactccctcatgcaccaacgtccgaacagcttctatccccgacaggcaacttacattgatatcttccaccttatcataagacacttcttcagactggtcaagaaaagagatatcaagcacatcattaatcagcctcaacaaattggcactattgacttcgataattgaaacaaactcttttgtttcctgattatcctgatatatatccaccaatagctgagaaaagcccactatggaattcaacggtgtacgaatctcatgagacatattctgaataaaggttgttttcatcatacttgcatattcagcccgttctttggccttcatcaactcatcggcaaaaatctttaagtccttattctgtttgttaacaatgagctccgacgctttcaagcgtttattgagtttataaatccgaaagaacagaattccactcattatccaaaacaaaacaacgaatatcaaaaccaaataaacggtatgcaattgatctttctgaacacttaactgaagctcattcctttcattcttcagctgctccaactccaaaatagaagaaaactcggtggcagaattctgcaactcttttgtacggacagagtcggtagccgcaatataatcatagtaaaactcggcagccttcagcttgtcacccatcttccaataaatattcccctgttcccttaccaatttataatccatatatttagaacggatgggagttgagtcattcatcattgcatccaccattttcagcgcctcactatattgtccggcaacactataataggtttccttgagataataaagccccataatatatgtgaccatattcttattctgtataaataacttctcaatatcctgtatatatttccatgcctcattcaactgccccttctttatataatataatgcatacgctttacgggtcgtaaaagactggtaatccgtttgtgccaaaagtattcctttttccagagcttcttttgcttcatcccatcttttcaactccacagccgcttgagcaagcgaagcataataagacgggatattgatatctgcaatattattctcctctactatctctatcgtcttcttaaaattatcataagctaaccggtaattatcctgcgtaagataaatgttcgccatacaacggtaacactccgcaactccccgcatataattatccttccgggcttcctgaagcattttctttacttcatacaaagcgatatttgctttattttgcttaagatagtagattatcagccgactcccccatgcaaaataataatatttcaattgattatatttccggctgatcagctttgcctccttcacactcttcagaatattctcctcatcattcttgtagtaataataatccagtttcaaacattttgcaatagccatcaaccgtctgttacccgctttctcgctccgcacgaacagagtatcacacatatccaaagcaatgggagagtccagattcgccttacattttttataatatgccatcaatatgctgtcgttttccacagcaacctcattttgccctttgccgcaacagcaacataaaacaaatagaattgtcagacaaagcttaagacacatcaaggtgagtaatttttcacaaagataacataatattttaagacgaaaacgaaatgtgataaaaaacgaaatgaaatataaaaagaaggagcaccggtactcctccatcccaaactaaagccaacctgttttcaaaaaacacttaagtctttttcagaaactccttggtcttttttgaaaacctcaaaatctctccattatgatacgttgacatccgttaagattttcgagttggatgtaaaacaaatgattgatagtacttaacctgttggggatgtggtgaataagatttcaggagagagaagaaaaaaagtgcatctcttagtaagagatacacttttcgctgcaaatttacacaaagttttgataattaaaactttttgagaagaaaaatcacaaggcaagtgcaaaaatatctttagtcttaagttataggacacttttttatcggcttaaactattaataataaagcggttatgtgcgttcggtgtatctcttactaagagatgcaccg

SEQ ID NO: 6933 - DNA, 223 bp, Unknown
  gut microbiota DNA sequence
gatgtgtatttatttgaaatagagacgataaaaagagagtacaatggactacctgtttctacaccgcgacaagcgcacttttacttccgaaaggcagaagaatctgcttttcagggctgcccggctttattgggagcagaagtatgcggacagcgaagtggttccgaaaaggaaagtcgattgtgagctatataaatatgtattgtattatttggaagtgcgc

SEQ ID NO: 6934 - DNA, 241 bp, Unknown
  gut microbiota DNA sequence
acagaagtatgcggacagcgaagtggttccgaaaaggaaagtcgattgtgagctatataaatatgtattgtattatttggaagtgcgccaagtgtttcttgacccgaagctttcactgaagaaactgagcaatatgattgaaacgaaccagacttatctgtcgaacgtggtcaaccgctacttcggttgccatctgaaagagttggtgaacacgtatcgggtggaatatgccaaggaactg

SEQ ID NO: 6935 - DNA, 399 bp, Unknown
  gut microbiota DNA sequence
tgaagtggttccgaaaaggaaagtcgattgtgagctatataaatatgtattgtattatttggaagtgcgccaagtatttcttgacccgaagctttcactgaagaagctgagcgatatgattgaaacgaaccagacttatctgtcgaacgtggtcaaccgctacttcggttgccatctgaaagagttggtgaacacgtatcgggtggaatatgccaaggaactgctccgttcgggcaagtgtctgccggaggaactgcctcaacgctgcgggtttctgtcgcgaagtacgttttatgctgcttttaaaaaggtgacgggtgtttctcccaaacgttatatgaaatatgaaatgagagcacagcactcagaatcaataaattatgtataaccaattttagt

SEQ ID NO: 6936 - DNA, 20072 bp, Unknown
  gut microbiota DNA sequence
tgatgacatcgataatttgcaaggacaaattgacaagcttgttactcccgagacgctgagtgctcagatcgctcagttgcaggctaatattgatgcagctaaacagagtgcaagttctgagctggcgacggctaaagctgctttggaagctgcgatagctggtaaggctgatactgctgttataacaagcttgacagagaaagtaactgctgctcagactaaagttgacaacttggaagataagttaggtactattgagtctactttaaattcagttaagtcggatgttgataacctgaaacaaaatgcaggtaaagttgaaatggctgaaatagaccgtagaatcaaagaacttagaaatgaattgctggctattatcggtgataagctgagtagtttggtgtttgttcctgctttgtatgaaaatggtatcgaagcggctcgttatccgtatgctcagggtatttataaagcatttacaggaaaaagcgaaggcaataatgctgagggagctaagtttactattgctgaaaaaaacacctttataaatgttgctgatgaaggtgattatacaattagctctttagctaaagctgtttatcatgtaaatcctaccacagcaaatttgactaatgtcgcttggggattcttatatagtgaacctgaatatgtggatgcatctgcacgtgctgctgtaactcctaaaccggtatacagtactagccgacaattggctaatggtgatttggaagtagtttataaagtagaaaaccctgctgaactgaaaattgtagctgataagaatgtgtctgtaatggctttgaccggtacttatcagaacgaagaagcgaaagatacaacagttacttctgattatgctgctattttgccggctgtagttacttttaaagcgattgcattcaatacattagaaacagaaaataatgcttgtgctttgggtgctaaacagcatgaactgtatatcaaaggtgaagatgcagctaaaaaagatgcaactatcgacgttaagtataatggcggtactcttgacttgactcagtatctgaatgtacattatactcaggctgatattaaggctgctgctgatgatgctgaacaccagattatggcgtatgctgatgtggctgattatggcttgcattttgaatatgaaatgttaggttataagacaggtgctaataatacagaagaaaataagtatggtacagtaaataacaatggtatctttactccttgctatgtaaatgcaaatggtaatactactccatgtagcacgaacgaagatggtatttctgctgtaggtagaacccctatcgtattggttaagttgatggatggcgaaaacattgtccttgcaggttatgttaagttgcatatcgttaaggatttgggtattcaaactttgcctgaggtatttaatgcaactaaaccttatgtatgtgatggtttcgaagatggcattacatgggatgatatgtccggtaagattattgaagcgttgaagatgaccaaggctgaatttgttaattcattcaattttgtagctggaaagacttacatcaccaatgacagtcagaagacatttgctgaggttgagaataacgtatacggtgagttgacaatctctagtgactttacaaatgtaacaactacgaatgatattattacatggacagcaggctttgatgaaatggatgccatttctaaattagaaggccgcactgtaacattgtatgcttgcttccagtctaaaactgatacaaaattctttgtatatgtaccgtttactgtgactatagcaaaacagccggaggtaacattcggagataagatcaaggcttactggtatcctactacagagtctactgtagctaagagagatactgtacgtatgaatgttccgagacctactactaatgataaggccgtagaggattattctaaggatttagatgataattttgaaggcaatgtggttaaagtagctaagacttctgcaactcaaaatcagtattatgatttggaagttttgggcacagcttattcttatgaatttgcggctacacaacctgaaattgcagatcctaaccagaatggtgttaagtaccagcttgttcgtggtaccgatcacactaaattgtatgtaggtacagcagatgttgaaggtaatcttgtagcttctattgctgctgatggaaccctgacttatgcagctaccgacagtgctaagaaactcttgaacttatacggtcacttgattcccaagcattttgcaaatgttgaaattgttgctacttatgatgagtgtaagttggctttaggcacagaaaacttcaaggtacgtttcttgcgtccggttgatgttcttgatggtgaccaagctaaattcattgatgctcaggcaaatggctcttctattgttttaggtgatttgtttgacctgaaggactggcgtgaagaagcattaatcgttaagaatgctgccggtgtgtacgaaagtgctgtagagaatggtgtttctttgtatccttattataaattcgagactattaaagttgatattgccaatgcagaatgtgacttgaccggaactagaaagaaagtttctgaagttacagataaattgcagttgtccgttacagaaaatggagcagaaagtgctactaatattgtaaacattacagaagttgcagctttgaatactactaagattgtttacaagaataatgaaggtaatgttcagaaattcacattgtggattccggtggaaattacttattattggggtactttgaaagctgtagccaagtgtgatgttgaatcaacaaaagcaaatcagtaatagaacaggtattgcattattagcaattgaatagatggaaggtgcgttgttgtcagcgcaccttttattattggtggactaatcttaattgtattgcaaatgaaaatagataaaatcgtttttattttattattaagttgcttgtcgttttcatgtggacgaaaagaaacaaaagagcgtatgaagacttatgctgatgcagaaaaagaattcgtcggctcattgacaaagacggattccattacggttctcgaaatgtctcagaagtgtatggatagcttgaaggagggtaatatagaagcagcgttaggaatgctttatgtggttaaagatggtgaagcggtaagacttacaaatgaaaatgcggaaaatcttaaaaagcatttcagtaccttcccggttgtagattatcatttggagaattttagtttttccactcagggatgtaatgatcttaaatataagattgaatttgcaaaaaaagatgtggatggaaatgctccgacgatggcttttatgtttaatcctgtgaagattgatggcatttggtatttatgcattaagcatcgaaatcaatccagtaaagaaatgctaaatccgcgggaaagtaattctccggctcccggtgaggtagtactacgcaagtcatagaatggctggttaaaataggaagagatagtgattattggtttacgatagatgaagagagaactgattccgatagaatggatattattctctcttcacttttattttttagaaaatagactcttgtgtctgtgtggtcagcagctccaacgccttgattcccataaccgagtttcctttccggtttaatctcgggctccatactgctaccgaataacgtaacggataaacagccgctatgccaccgcccacaccactttttccgggcagacccacaaggtaagaaaactctcccgcttcatcataaaagccgcatgtctgcataatggcattaatacgcttcacttgcgacgcagtaaggttgatatccccaaatgtgaatggctgtttgtggttggcaaaagctagaaaagctttggataaatcatagcaactcatttcaacagaacattggagaaaatagaaatggagaacgcgttcgatgtcattctctatattatgatgatacttcagcagattggcgatggctgcgttcaggtaacctttttcacgttcggatgccgctacttcttcattgtaattaatagtatcgtttccacaaatattacggataaagtggaggaaatcttcttcggggtgtgacagatgctttaaaagtatatctgccaatacaatggcaccggcattgatgaacggattgcggggaattcctttttcaacttctaactgtacaagggaattgaatgcagtgcccgatggctcttttcccactcttttccatagttcgtctccctcaaggctgaggcatacggcaagtgaaaagactttcgaaatactctggatggagaaacgagtgtcagcttgtcccagcatgaaagtttctccttgaatggtattgatgcaaatgccaaactgatccgggtctacttttgccaatgcaggaatatagtcagcctgtttgccgatgccggcaaaaggctgtatctcctgataaatattttcgagtatctgctgataattcatggtacagatattttatatttcaatataatcgccgttcagcttaatcagttcaatcagtttctctaccgcctgctcttcggggatatttttttcgatgcattcttttttcttatagaggctgattttacctcgtccggctcctacataaccgtaatcggcatccgccatttcgcccggtccgttgacgatacaacccatgatgcctatctttaagccttttaaatgagaggtggcggctttgattcgggcaatagtcgattccaagtcatataaggtgcgaccgcaaccggggcatgagatatattctgtcttgctggtgcggatacgtccggcttgcaggataccgaaagcggtagtatctattacggtgtgtggcagtgagccttgattataaatgaagataccgtcacagaaaccatcaaaaatcaatgcacccatatcggcggctgccttaatctgtaagttctccgcttcttcttcctgatagtattggaagaatacaacaggattttccagtccttccgtcatcagttcatgcaccatggcgcggtattcacctaaccggttggggtgattgctttgtgcaatgataaccacttccgggtgtaacttgagtgcggcaatcacttcttcattcattgccatataaggtaggaacaggaattttaactcagcctgagtatgatgtagttctatcatttgctgatagttgaatgcaggatacacattcttctcttcagggttccaggcatcggcatctaccagataagctgtttccttattacgtaattcaggaactgtttgtccacaataaatgtaatcgggcttgaattgtggattgacttcgttctctccttccaaacgttcggcaattactaccggaagattatctccgccaatgttgcgcacagcttttgttttacggcgtgaaggggagagataattgaattccggcgattcttttccgggaatgaaagggtggttttcacgtgccagtatatagtcgaccagtttacgagctaccggaatttctgcttccggggcttcgctcaatgatacgcggatggtatctcccaaaccatcggataacaatgcaccgatgcctaaagctgatttgatacgtccgtcttcaccgtcgccggcttcggttacacccagatgaagtgggaatgccatgccttctttttccatttccgctaccagcagacgaacagtttttaccatgacaaccgtgttggaagccttgatggaaattacgacatcggtgaaatgttcttctacgcagatgcggagaaattccatgcacgattctaccatgccttcgggggtatcgccataacgtgacatgatgcggtctgacagagaaccgtgattcacaccaatacggatggcggtatggttctccttacaaatattcagaaaaggaacgaagcgggtacgtatcttttttatttcttgcgcgtactcttcatcggtgtattccaacttcttgaaagtgcgtcccgggtctacatagttgcccggattgatacgtaccttttctgcgtattgtgccgctacatcggctactttggggttaaaatgcacatcggctaccaagggggtgtcatagccttgtgaacgtaatccgatatttatatttttcaggttttcggcttcgcgtacaccctgtgtggtgagacgcacgtattcaccgcctgcatcgataatccgtttggcttgttctatgcaagcgtcggtatccattgttatggtattggtcatactttggatgcggatgggattagcaccgcccatcggagtggctccaatgtttacttcagaggcttcccggcgtgaatagttgaataaatcggtcatggttaattccttatctttaaagaggttgtaaatgttcgttttaaattttcgggcagaaaatattctttccttctaatcaggataggatattttctgcccgtgttttttatagcgcagcttttcagcgatgcttatgtaaagaatcaattcgtcttatattcgaactttacttctttcaattcttcattggctttcactattttctttttcaagccggttttgtaatctgcaaatttagctgcgagctctgtatcactcaaagccaacatctgtacggccagaatagcggcattcattgcaccgttgatggcaactgttgcaaccggaattccgggaggcatctggatgatggaatagagtgcgtccacaccgtcgagaacagaccctttcacggggacgccaatgactggcagtgtagtgttggcggcaattacaccgggcaatgctgcggccatgcctgctgcagcaatgatgactttaatgccacgaccggcagcgttcttggcaaactcttccactgcttcgggtgtacggtgtgccgatagagcgttcatctcgaaaggtacgtgcatctcgtccagtagcttggcagccttttccatgacaggaaggtcggaggtgctgcccatgataatacttacaataggttccattgaatatttcttctgtattttattcgtttactaaagctttgtaggcttcggcatccatcaaatcattgatgtcatttgcatcgttaggtttgattttaaccagccaacctttgccatagggatcttggttgaccagttcggggttgtcagccaatgcttcgttttgttctaaaacttctcctgcaaccggaaggaacaggtctgatatagtctttactacttcgatagtaccgaaaacttctcctttttccaaagtctcgccttcggtagtgatgtctacgaaaacgatgtcgcccaattgttcttgtgcataatcgctaatgcctacgtatgcgatatcaccttctacgcgtatccattcgtgttcctcggtatactttacattgtttgggaaattcataatgcttttaatttataaggttaatactaaaattttttttcaaataaacaaaattcctatgacaccgcaaaacaatccgacaataaatcctgccagaacttctaataatgtgtgttgctttacgatgatgcgtgctgtccccagcattcctgatagcaaaatgaaaaagcaaagccatgatacaggattgaaattgaagatcaggctgtatgacaacagaccgcctaccatcatgccgctactggcaacatgggtgctgattttccatttgaagtttatcacaatgcagatgaccatgcagatgagtgtggctacaatgatgcccgacatatagcgtggcaaatgaatcttgtacatcgtaagcaggcaggctacatagctgacaatggttagggcgtatgggacgaatcgtttttcacgatgacccagttcatggataccccagccgtttattttctgaaaaagataaatggcaagcatcggcatcaagatggtaaagcaatacacgatacccaacaccaccaacttatattggaggggcatgatgcgtaaataggtgaaaaagaataataagaaaaaggcaagaaatggaaccataaaaggtgtgaatatgcctgatatgatgcgtgaacctatttctaacgggtcactttttccaatctcttttaaagaaccggtggtttcgtttgcttccatatttttatcttcttaatcgtgcaacaggaatatttaactgctggcgatatttggccacggtgcggcgtgcaatggggtatcccttggctttcagtatttcggccagttcgtcgtcagtatagggtttttctttgtcttcgttgtctacacattcctttagtatgcgttttatttcgcgaacggataattcttcaccatcttcggtggtgtagccgtcactgaagaagaacttcaacgaatatatgccgtagtttgtttgcacatatttgctgttgctgacgcgtgagatggtagagatatccagtttggcgcgttctgccacatcttttaatatcatcggtttcaatagtgactcgtctccttcaaggaaaaacggacgctggatgtcgatgatagtctgcatggtggtgagtaaagtgtgttgtcgttgttttacggcattgataaaaccttgtgcggcatctactttctgttttaaaaacatcagagcgtcttttgattctttactttgattctctttgttacgtgtatgttcgtccagtagttcggtaaactcacggctgaggcgcagttcgggaacattgcggttgttcagattgagggtgatggtaccgtcatcgaatgtttctacaataaaatcggggataatctgctggaaattacgccccatggcttcgcccaatgaacttcccggacgcgggtttaatttggtaagttcggccaatgcttcgttatattgctcttcggtgatgcccagtttctgaattattttatctttgttcttacgggtgaactcatcgcagcattttccgataatatccagttctatctgttttagtggggaatctgctttacggttgatctgaatgagcagacactcttgaaggttgcgtgcaccgatgccggccgggtcgaaatcctgaatgatttcgagtattttgttcagttcgttctctgtggtatagattccacgataaatggcaagctcgtccatgacggattctatgcttttacgcaggagtccgtcatcatccaacgatccgatcaggtattcggctatttcgcgctgttcgtcagtcaggtcttgcatggcaagctgctctttcaatatttcgtagaaggaaacagcatccgagaaaggtatctcttcggctactccttcgcggctgcggttgtgttcctgcaatttatagtcggggatgtcatcctcggtacgataatctcccagtgaaatgtcatcgttgggttccgagttatcgttattatcttcatttccttcaaagtcagtactctcttccccgttttcgggcgtttctcttccttcctccaaggccggattgtccagtatctcagaatgaatacgttcttccagctccacggtaggcaattccaacaacttcacaacaaggatttgttgtggtgacagtgtctgtacttgttgttgggcttgtgtttgtacttgacgtgagccttgtgccataatctctttactatttttgggggcaaaagtagcgatttgtatcgtaataatcttcctttttgccgggataattttaggggttcatcctaatattattaataattgaagctgcttccgcccagaaattctcttaataaggaggttggaggcaattctttatcttgcacagatacgaaatattcgaggaacttacggaggcggtaggcttccgagtattccggtcggttattgggcactttccgcagaataggttccagataatcttttaaaacagcaagctcgaacaataatgcagagttgaacatggcatctgcattttcctgataagggaaaatccatttgtcttctccggcacgtacgctgggccaacggctgatggtgtcttctgccgaatatccacgatatttgtagtcacggacaatgcggcgcaacagccggttgtcggtagtagggatatagttatggttgtccaataagatggttgtcagggccgatacatatattttatatttattttcagccgggatatgcggagtcagttcagggttcagtgcgtggataccttccaaaatcagtatcatattatcatctatcttcagatagtctcctttgaactcacgttgaccggtggagaaattaaaacggggcagttcgacttgctctccacgaagcaaagcctccagttgttgattaaaaaacttcaagtccaaggcatagagggattcatagtcatagttgccgctctcatctttaggggtatcttctctatttacgaaatagtcatccaacgaaataggataaggtctcaggccattggccataagctggatgctgagtcgtttgctgaatgtcgtttttcctgatgaggagggaccggatatcagaatcagtttgactccccggccgtttttcccacgattatagatttcatcggcgatgtttgaaatctttttttcctgcaaggcttcggatacgttgattaagtcggtagcatgaccattgttgcagactacattgaagtcgcccacagtgcctatgcctaaaatctgattccagcgacggtgttccttaaatacatccaacatcttttcttgttttacaacttcctccagtttgtcggggttttgtcggttgggaacacgaagtaacagtccgtcatagtatttcactatatcgaacaagcggatgtatccggtgctgggcagcaggctgccataataatagtctatagtgtctcctaacgtataataaaaggagtaaagattgcccgaagtttccagcagttttactttatccatcattccttttttgcggaacaactctaccacttcggtggtttgacattcaaatcgatggaagggaatatcttcttcaatgatttcctgcatgcgtttcttgatgcgctgtacatcgtccaaccctatttctctgccgatgtgtaaatcacaatagtatcctttggagacgggatgctccagcacgatgcttccatcgggataaagatcttcgacagctttgcacagcacaaagcataacgagcggacataagtacgcatgcccgaggaacttaatatattcaggaattctacatctttattattataggctctgtagttgagtccttctaccttattattaaccttggcactgacaggtccgtaggggatatctaaattaaaaccattataaatatccaaaagtgagcttccaattgggaaacttttaataatattgttatttttgcaacatatttgtaacataatcgtaatgtttattactaacgtagtgaaatcggctgttaatttaccgaataaaagggagataagccaattcctaccaaattaattgatgatggaatattctttttatgatttcttaaagctgctgggttcactggcgctattcctttacggaatgaaaatcatgagtgagggcctgcaaaagtttgcaggtgacaggcttcgtaaaattctcacggcgatgaccaccaaccgggtaaccggagttctaacaggcgtgctgattacagcattaatccaatcttcttctgccactaccgtcatggtagtcagctttgtgaatgcagggctgctgacattatcccagtccattggagtaattatgggagccaatatcggtactaccgtaactgcatggattatatcagcgttgggctttaaggtagatatcgctgcaatggctctcccacttttagctgttggtgtgccattgttattttctggaaagagtaaccgtaaatccataggggagtttattttcggtttctcttttttgtttatgggtctttctttactcaaaacaaatgcaccggacttgagtaaaaacccggagatgttgtcttttgtgcagaattatacagacatgggctttggctctgtgatgctgtttgtattgataggtacaatattgacgatgattgtgcaggcatcggctgcaacaatggctattaccctgattatgtgtgccaatggttggattagttttgaacttggtgctgctttggtattaggtgagaatattggtactaccattacagctaatctggctgcattgactgcaaatacgcaggccaggagggctgccttagctcacttggtatttaatgttttcggtgttatctgggtgttatgcctgtttaagccgttcacaatgggggtgtcatggtttgtagaagatataatgaagacgccggatcctgctgtggctgtttcttttaaattatcggcttttcatacgacatttaatatatgcaatgtgttgattcttatttggtttgtgaagttgatagagaaaaccgtttgcaagattatccctcaaagagagcaggatgaggaatatcgtttgcgttttattacaggcggtatgctttctacggcagagctttctatattacaggcgcgaaaagaaatcaatctgtttgccgaacgcactcaccgtatgtttggtatggtgcgcgatttgttgcatacaacgaatgagaatgatttcaataagctgttcagccgtgtagagaagtatgagaatatcagtgatagtatggaggtggagatagccaattatctgaatcaggtttcggaaggacgtttgagttctgaaagtaagcttcagattcgttcgatgcttcgtgaggtgacagaaatagaaagtataggtgacagttgctataacttggcccgtaccatcaaccgcaagcatcgcagtgaaatggattttacacagaaacagtatgatcatatcgaacagatgtttaagctgacagatgatgcattgagccaaatgattgcgttggtagaagatgaacatcatactattgatgtgaataagtctttcaatatcgaacacgaaatcaataattatcgcaatcagttaaagaaccagaatgtgctggatgtgaacaataaggaatatgattatcagatgggagtacactatatggatattattaccgaatgtgaaaagttgggtgattatgtagttaatgtagtggaagccggcagtaatgtgaaagaaaagaaagcataagcccggattcacactcgtgatagaataggttggatataaagtacacggcagacaaaatcgagagttatatactaaaagtgagataatgtctatatttatttttctgaaactgatagggtcgctggcgcttcttatgtatggcatgaagaccatgagtgaagctctgcagaaactgacaggtgggcaacttcgccatttccttggagcaatgacgaccaatcggtttacaggactgctgaccggggcgtttgtaacggcttccgtacagtcttctactgctactacggtgatgaccgttagttttgttaatgccggattactgacattggctcaagctatatctgtcattatgggagctaatatcggtacaacggtgactgcatggattatgtcagtgttcggttttcagatagacatgaataacctcattttccctctttttgctttagccgttcctcttattttttctaataaaagccagaaaaagtcttttggagaatttatatttggctttgcatttatgttcttgggattgacgacattacgtgaaaatgctatgcacatggatttggaacataatgcggcaatccttggtttcattacttcttgcaaagagtggggatttttgtctatcctgttgttccttttgattggcagtatcataactatgtgtgcccaatcatcggcggcagtaatggctattactttgattctttgttcgagtggtgtgcttgacttgtatttgggtatagccttggtaatgggtgagaatatcggtacgaccgtaacctcgaatattgctgcattgacagcaaatgctcaggcgaggcgtgcagcattggcacactttatctttaacacgtttggtgtgatatggatattgtgtatcttccatccgtttgtcaatatggtaagtgatatggttgaacatctttttcccggggggaatcctgaggtggctattacttataagctttctgcctttcatacagcattcaatatttgtaatgtgctgattcttatttggtttattaaaccgatagagaagatagtgtgttgggtaatcaaacctaaagaagatgaagaagaattccgactgcgctttattaccggtggactgttgtcgacggccgaactttctattgttcaggctcgtaaagagatcaatttatttgctgaacgtacccgccgtatgtttggtatggtacgtgacttgcttcatacatcgaatgaaaatgatttcaataagcttttcagccgcattgaaaagtatgagaatattagtgataatatggaattggagattgccaattatttgaatcaggtgtctgaaggtcgcttgagttctgaaagcaaattgaagattcgtgccatgttgcgtgaggtgacggagatagaaagtattggcgacagttgctataaccttgcgcgtaccattaaccataaatatcggggtaatgaagactttaccgagaaacagtatagccatattcatcagatgttccaactgactgatgatgctttgaatcaaatggtgtctttggtggaggatgaggggcatcaagtggatgtgaataaatcttttaatcttgagaatgagataaacaactatcgtagccagctgaagaatcagaatgtgctggatgtgaacaataaggagtatgattatcagatgggtgtgcactatatggatcttatcggtgaatgtgaaaagctgggtgactatatagttaatgtagttgaggcacggacagatatgaaagagaagaaatagtgctgttctttttatatctcattgtagtgatataaaaagcgtgagtatctgtacgaacccacgcttttttatagaattatttttggttgattacttttcgatatcaatcaattcaacttcgaaaatcaaagcagagaaaggtttgatttggccggtaccatgtaaaccgtaagccagttcttgcggaatataaagttcccattttgaaccgaccggcatcatagtcaaggcttctgtccatcctttgatcacttggttagcacgagtagtgtagggttccttgcggtcgtatgaactatcgaactgagttccgtcaatcaaagtacctttatagtttacttttacagttgaagaatcggtagggatggcacctttaccttctttgataactttgtattgaagaccgctgggagtagtttttacaccttctttttttgcattttcagccaagaatttttctcctgcggctttgttgtctgcatatttggcttccgtagcttttgcctgaatagcttctgctttagtctgaacaaacatgttggcttcttctacaggcataacgttctgctttttcagagttgcgacaaaacctgccaggaaatttgctttatccaagctttgagtagaatcgttgccaaataagcgttggctcatcatgtcaaacatacgtccgcctacttgctgtccgacttgcagacctaccatatatgcaacgtctttgggacttgttttgttggctccgtctgtaacacctttaaggaattctgccatgtaggtactgtcaacgccttgttgttgaagatacatatccaatccctgtgtattagcaacacccatcatataagaaagtgagtctacatcattcttcatgtttgcttttggtgcctgagctgtacaagatgctaagctggcagcggcagcgatagctacaaaaaaactaatttttttcatttgccttaaatactttaatattataatacttcaattaattctacatcgaaaatcaatgtgctgtgaggaggaatcatttcgccggcttgctgtgcgccataggccaattccgagggaatgaataatctccatttagagccttccgtcattagttgcaaggcttctacccatcctttaatcacttgattaacaccgaatacagccggttcaccgcgtttgatagaactatcgaacaatgttccgtcaatcaatgtaccttcgtaatgacatttcacacggtcggtagcccccggctttttaccattaccttctttgatgatttcatattgcaagccgctggggagtgttactacttcaggtcttttagcattttcttccaggaaagatttgcccttttcaatatttgctgcattcattttagcttccagttcttcgaaatatttgttcacgatttcgcgcgcttcattatgactgatagctgtctcttttccatctaatacgtctttaattgcctgagcaaagtcattcacattgataccttgagcacccatgctcagcaaattttggccgattcccaggccgatagcgtaactaaatttatccataactgtttattttataagatgtttttctacaaaacgcacaaaggtaggtcttttatttgaatgattatgattttaacaatttaatttttcttatttttgtgtgtctagtttaaagaggaggctaaaaatgaagaatttagtgattctgaccggtgccggaatgagtgccgagagtggtattagtacctttcgtgatgcgggaggactatgggatcaatatcctgtggagcaggtggctactcccgaagggtatgttgcgaatcctcagttggtgattcagttttacaatgagcgtcgtaaacagttgttgcaggttaagccgaaccggggacatgaactggtagctgaactggagaagtattttaatgtaactgttattactcaaaatgttgataatctacatgaacgggccggtagcagtcatgtgattcatttacatggcgagttaacgaaagttacttctactttgcaacccaataatcctaactatataaaagaattgaagccggaagaatttgaggtaaagataggagaccttgctgctgacggctcgcaatttcgtccttttatagtgtggttcggggagtctgtacccatgattgaaaaggcgattgagtatgtcgaaacggctgatgttttcttgattgtagggacttctttaaatgtatatccggcagccggattgttaaattatgtgccccgtgatgtccctgtctatttaatagatcccaaagaagtgcctatagcttcgggccgaaaagtgtatgccatacgcaaaggcgcttcggacggtatggaggaattgaaaaaaatattggtgagatagcttgtacatgaacaaattcatagtatatttgttatgtatttattaaaagaacatttgaaacataaaactgaaacaattatgaaaaagtacgtttgcgtagtatgtggttgggtatacgacccagaagtaggagatccggaaggtggaatcgctccgggaacagcatttgaagatattccagatgattgggtttgccctctttgtggagtaggtaaagatgattttgaagttcaggaagattaattccggttcataagcagcatatcaattaagtggaagaattccgcaggataatcagatggcgcagctaattattggttgcgcttttttattgttgtccttacatgattgtgataaaaagaaaagcgcaacctatatttcagattgcgctttatataagagttgaatagttttattttttttcttgtttttcaggacgaggcagcaatactttgcgagaaagtttgaatttgcctgttttcgggtcaatatcaagtaatttgacttcgatttcgtcaccttctttcaagccggcttcttcgattgtttcgagacgtttccagtctatttcggaaatgtgcaacagaccgtctttgccgggcaggaattcaacaaaagcaccgtaaggcatgatagaacgaattttgcctacgtatacttcgccaacttcaggaacagcaacgatacctttaatgatacgcatagcgtcatcaatacatttcttgttagttccggcaatttcaatacgacctacaccgtctacttcttcgatagtgatagttgcaccggtttcttcctgcataccttgaataatctttccgcccggaccgataatggctccaatgaattctttaggaatagtcattgtttcaatgcgaggagcatggggcttcagttcagcacgaggttcagcaatgcattcagtaatcttatcaagaatgtgcatacgtccttctttggcttgattcaatgctttttccaggatgtcgtatgataaaccatcgaccttgatatccatctgtgtagcagtaataccgtcacgggtaccggtaaccttgaagtccatatctcccaagtggtcttcgtcaccaagaatatcagacaatacagcatatttttcttcaccggcattcttgatcaatcccattgcaatacctgaaacgggcttcttcattggtacacctgcatccattaatgccaaagttccggcacatacagtagccattgaagatgaaccgtttgattcaagaatatcagaaactacacgtacagagtatggatagttagccggtacttgtccttttaatgcacgccatgccaagtgaccgtgaccaatttcacgacggcctacaccacgttgagctttagcttcaccggttgagaaaggagggaagttgtagtgtaacaggaagcgttctttatgctgatccaatacatcgtctaccattttttcatccagttttgttcctaatgtaacagaactcaaagactgagtttcaccacgagtaaaaatagcagaaccatgaggaccgggcagatagcctacttcacaccagatgggacggatttctgtggtctgacgtccgtcaagacgcttaccttcgtcaagaatgcaacgacgcattgcctctttttctacatcgtgataatagcggtcgattaacggagctttttcttccagttcttcttctgtatactgagccttgaattcttcgcggatagcatcgaatgcatcttggcgttcgtgcttatttctgtttccggatgcagcaatagcgtatgccttttcgtagcaagcgtcatggacagctttgcggagttcttcatcgttctcttcgtggcaatattcacgtttaacagtagaacccacttcttccatcaattccatttgagctttacagtggattttgattgcatcgtgagcggctttcatggcagccagcaaatcctgttcgcttacttcatccatttcaccttctaccatcatgatgttgtcgtatgtagcagcaaccattagatccatgtcggctttttccagttgctcaaaagtcgggtcaataacaaactgaccattgatacgtgctacacgtacttctgaaatcggacctccgaatggaatgtcagaaacagctaatgcagctgaagcggccagtcctgccaatgcatccggcatatctactccgtctgctgagaacaagataatgtttacgtatacctctgcgtgaaagttatcgggaaataaaggacgcaaggcgcggtctactaaacggcaagtcagaatttcataatccgaagctttgccttctcttttggtaaaaccaccgggaaaacgtccgaatgctgaatatttttctttgtactctacctgaaggggcatgaaatctgtaccgggaactgcatcttttgctgcacaaacagtagctagcaacatggtgttacccatgcggagcattacagaaccgtctgcctgttttgccagctttcccgtttcgagcgtaatggttctaccatcgggaagctcgattgtcttaacaattggattaatcataaaaaatgttttaatataattttcgtctaaaattcgtgcaaagataggtatttattcttctaattgggtgaaaatgagccaaaaagttacacagattaccgttttttttattttaatgcgtaagaagctggataaatgctttgacaaaccgtgaaaagacgtatctttgcagcagaaatttattagaaaacacacattatat

SEQ ID NO: 6937 - DNA, 3653 bp, Unknown
  gut microbiota DNA sequence
gcgatgaaaaagaatgtatattttttgctcgcacttctgttgatggtactgagcgcttgcgataatgaaccgaaatttaaagtctcaggtgagattagcggtgccgataataagactttgtattttgaagcgtcgggactggatggtattgtggcactcgattctgcgaaactgggaagtaacggagttttcagttttagtggaaagcgtcccgagtcaccggaattctatcgtttgcgtctggataataaggtgattaacttctcggttgactctattgagacattgaccgtaaaggccggagctaatgactttgcaacagggtattctattgaaggatcggaaaataatatgaaaataaaagaattggtattattgttggctgatttgcaaaaacgggtggatcaactggcgcataaccgtaacattccggccggggttgctcaagacagtttggtgtcaatggtcaataactataagaataaagtgaaacgtgaatatatttttgcggctcctaatatgacttatgcatattttgctttgttccaagctttgaatgggtatatgctttttgatccgttgaccaataaagatgatgttaaatgttttgcagctgtggcaaccagtctgaataatacttatccgcatgcagaccgttctcgcaacctttataatatggttattaaaggtatgaagaatacacggactccgcggcagacagaactggatattccgcaggacaagataaaagaggctaccatcattgatattgagttgaaagatatcaagggaaatgtacgtcgtttgacggatttgaaaggcaaggtgatattgattgactttacggtttataataatgctatgtcggctgctcataatttggctttgcgcgagttatataataagtatgcatctcaaggactggaaatctaccagatttcgttggatgccgatgaacatttctggaagacgtcttccgataatttgccgtggatttgtgtgcgtgacgctaatggagcatattctcagtatgttacattatatagtgtgactaacttgcctgctgtgttcttggtgaaccgtgctaacgaattaagtgcacgtggtgaaacaattactaatttggaagaatctatcaaaaaactcttgtaaaaacataataatgagtcggatttgtttaaacatgttacatagcatggttttatacttgactcgtattgtttaaaaaactatctttgcagaacttaaaataatagagagggttccgacatattcagtgtcggaattctttttgtttttataggagtgaatataaacaatgaaaaatatataataattaaaaaggaggaaaacattatggcttatatgtcagaagagggttacaaacaattggtggaagagttgaaatatttggagtcagtagaacgccccaaaattgtatcggctatcgcagaggctcgagacaaaggagacttgtcggaaaatgcagagtatgatgctgcaaaggaagcacaaggtttgttggaaatgaaaattaatcagttgaaaactactattggtgatgcaaagattatcgatacgtcgaaactgaaaaatgacacagtccagattttgagtaaagtagaattgaagaatgctaaaacaggcatgaagatggcttacactatcgtggctgaaagcgaagcaaacttgaaattgggtaagatttctgttaatacaccgattgcacaaggcttattaggcaaaaaggtgggtgatgtagctgaaattactatccctcagggaaaaatcagtttggaagtagtaaacatttcgttttaatgtataaggcagggtcgcttcgtgcgggtctgccttctttaatactcatagatatggcaacaatatttagtaaaattattactggtgagattcccagttataaggtagctgagaatgaagacttttacgcttttctggatatcaatccgttggcaaaaggacatacattggtagtgcctaagcgtgaagtggattatatctttgatttggcggatgatgaattggcttctatgcatgtatttgcaaagaaagtggcattggctatacagaaatccttcccatgtaagaaggtaggagaagctgttattggtcttgaagtacctcatgctcatattcatttaattccaattcaaaaggagtcggatatgattttttcaaatcctaaattaaaacttgctaacgaagagtttgttgagatagctagaacaattaatgaagcctgggaaggcctgaagtaagtaatcctctttttctattatattataaaaagggcgtatcttgattgaaagatgcgccctttgttatatagactccggagtacttctgttgttatacgaatttatcgcctagtttaatctgaacatcgttaacgaatttacggatggcactttcatcatcttttttgcagacaagcagcacattgtcggttgcagcaaccaaatagccttcaagatcttgaagtactgccaactttccttccggtactacaacaacattctgtttgcaattatataataaggaattaccgttgattgctacattctcatttacgtcttttggcgaaacgtcatagagagaactccatgttcccaaatcagcccatccaaagtcacatagttgtacaaagacattgtttgctttttccataatgccgtaatcaatagatatgttgggacatgaggcaaagtcttcttcgccttcagataatttggagcatacttccggcattatttcgttaaaggcattgataattgtattgatattccaaaggaaaattccggaattccagtaaaactctccactttcgacgaataccttggcaaactccaattgcggtttctcaataaaggttttgactttaaagaaatctccttgtttttcttcatctatttgtatgtaaccgtaaccggtttccgggcggttgggcttaattcccagggtaagtaattgtggggagtgtgaaacaaactccaatccttttatgatagcttctttaaattcctcttcttttagaatcaggtggtcagatggtgcaacgatgacatttgcattgggatttatttttttgatatgataggaagcccatgcaatacatggtgccgtgcttctccttgtcggttccaataaaatttgttcttcttttaattcgggaagttgttcttggactaattccttatatagtacattggtcgttatgaatatattttctaatgggacgattttcttgtatctgtcgaatgtctgttggataagagaacgtcctgtaccaaagaaatcaaggaattgcttagggagatttttgcggctatatggccaaaatcggcttccgatacctccccccatgatcacacaatagttattgctgttcgtcatgatattgaatcgttttaaagtttgtgctaatataaggcttatttttatatttttcttgttcaatctaccataaatgatggtatatttatctttttttgaaaaaaaacgccgaaaagtttgcaggtatgaaaaaaagtcgtacctttgcaaccgcaatcgagaaacaaacaatgtttcaagagatgcccagatggcggaatcggtagacgcgctggtctcaaacaccagtggattcactt

SEQ ID NO: 6938 - DNA, 78392 bp, Unknown
  gut microbiota DNA sequence
cacacaaaccggatttcactcctttttataagaaaattattaaaattaaacttcctgtttaccaagtgtatagctactttaacaacctgttgaaaacttctcgaaatattttcttggttttattgtggggaattgtggggaattgtgtaattttacaacctgaataatataataaggtataaacatgagatttctcggcaattcggaagcaaaaacagatgcaaaaggaagagtctttttcccggctgtattcaggaagcagttacaaacggcagccgaagaatgcctgattttacgtaaagacacctatcaggattgcctggttttatacccggagagtgtatggaatgagcagatgaacgaactgcgcagcaagctcaatcgttggaactccaaacatcagatgattttccgccaatttgtatcagacgtagaaatcatcacactggacggtaacggacgttttctcattcccaaaagatacttaaagctggcagacatccggcaagaggtcagattcatcggaatggatgacactatcgaaatatgggcaaaggaaattgcagacaagccgttcattgcgcctgaagatttcggcaaggagctagaagaaataatggaaaacaacaataatgaaggattagaatgagcgaaacagaacagatatatcacataccggtactactggacgagagtgtaagcggaatgaacatccaacccggaggcatctatgtagatgtaacattcgggggtggcggtcattccaaagaaatactgaatcgcctggatcatacgggacgcttgctcagttttgatcaggacgaagacgccgaaaagaacattgtaaacgaccggcgttttacttttgtgcgcagcaacttccgctatttacataattttcttcgttatcataacatagaaggtgtagatgccattttagcggacttgggtgtttcttctcatcattttgatgattcggaacgcggtttctcatttcgttttgaaggaaagttggatatgcgcatgaacaaacgtgccggcatgacagcagccgatgtggtaaacacttacgatgaggaacgacttgccgacattttctatctctatggagaattgaagaacagccgcaagctggcatccgccctcataaaagcacgtgcagacaaaccaattgttacgattggtgatttcttggaaatcattaaacccttatttggccgtgaacgcgaaaagaaagaactagcaaaagtatttcaggctttacgcattgaagtcaaccaagagatggaagcattaaaggaaatgctttatgcagctacagaagctctgaaaccgggcggacgtttagtggttattacctatcattccctggaagaccgaatggtgaaaaatatcatgaagaccggcaatgtggaaggaaaaatggaacaagattttttcggaaatgtacaaacgccattcaagctgataaataacaaagtaatcgttgccggtaacgaagaggtgaaacaaaacccccgttcacgtagtgctaaattgagaattgcagaaaaaaaataaacgagatggaagaagaacaaaagcaaaatacgcaacaggccaaggaagagcacaccgctacttctcctaaacacatgtctatccgcagcatattaggaggagatattttagcaaacgacttctttaaaagacaaactcgtttacttatccttattatgatattaacggtgtgctacattaacaaccgttataaaagccaacaggaattgattgaaatagacaagctaaagaaagatttagtagatattaaatatgatgctcttacccgttcatccgaattaatggagaagagccgtcagtcacgtatcgaagaatatatatcgacggaagagagtcatttacaaacagcgaccaaccgtccttatctgataaaaaaagactaaaattatgatgccgaaccaaaagaacataatgacccgttattccttcatcatattgatgatggtattgataggtattgcaataatttgcaaagccggcgtcatcatgtttgccgaacggcaatattggaaagatgtagccgaccgttttgtgaaagaaaacgtaaccgttcgcccaacccgcggaaacattatctcttctgatgggcaattaatggcaagcagtcttccggaatacaaaatttatatggacttcaaagccggcggccatctgaaagactcattactgatgctctatatggactccatctgtgatggtctgcaccagattttcccggataagagcaaagcagaattcaaatcccatatattaaaaggtagaaaaaagggaagccgcaactacctgctttatcccaaacgaatatcctatatacaatataaagaggctaaacgtctgcccgtcttcaacttaaacaaatacaagggtggatttcacgaacaggcattcaaccagcgcaaaaagccattcggttcattagccatgcgtacattaggcgatatgtatcccgacattgagcaaggcgccaagaatggtttggaactttcttacgattctatactaaagggacgtgaaggtattactcaccgccaaaaagtgatgaacaaatacttgaacatagtagatataccgcctgttgacggatgtgatatcattacgacaatcgatgtcggtatgcaagatatcgcagaaaaagcattggtcgataaattgaaagaaattaatgcaaccgtaggagttgctattttaatggaagttcaaaccggagaaatcaaagctattgtcaatatgaccaaatgtgctgatggagtatacagagagattcgcaataatgcggtctccgatatgatggaacccgggtctacttttaagacagcctctatcatggtagctcttgaagacggaaaaataacacccgaccaaacaattgataccggaaacggtgtttataatatgcatggcgcccgtatgaaagaccataactggcatcgtggaggatatggcgtaatcactactacgcaaacattaatgtattcttccaatattggtgtgtcacggttaatagaccaaaactatcacgaccatcctgagaagtatgtgcaaggcttatataaattaggtatagcgtccccacttcatttggatatcccgggagcaggtgatccatttatccgtatgcccaacaaaaacaattggtcaaaaacagcattggcatggatgtctatcggatatgagacacagattcctcctatcagtacggtaactttctataacgctatagcaaacaatggtgtgatggttaaacctaaatttgtcaaggcgattatgaaagacggacaagttgtgaaagaaattccgaccgaggttcttaatccggcaatagcttctcccaaaacaattcaagagatacaagttattcttgaaaaggtggttagcgagggattaggacgacaagcaggttccaaacagtttcatgtatcaggaaaaacaggtacagctcaagtatctcagggaagatcgggatacaccaatggtatgcgccaatatttggttagcttctgcggctatttcccctccgaatctccccgatacagttgtatcgtagccattcagaagaatggctatccggcatcgggaggcggtatggccggccctgtattccgcaatattgccgagcgtgtgtttgcaaaacatcttgctcaggacttacaaggtgcgaaagattcaacttctatcttagttcctgacgtgaaacatggggatataggagctgcaaactatatactgaatcagattgatataagaaccaccggtctgtcaaacagctattcaattgacaaaccggtttgggggaacgttacgacaaatcccgacaatgtaatgttcagcaaaaaagaaataaataataaactggtaccaagcgtaatcggcatgggcgccaaagatgctgtttacctattggagagtatcggtttgaaaacccgtctaagcggaatgggtaaagtcaagtcgcagagtattcctgccggcaataccatacgcaagggacaaaccatacaattacgattaaattaatatagaagaaagatatgaaactggaagagattatcaaaggtataaccgtaagcgagatcattggcaataccaccaaagagatttcaggaatcaatatagactcacgtcttattgaaccggaacatgtgtttgtagctgtaaaaggtacgcagacagacggacatgcttatatcacaaaagcaatagaaaaaggtgccgttgcagtggtgtgcgagactcttcccgaaacattgaatgaaaatattacttatatcaaagtaggcgatacagaagatattgtcgggaaactggctactgccttttatggtgacccaacatcaaaactggagttggtaggcgttaccgggacaaacggtaaaaccaccattgccaccttattatataatatgttccgcaaattcggttataaggtcggcttaatatccacagtttgtaattatattgacgatgaagcagttcccacagaccatactactcctgatcccattacattaaatcaattattaggccgtatggcagacgaaggttgtaagtatgtctttatggaagtcagttcacattctgttgcccaaaagcgtatcggaggtttaaagtttgccggaggtattttcaccaatttaacgcgcgaccatctggattatcacaaaacggttgagaattacctgaaagccaagaaagcattctttgatggcttgtcgaaaagtgcttttgccctaaccaacctggacgatagaaacggcttggttatgacacagaataccaaagcgaaagtcagcacctattctctccgcagcctcagtgactttaaaggcaaagtacttgaagacggatttgaaggaatgctgctggacattaacaatgtagaagtcaacgtgcaatttatcggacgttttaacgcttccaatttattagccgtttatggcgcaggctgtctgttgggaaagaaaccggaagatgttcttcttgctttaagtacactacgtcctgttgccggacgttttgattccttgcgttcacccaaaggctatacagccatcgtcgattatgcacatactcccgatgcactagaaaatgtattgaatgccatccacgaagtattgaacgggaaaggaaaggtgattacggttgtaggtgcgggcggcaaccgtgataaaggcaaacgtcccttaatggctcaagaagcagccaagcaaagtgacaaagtcatcatcacgtcagacaatccccgctttgaagagccacaggatattatcaatgatatgcttgcaggattgaataaagaaaatatgcgtaaggtcatcagcatagcagaccgaaaagaagctatccgtacagcatgcatgcttgcccaagccaaagacgttgtgctggttgccggaaaagggcatgaaaattatcaggaaataaaaggtataaagcaccattttgatgataaggaggtattgaaagatatatttgctaatgaataaaccaacaagaaatgctatattatttatttaattttttagagcagtgtgattttcccggagctagaatgttcggttatgtatcattccgttccttgatggctgtcatcctctcattgttgatatctgccatcttcggagaatattttattaacttactgaaacggaaacagattacagagacccaacgcgatgcttctatcgacccttttaatgtaaaaaaagtaggcgttcctacaatgggaggaatcattattattgttgctatccttattccctgtcttttattggggaaactggataacatttatatgatattgatgctgatcactactgtttggctaggcacattaggatttttggatgactatatcaaagttttccgtaaagacaaggaaggcttgcacggcaagtttaagattatcggtcaggttggtttgggattaatcgtaggattgactctctatttaagccctaacgtagttatccgtgagaatgtggaaatacaaaaaggaggagaaatagtggagattgtccataaagctcaaaatgaaaagtcaacaaagacaacgataccattctttaagaacaacaacttggattatgccgattttgtcggtttcctaggtgaccatgcccaaactgccggatggatattattcgttttagtaaccatttttgttgtaacggcagtttcaaatggtgccaatttgaacgatggcatggatggaatggcagccggaaactccgccatcataggtctaacacttggaattctagcatatgtgtccagtcacatcgaatacgccggatatcttaatataatgtatatccccggcagcgaagaactggttatatttatatgtgcatttatcggtgcactcatcggtttcctttggtacaatgcgttcccggcacaagtgttcatgggcgatacgggaagcttgaccattggtggtatcatagcggtatttgcaattattatccataaggaattgcttatacccatcctttgcggaatcttcttgatagaaaacttatcggtcattcttcaagtaagatatttcaaaagcgggaaaaagaaaggacatatccaacgcattttcaagcgtacacctatccatgaccatttccgcactacattagcacaactagaccctaattgcagctatgtttttacaaaacccggcaatgtattccatgaatcaaaaatcacagtacgtttctggattgtcaccatcgtactggctgcaattacaattattacattaaagataagataaacaaaaattgattatggctaagagaattgtcatattaggagccggagagagcggtgcgggagcagcagttctggctaagaaacaaggttttgatacatttgtttcagacatgtctatgattaagagcaaatacaaagatatgctgaacgaacgaggcattgcatgggaagaaggaaagcatacggaagagttgatactaaatgctgatgaagtaataaaaagccccggtatccctaatgatgccccgatgattttgaaactgaaagcacaaggaacccctattatctctgaaatagaatttgcgggacgttatacaaatgcaaaaatgatttgtattacaggcagtaatggcaaaaccaccactacttccctgatttatcatatctttaaaaaggcaggactgaatgtcggtctggccggaaatatagggcaaagccttgctttccaagtagctgaatacaattatgattattatgtaattgagctgagtagcttccaattggataatatgtataaatttcatgccaatattgcggtgctgatgaatatcaccccggatcatttagaccggtatgaccataagatgcagaattatgtggatgcaaaattccgtatcatacaaaatcagacggacgaagatgcctttattttctggaatgatgatccgattattcagcgtgagctacataaatatggaattcacggacactactatccctttgccgagcaaaaagaagaaggagcagcagcctatgttgagaaagacaaggtatgcttcaccaaaccgattgctttcaatatggaacaagaagagttggccttgaccggtactcataatttattcaactccatggcagccagtatttctgctaacctggccggcattcgcaaagaatgtatccgcgaagccttaggagacttcaaaggagtggaacaccgcctggaaaaagtatgccgcgtaaaaggagtagactatatcaatgactcaaaagccaccaatgtcaactcttgttggtatgcattacaaagcatgaagacaaaaacagtcttgattttaggcggaaaagataaaggtaatgattacaatgaaatcgccgacttggtaaaagagaaatgtgtaggactcatttatatgggattacataatgaaaagctgcatgagttcttcgacccattcggacttcccacagctgacgttcaaagcatgaaagatgctgtggacgcagcctatcgcatggcaaagaaaggtgaatcagtactgttgagcccttgttgtgctagcttcgacctttttaaaagttacgaagaccgcggcgagcaatttaaagactgtgtaagagcattgtaaaagaggtaatcttatttatttcaacgtataaactgaaaattaaatagcatggacctgataaaagacttattcaagggcgacaaagtaatctggattatcttcctgtttctttgtttgatttccattgtagaggtattcagcgctgccagtacgcttacttataaaagtggagaccattgggggcccatcacccagcatagtgttatcctgatggtaggtgcttgtattgtggtactggtgcataacattccctgcaagtggtttagggttcttcccttcttcttattacctatatcagcagttttattggtattcgtaatggggatgggtatcattacaggtgaccgtgtgaacggagcagcccgatggatgacttttttcggcatccagtttcaaccgtccgagcttgcaaaaatggctgttattatcgttactgctttcattctttccaagtttcaggaagaagacggcgccaatccgaaggcattcaaatatattatgtggattaccggtatcgtattcatattgattgctcccgagaacggttcaacagccatgttactgtttggagtcgtttttctgatgatgattatcggtcgcgtaccatggaagcaacttctcaagctgatttctatcgtaggagtcattgccgtcatatttataggaatgattatggtaacacccgcaaagcaatatcgtgatataccgatgatgcatcgtgtagagacgtggcagaatcgtattaaagggttcttcgaagataaagaagcggttccggccgccaaatatgatattgacaagaatgcccagattgcccatgccaatatcgccattgcctccagcaatatcattggtaaaatgccgggcaacagtgtccagcgagatttcctttcgcaagcattttccgattttatttttgctatcgtcatcgaagagcttgggttgttgggaggcggctttgttgtcgtactctacatttggttgctgatgcgcgccggaaagatagctcgaaaaagcgaaaaagcttttcccgcattccttgtcatgggtattgccattttgctagtttctcaagctatgttgaatatgatggtggcagtaggtcttttccctgttacaggacaaccattgcctctcatcagtaagggaggtacctctactttaatcaactgcgcctatatcggcatgattctcagtgtcagccgatatgtagcagagaaagaagaacaaaagaaacaggaagaagagactactgccgaagtcaagttgcaagcagctacccaaattttgctggaacacgcacgagggctggtaacagcagaagcagccggcaaacctggaaacgaagatacgctttcggaggtttcagaatctattccgacagacgaaacaataccgacagaagcttccgaaaacaataaatcagtctaagactgaacatattaggagtttattcataactttgcatcaaaatagagcaagaaatggaagagaatttaagaattatcatcagcggaggaggaaccggcggacatattttccctgccgtatccattgccaatgccattaaagagcaacatcccgaagcggaaatcctgttcgtaggtgctgaaggcagaatggaaatgcatcgtgttcccgctgccggttatccgataaaaggtttacccgttgcagggttcgaccgtaagaacttgctgaaaaatatatccgttctttacaaactggcaaagagccagtggaaagcacgcaaaataatcaaagaattccgccctcatgcagcagtcggagtcggtggatatgccagcggccctacattgaaagtagccggtatgatgggaatccccaccttgttgcaagagcagaattcttatgccggagttacgaataagctgttggcaaaaaaagcctgcaagatatgtgtagcatacgacggtatggaacgtttcttcgaaaaagataaaatcatcctgaccggtaatcctgtacgccaagggttactcaatcatactatcagtcgcgaagaagccatccgttcctttgggcttaaccccgaaaagaaagttgtccttattttgggaggaagtcttggcgcacgtactatcaaccactgtatgatggaaggacttgaaaagatacgcacatcaggtgtgcagttcatctggcaaaccggtaagatttacattgatgaagttcgtgcagccgtggctaaagcaggggaactgcccatgcttcatgttaccgatttcattagcgacatggcatcggcatacagtgctgctgacttggtaatcagccgtgccggggccggttctatctctgagttctgtttattgcagaaaccggtcattctggtaccctctcccaacgtagcagaagaccatcaaaccaaaaacgcattggcgctagtcaataaaaatgcagcgctctacataaaagatgctgctgccaaagaagctttgttggataaagcaattgaaaccgtccaacatcctgaattgctaaagagtttaagtacaaatattgcaaaactggcctttacagactctgcaaatgtaattgcacgcgaagtctatgaattggctgatgattatagaaagagaaatgaatgttaatacactaaaatcagtttactttatcggtgccggaggcatcggtatgagtgcattggtacgttacttcttatcaaaaggcaagaatgtaggtggctatgaccgtactccaagtgaactgacggaaaagttgatagaagaaggagcagctattcattacgaagacagctcagaccaaatacccgcatcattccgtgacgcatcaagcactttggtcgtatatactcctgctattcccgaaacacataaagagtttacctatttccgtgaaaatggattcgagatacagaaacgttcgcaagtattgggcatgttaactcgtgccggaaaaggtctttgtgtagccggcacacacggcaagacaaccacttcgaccatgacagcccacttgcttcatcaatcccatgtaggctgtaacgcttttctgggaggtatctcaaaaaattacggaactaatttactgttgtccgataccagtgaatatgtagtcatcgaagctgatgaattcgaccgttcctttcattggctttcaccttatatatctgtagttactgctactgatgccgaccatttggacatctacggcactaaagaagcctatttggaaagcttccgccattacacttctttaattcgtccggggggagcgcttatcatgcgcaaaggcattgaattgcaacccgatttacaagaaggtgtacaactatatacctattctaaagaagaaggtgactttcatgcagagaatatccgtatcggaagcggtgaaatattctttgactatatttcgccattgggcaatattgatgatattcaattgggggtgcccattgccattaatattgaaaatggagtggcagctatggcattggcccaaatgagcggtgtcaccaatgaagagataaaagaaggcatgaaaactttccgtggagtagaccgtcgttttgactttaaaatcaagaacgacaaagtagtattcctgagtgactatgcccaccatccgtctgaaatccgtcaaagtattctttccatgcgtgctttataccgggacaagaaactgactgcagtatttcagccgcatctctatacccgtacacgtgacttctaccaagactttgccgatagtctgtcattgctggatgaagtaattttggtggatatctatccggcacgagagaaacctattcccggagtaagcagccgattgatttacgacaatctgcgccccggcattgagaaatccatgtgttcaaaagaagagattctagatgtactgagaaataagaatatagaagtattaatcactttaggtgcaggagacattgaaaactatgttccccaaatctgcgaattactgaacaaacaatgattaaacgaattttcatactcctgttcttgttactgataatagcttaccttatagtagcagttacagtcttcaataccaagcctgcagatcagacttgcaagggtatggaattgattatcaatgacagtatcgaccatggtttcatcacccaaaaagaagtactccgcttacttaacagtaagaaactgtctcccatagggaaaaaaatgggagatatcaatacccggcttttggaagatgaactcagcaagcacccattgattgaaaatgtggaatgctaccgcactcccggccgtaagataggcatcgaagttacgcagcgtttgcctttattaagggtaatggctgccaacggagacaattattacattgacagcaaaggaaaagtgatgccgatacccaacagttcggcccatgtagctgttgttaccggtagtgtagaccgtgactttgccacgaaagaattatataagttaggtatcttcctacaaaatcatcctctatgggaggcccaaattgaacagataaatgtcactcctgccaaagagctggaactggttccgcgcgttggagaacatattattttccttgggaaacccggcgattatgaggaaaagtttgaaagactgaagattttttataaaaaaggtctgaaccaggtgggctggaacaaatacagccgcatcagtttggaatttagcaatcagattatttgtaccaaaaaagagaagtaagatatggcagcaacagattttattgtagcaatagaattggggtcttcaaagatcacaggtattgcaggaaagaagcatccggacggaagtatacaagtactggccctcgccagcgaaccttcgtctgatttcatcagaaaaggagttatttataatctggacaagaccgcacaaagccttacttcgattatcaagaaactggaatcgacattaaaggcttctatcggaaaggtatatgtaggcatcggcggacaatcgctccgcactatccgcaacacggaagtacgccacttggaagaagaaactaaaatatcacaagagttaattgactcgctgatggacagcaaccgcgaagtacccatcatcgaccaagatatattggaggtagccccgcaagaatataaagtaggcatcaacttgttagcagatcctgtcggtgttcccagtgaccatatcgaagggcgcttcctcaacatcattgcccgtagcagtgttaaacagaatatcgataaatgtttccaccaggcaggaatagaaattgcagactatgtcatctcgccattggcacttgccaatgcagtactgaccaacagcgaaagacgttccgggtgtatgctcatcgactttggcgcagatacaaccacagtttcggtttataaaaacaatatcctccgccatctggcagttattcctttgggtggcagcaatattaccaaagatatttgcagccagcaaatagaagaagaggatgccgaagagttgaaactaaaatatggtaacgcctatatcgacccgtcaaaagatgaagaagaaacgcccaactatgccatcgacggaaaatgcagtattgaagcccacctattggaagatattgtggaagcgcgtgtcaacgaaatattggcaaacgtatggaatcagattgtgctctccggctacgatgacaaattattggcaggagccattgtcaccggtggtgcagccaacttgaaaaatatggaagaagccttcagcaaacgaaccaaactggaaaaggtgagaatggcaaaagactcccaactgagccttaaaggaggaattgaactgaaaaaagacggaatgtccaacaccatcattgcactgctggctgccggaaaagaaaactgttatcgccctgaacatccgagagaaccggctcagcccattcaaaccggactctttaccgaagaaggagaaagtgcagaagaaaaaagaagaagactggcacaggaagctgaagaaaaacgcagaaaggaagaagctgaaaagcaacgcattgccgactgcgaaagctttataaagaaagccatcgaattaaagaatgccgaaaaatataaagaagcattagctgctttgagcaaggcagaactactggatgtagaaaccaagaatgctcaaatacgagaattggagaaagaaatcaagcaattgaaaaaaggcagcagcctttggtcaaagctcggtaaaaaaattaccacactctctgacgacctgttgaaagaagattaaaagaaacaagtaaattacatcaccttatataatatagtaagattatgtctgatgaaactataatgccattcgatttcccacaagacaacccgactatcattaaagtaatcggtgtgggtggtggcggcggcaatgccgtaaatcacatgtataaagaaggtattcacgatgtaacatttgtagtgtgcaacacagacaatcaggcattggccgaatcgcctgttcccgtcaagctgcaactgggtaaagaaggactgggggccggaaatcgtcctgcacgtgcacgcgaagccgccgaagaaagcatcgaagatgtaaaacatatgctgaacgacggctgtaaaatggtatttatcactgccggaatggggggaggaaccggaaccggtgctgcacctatcattgccaaaacagccaaagacatggatatccttaccgtgggtatagtaactatacccttcttgttcgagggtaaccgcaaaatagaccaggcactggacggtgtggagcaaatgagccagcatgtagatgctttgctggtcatcaacaatgaacgcctgcgcgacatctactccgacttcagtgtcatgaatgctttcggaaaagcagacgacaccctttctgtagcagcaaaaagcattgctgaaatcatcactatccgcggtaccatcaacctcgacttcaatgatgtgaaaacagtattgaaagacggtggtgtggccataatgagtaccggatacggtgaaggagaaaatcgtgtgagccaggccatcaatgatgcgctgcactcgccgctgctgaacaacaatgatattttcaactcaaagaagattctgttcaacatttctttcagcaccaaaagcgaactgatgatggaagagatgaacgaagtgcatgatttcatgagtaagtttggcaaagatgtggaaaccaaatggggactttacatcgacgaatctctggaaaacaaagtgaagttcactgtactggcaaccggcttcggcatcaaagacgtaccgggcatggacaacatgctcaacaaacgcaccatcgaagaacaaaagaaactggaagaacaagaagaagaagaacagcgcaaggatgaacgccgtggagactactacggtcgcgacactttcaaaaacagcaacaagaaaaaacgccacaacatctatatattcagtctggaagaccttgataatgatgacatcatcagcatggtggaaacaactcccacttatcagcgcaccaagaccgtgcttgaaagcatccaatccaaagccatagccgaagaagaggaaacattcaataacaacgataccgaaaacggtggcataacaataacattttaacaactaaaattatagagaatatggatttatttgacgtaatcagcaacgatatcaaagaggctatgaaagccaaggataaagtgaaattagaaactttacgcaatgtgaagaaattcttcctcgaagcaaaaaccgctccgggagccaatgatacactgaccgatgatgctgctctgaaaattatgcagaaattggtaaaacaaggcaaagactctgctgctatttacaccggacaaggccgttccgatctggcagaaaccgaactggcccaggtagccgttatcgaagcctatctgccgaaacagatgggggccgaagaattggaagctgctttgaaaacaatcattgcagaagtaggcgcaaccggcccgcaagatatgggtaaggtaatgggcgtggctaccaagcaactggcaggcaaagcagaaggtcgcgccatttccgctaaggtaaaagagctgttggcataaagtctttaaacagcatagaaaaaagacggaagcgtttgcctaaaagcggctgaagtctttgaaaaaggcagaagagtttttctgaaaagaccttggtcttgtgtaagaaacactcttctgtcttttttatggccggtttgtattctctgggattcaacatatccaaccggcaccagtcaccggatgttgtctcctccggttttcaaacgctctgcatatgtttagaactccctacgttgtttcattagccggaataagcgtttgcatcccttcgattaagcctgtctgtcagtcgaattactacagtctccggcagtggactgtatagtccgttaccgtagactgtacagtccgttacagtggaccgtacggtctgttgccgtggactgtaataatcttccgtttaaaagactttggctgaccctaagaaacagcttactcttcctttgtcggtgatatgacatataaatccccaagaataatgactgccccgttttcctttacttcgtatttgaatccgcagaaaaatatcggttttcaggcaaagagttctttcaacacatccaatgatttaagcaaagggaaatcaggcaaatgcaagcgataataatcattgataatggtaagacaacggttgcgctctgcgcgactcatggcaaaaaggtgcatcgtctcataattcatccgcatcagaatattaatacgagaagcctcatccggcttcagaaatgctccatgcgaaggctgtatgggagtaaaacaagcattgagcaaatcaaagaaacatccctcatcataatcttctgtattaggatagagaccgagaaaacgggaaaagcgcatcaaaaataccaaatgaaaattggcaaacccatgctcacatccatccaaccaacgaatagaatgctccagataagcaaaaagcggcctgttctccgcctcctcacgcaatgcccgataaagaaactcggcaagaaacatggctatggccgatttataagggtcatagggcaaggtataaaacggataccatgatttagcctccttaacaggataaaggttagtattcgggcgatagtctgcctcaaactccaccatggcaagaggctgaaaaagcactgacttcactgtcgacttacgcgaacggggaattttcaccaggaatgaagcccgccccgtgtgctgcgtatagatatcgacaatgttcgaagtatcattatactttagactatgaagtacgattccaactgttttttgcaacatattcttccattattaagcctctatcatgcacaaaagtagtcattttcgggtaaaacgaacaaaaaactaaaaaaaatcactcgaatattttggagattaaaaaatagtttctacctttgcaaccgcaaaagagaaaaacactctccgacgcaaacgccaagctaaggctggcaattaaaggcccggccccttcgtctatcggttaggacgcaagattttcattcttgaaaggggggttcgattcccccaggggctacaaataaaaaataataaaagaacaaaactaaagattagtcgagatggcaaatcacaaatcatcactaaagagaatcagacaggaagagaagagaagacttcataacagatattatgctaaaacaatgcgtaatgctgttaaaaaacttcgtgagacttctgataaagcagaagctgttgcaatgtatccgggcatccaaaagatgttggacaagttagctaagcgcaacattattcataagaataaagcttctaacctgaagtctaaattggctgctcacattagcaagctcgcttaagcaaagtcttaaaccaaaagataaaataggctgaatcatgtgattcggccttttgtcgttccagaaaacaagaatccaaaatgctccggcattattccagccaagccataaatttaatttttttatcctccaagactccttctatatcagcatttttttgtatctttgaaagctaaataaagaaatcgaattaaacatgactgaagaagaaaagataaacggcgagaacaattattcggccagcaatatccaggttcttgaaggactggaggccgtacgtaaacgtcccgccatgtatatcggagatatcagcgaaaagggtttgcaccacttggtttatgaagttgttgacaactctatcgacgaagcgctggccggttattgcgaccacatcgaagtaacaatcaacgaagacaactccatcacagtgcaggacaacggccgtggtattccggtggactaccacgaaaaggaaaagaaatccgcattggaagtcgtcatgacggtactccatgccggaggtaaattcgataaaggttcttataaagtatccggtggtcttcacggtgtaggtgtatcgtgtgtgaacgcactgtccaagcacatgactacacaagtgttccgcaacggtaagattttccagcaggaatattcatgcggacatcctctgtactcggttaaggaagtaggcatggcagaaatcagcggtaccaaacaaaccttttggccggatgagtctatcttcactgttaccgaatataaatatgacatcctcgaagcacgtatgcgcgaattggcttacctgaacaagggtatcaccatctcgcttaccgaccgccgccagaaagacgaagaaggaaacttcaaaaaagaggtgttccactcggatgaaggagtgaaagagtttgtacgttttctgaaccgaaacaacgactcattgattgatgatgtgatttatctgaacacagaaaagaacggtaccccgattgaatgtgccatcatgtacaacaccggttatcgtgaaagtctgcattcttatgtcaacaatatcaacacgatagaaggcggtacgcacgaagcgggattccgcagtgcactgacacgtgtacttaaaaaatatgccgaagacatcaaggcattggagaaggccaaagttgaaatctcgggagaagacttccgcgaaggtttgattgccgttatctctgtaaaagtagccgaaccgcaatttgaaggacaaaccaagaccaaactgggcaacagcgaagtcagcggagccgtaaaccaagcagtaggtgaagcacttacctattatttggaagagcatccgaaagaagcaaaacaaattgtagacaaagtgattttggctgccacagcccgcattgccgcacgtaaagcacgcgaatctgttcagcgaaaaagcccgatgggtggtggcggactgccgggcaaacttgccgactgctccagccgtaatcctgaagaatgtgaattattccttgtcgagggtgactctgcaggcggttctgccaaacaaggacgcagtcgtgccactcaagctatcctgccattgagaggtaagattctgaatgtggaaaaagcaatgtggcacaaagcatttgaaagcgatgaggtaaacaatatcatcaccgcattgggggtacgtttcggtgtggacggtgacgatgacagcaaaaaagcaaatattgacaaactgcgttatcataaagtcgtaatcatgaccgatgccgatgtcgatggttcgcacatcgacactcttatcatgacgctgttctaccgctatatgccggaaattatcgaaaacggccacttatatattgcaaatccgcccctctacaaatgcagtaaaggtaagatcagcgaatattgttatactgaagaagcccgccaggaatttatccgaaaatatggtgatggtcaggaaaacggtatccatacacagcgatacaaaggtttgggtgaaatgaatcccgaacagctttgggaaacaacgatgaatcccgaaactcgtatcctgaaacaagtaacaatagaaaatgccgcgaacgtggattatatcttctcaatgttgatgggagatgatgtaggtccgcgccgcgagttcatagagaaaaacgcgacgtatgcgaatatcgacgcgtaatagttgtattcaactaaatatttaaaaattaaaaaaaaaccaatcctcacatcttacaatttgaggtagtcccgactcttcaccgagtcgggactttttatatacattctcccccttccacacacaaggctctctgcttttcatttatatttcatttccttttcccaaagagtaccatagtatttccttttgccatttttatcgatgaaatgggggaaaacagacgaatgcaaacaaaaagggaacttcggacaaacattctttttcttataatttcaatcacttgatgaagattatatgcaggaaagtcttaattttggaacattaaactatttggaatataaaccattaataagataataacatgaaactcacattccgaatcgaataccgcaccgcctggggagaaatgctcggcgcaaccttatgcggcaacgataaccaaccaatcatgctcagcaccggagacggaatccgctgggaaggcagtgccgaaatgacagacgcccccgcaggcatccctatctcctaccgttatggagtttatcgcgacggacaatgtatccggcgggaaagtggaacgatgccccacattttctgtcccggaaaaaaaagaaactgtcattatatcttagatgacttttggaaagaccttccacaagaatcctatttatatagttctgcattcagcggtgactaccaatctgccaacagtataaagacaatggctcctgccgattgcagtattacgttccgcgcactctgtccctgcttgcatcacaaacaccaacagctgggaatttgcggacgcggtgccgcattgggcaactgggactgcaaacaaactgtattgatggaagaaatccaagctaatgaatggacggtgacactgaatgccgccagtctggaattcccactggaatacaaatttgtagcctgcaatgccgatacaaaagaagtggaagagtgggaggcccacaataaccgcctgctctgcatcgatggaatgaaaaaaggagaaatctacctcactcccgaatccgaagtccgtttcacttcttctgcgcgcaaggtagcaggtactgccattccggtcttctcgttacgcagcgaaggaagttttggcgtaggcgacttcggtgatttgaagaagctgatagactgggcagtgagcacccaccagcaagccatacagattcttcccatcaatgacaccaccattaccaatacatggatggactcttatccctacaacagcatttcaatttatgcattccatcccatgtacatcgacctacgtcagctgggcaagttgaaagataaagaagccttggctttctatgaagaaaaacgaaaagagctgaatgcccttccccaaatcgactatgaagcggtgaacaacaccaaacgagcctatctgaaatcaatgtaccaacaaacggggaaaaaagtgctggtctctgccgagttcaaaaagttcttcaaagaaaatgaacattggctactcccctacgctgctttctcttatttaagagatcaatatggtactcccaatttcagccaatggcccgagcataatgaatatcatgcagatgaaatagccgccatgtgcatacccgaaagcgactgttacgaagaaattgctttttattattatatacaatacaacctacacatccaattattggatgccggcaattatgcacgcgaaaagggcattatctttaaaggagatattcccatcggaatcagccgcaatagtgtggaagcctggattgagccttattatttcaatatgaacggacaagccggtgcaccgcccgatgcattctccactaacggacagaactgggggttccccacatacaattgggatgtaatggaaaaggatgattaccaatggtggcagaagcgtttccgcaaaatggcagaatactttaccgcctaccgcatcgaccacatcttgggcttcttccgcatttgggagattccctcccattcggttcatggcttactgggacagtttgtacctgctctgccaatgagcgtagacgaaatacaaagctatgggctgaccttccaaaaagatttcatgacaaaaccgttcatcaatgaaaacatcctgaaccgcatttttggtgagaaagccgatagggtgaaagagacatttgtgcaacactgccacgatgatatttatgaaatgcgttctgaatttgatacacagcgtaaggtagaagcctactttgccgaacggaaagacgaagaaagcagaaatatatgcgaagggctgtatacactaatcagcaatgtacttttcgtacctgaccgtaaacacccttccatgtaccatccacgcatcgccgtgcagaacgatttcatctttgaagtgttgagcccggaagagaaggaagtgtttaaccgcctttataaccactattattatcaacgtcataaccagttctggtatcaggaagcgatgaagaaactacctatcctgacacaatctacatcgatgctggtatgtggtgaagacttgggtatggtgcccgactgtgtaccttgggtaatggaacagttgcagatactcagccttgaaattcagcgtatgcctaaaaatccccaacacgaattcggtcatgtatgggagtatccttatcgttcggtttgcaccatttctacccatgacatggctacattgcgcggctggtgggaagaagattacgaacagacttgccgctattacaaccaagtgctgggacattggggcgaagtgcccacagccgcaccgggatgggtttgcgaagaaattgtgcgcaaccatttggaatgtccgtctttgctctgtatcctgtcattccaagactggttatcgatggacgaggaaatccgttacccgaatgtagacgccgaacggattaatgtaccggccaacccgcgccattattggagatacagaatgcatctcactctggaagagttgatgaagagcaacaagtttaatgaaaagatgaaagaaatgattgacgccgcaggcagattctaactcatatcaatatcatgaagaaaataccggatttaggattttggaaactatggaacattagtttcggattctttggcgtacaaatagcctacgctttgcaaagtgctaatataagccgcatcttttccacactgggggcagaccctcacgacttaagttacttttggattcttccaccattggcaggaatcatcgtacaacctatcatcggtgctttgagcgaccgcacctggacacgtttcggacgacgtattccttacctgtttgtgggggcactcgttgcggtgtgtgtcatgtgcctgttgccgaatgcgggaagcttcggaatgagtgtcagtgccgccatgatttttggcctggtatctttgatgtttctcgatacttccatcaatatggctatgcaaccttttaaaatgatggtaggcgatatggtcaacgagaagcagaaaggacttgcctattccattcaaagtttcctttgtaatgcaggaagtttggcaggatatctgtttccgtttatcttcgcggcaatcggtatcagcaatatcgcccccaagggagtcgtgcctgattctgtcatctattctttctatatcggagcattcatcctgatactttgcgtcctttatacatcggccaaagtgaaggaattcccaccggaagaatatgcagaatatcacggcattaccaatgaagagaagaaggaaagaacaaatatgttcaagctgttgctcaaagcaccgaaagctttttggacggtaggcttggtgcaattcttctgttgggcagcctttatgtttatgtggacttacaccaatggaactgtggcattgaatgtctttgacactcctacggtggaaacaatggcagaaggtacagcgaaagtagtcctcgatactcaatccatacaatatcagaatgctgccgactgggtgggtattctgtttgcggtacaggcaatcggctcagtcatttgggcggcggtgattccggtgattaaaaacaaaaagtttgcctatgtactcagcttggtgctgggaggcattggtttcatctctgttttattcatccacaatcaatatgcattatttgcatcctttgccctgattggctgtgcatgggcggcaatgttggctttgcctttcactatcctgaccaatgcgttgacaggagggcacatgggtacttatttggggctctttaacggaaccatctgcatcccgcaaatcgtagccgcttcattgggaggaatgatattgaaaatgtttaccacggcaggcaacgttgccccggaagtcaacatgctggtattggcaggtatattcctcattatcggtgcagggtgtgtaggcattattaaagagaaacagtaaccgacaaggacattataaaacacgttagtacgcatcgcctcatgcatactaacgtgtaagcccatacatacggaagcaaaggtccacacatacgtacgtatagagtgatgcgtcagtccgcattataaattcatcacatcgtgctcgaattgttctttatctcctattgccttattccttatcttactgcgatagttgtatatcgtagccaaagaataacccaagaaatgggcaatcttattactgtctgtcacccccaggcgaatcaaagcgaagatgcgaagttcggtagtcaacaattcgcccgacttaggatatattcttccctcctctatcaataatttattaaaagaggcaataaaatgaggaaataattccaagaaagacttatcaaattcattataaaaggctttccgttcatcacggataaactgttcagacttaatggctttaaacaaatcatctatacgggatgccatcgccatttttgccaatgaacgacgatagagttccagcttatcaagataaatcacacatctgtccaggtaacgggcaatatacacttcctttatcttaccggtctgctccaattcatcatttacatcagtcaatcgcttgttagcctgacttaaatctctacgcatagccgataattttttcatccatctatacagatagaaaatggcagcaatgagaaaaagagacaaaaggctgacacttatcaacaaagcacgagagatctgccgctctctctgttccttcaacttataagccttgtcaataataggaaagaactgagttacttcaataaagcgcaaccgggcattgcacgaaacagcatcttccatcgaacaattcagatatttgtacgcacggtctatatctcctttttcatacattaattgagccagtttctgcaaagacgcatactctttagtagcagactgcaaatcaaccacagcagtcaaagccaaataataaatctgtttatccatatcctcagtcacatcatacacctcggacaacgtataatagatgtatgccttctgccgctcatcaggattcttcttcaacagcccattcaggataaccagtgaactatccggtttgcctgccaccatgtacttctccgccagtacgatatctctgtccactccctgacgcgctgttgccagaatagaatcacgataaacgtctgtcttctccagatacttctgtttttcctccgcattggtcgtataatcggccacccaaccataataagcccggaaagtacggtaataatagttcaacggtcccaattccaatgcctgtggattaatctgcctcaactgttccaatgcctcattatacatgcccatcactcccatcacctcagcacgattaatgataatctcattcttcaactcgggtttatcaagcaaaggaagcaaacgcattttctcatttatataatataaagaagaatcggcctgataatgcagatagagataaaaaagcgaaccgcagagttcatacttttcttcattgttcccagaccggtgaagacgagcctttatttcatcaatttctttttctttatgcacatgaaaagaatacttttcctctatgaccctatccaactctttcagtacagattcattcaatccgttatcagccatcaagctcaacgggtagataaaaaggaacaatataagacaatatgtgatttttctcattccgtattaattaagtattacacaaatatataaagataagtaattaaaataaagaaaaacaagaaatatattttcatatccatttatattttctacccaatcaagggatacagaccccctaataatcaattatataacataaaagagcatttatatttttattccagccttaaaaagagattctttactctcctacatttgcaataccaagcaaaccgaataacattaaatactatatattatgaaaagaagctttatacttatgacactgctcgcactcttcggcttacagcaccccacgtctgcagccattattaaaaaagttgccccgaccttttggtgggcaggtatgaaaaatcccgagttacaagtattattatatggcgagaacatctcgtcaagtgatgtgagtatttccgccaaagacattctcttgaaagaggtagtcaaacaagagaatccgaactatcttctcttatatatggatttgtcggaagcggctccccaatctttcaatataactttgaaacaaggtaaaaaagaaactgttgtcccttacgaaattaaacaacgtagaaacggtgcttctgatgtaaaaggattcaatgccggtgatgtactttatctgattatgccggaccgtttttccaatggtgacccttcgaacgatattatcccgggaatgctcgaatcaaaagtagaccgtaatgaaccgtttgcacgccatggcggtgacttgaaaggtatcgaaaatcatttggattacttggacaatttgggtatcactgccatctggctcaaccctatccaggaaaatgatatgaaagaaggttcataccatggctatgccatcaccgattactatcaggtagaccgccgcttcggtaacaatgaagaattccgcaaactggtagatgcggctcacgccaaaggcatgaaagtggtgatggacatgatattcaatcattgcggcagcgagaactacctgttcaaggatatgccttcaaaagactggttcaatttcagaggaaattatgtacagacttcttataaaaccgccagtgtacaagatatacatgccgccgactatgagcgtaaattagcagtcgacggttggttcaccgaatcaatgcccgacttcaaccaacgcaatcgccacgtagccaactatctgattcaaagcagtatttggtggattgaatatgcaggtatcaacggaattcgccaagatacgcatccctacgcagacttcgatatgatgtctcactggtgtaaagccgtcaacgaggagtatcccgacttcaacatcgtgggcgaaacctggctcaacagcaatgtactcgtttccttctggcaaaaagacagcaaacttgccgcacccagaaactcaaatctccgcacagtgatggacttccctttaatggagcacatgaatcgggcttttgatgaagagaccaccgattggagtggaggattattccgtctttatgattatctgacacaagaccttgtctatgccgaccccatgaatctgctgatattcctcgacaaccacgatacttcacgcttctatcgcaatgatgaagacaccaaaaatctgaaccgctacaaacaagcacttgctttcttgtttaccacccgcggtatccctcagatttattatgggacagagatattgatggcggcagacaaagcgaatggtgacgggcttctccgttgtgactatcccggcggatggcaaagcgatctgcacaattgtttccaaaacgccaatcgcaccgcccggcaaagagaagcatttgactatatgcagaaactgctgcaatggagaaaaggaaatgaagccatcgccaaaggaacgctaaaacatttcgctcccaataaaggaatatatgcatacgaaagaaaatatgggaacaaatcggttactgtattcatgaatggaaacgacaaggaacagagtattgatttaactccttataaagaaatattgccaaaggcatccgccttggatgtattgacgggcacaaagattggattaggaaaagaattaacgctctccggtcgcggaatattgattttagagttctgatacagttcactttgatttatatttatcagatattgtaaatatactaaccacataataatcagagatataatatttataacaagacaaatgcatttatatttttattcttgtgcaatctttgaatatacaagattcttacatttgcaatatccgaaacaaaacagagttaggaaacttgttagcttataatttaataccatagttatatgaaaattaaaaagaaactttcactcattgcattcatttgcatttcattcatagcaaatgcacagcaaaaacttacatcaccggatggcaacctggcaatgattttccacctaaacggagaaggtacccccatttatgaactgacttataaacaaaagcctgtcatcaaacccagtaagctgggactggaactgaaaaaagaagatgccgatgctaagacagactttgagtggacagcccgtaaagatgccgacaaacttgattctaaaacaaacctatataatggatttgaactgaaggatgcccaaacttctacttttgacgaaacttggcaaccggtatggggagaggaaaaagaaattcgcaatcattacaatgagttggcagtaaccctgaaccaaccggcaaacgatagatatatcatcatacgtttccgccttttcaatgatggactgggcttccgctacgaattcccccagcagaagaacctgaattattttgttatcaaagaagaacattcacaattcggtatggcgggagaccatactgcctattggattcccggagattatgatacgcaggaatacgactataccgtttcccgtttgtcagaaatcagaggtttgatgaagacagccattacctccaactcttcacaaactccgttctcgcctacaggcgttcagacggctttgatgatgaagacgaatgacggactgtatatcaatctccatgaggctgcattaatcgattatgcctgtatgcatctgaatctggatgataagaacatggtattcgaatcatggctgacccctgacgcacaaggtgacaaaggatatatgcaaacaccttgttcttcaccgtggcgcaccgtcatcgtgagtgatgacgcacgcaatatccttgcttcacgcattactttaaacttgaatgaaccttgcaaaattgaagatacatcatggattaaaccggtgaaatatatcggtgtttggtgggatatgattaccggcaaaggctcttgggcttacacagacgaactttccagcgtgaaattgggagaaaccgattattctaaaaccaaacctaacggaaagcattctgcaaacacagctaatgtgaaacgatacattgattttgcggctcagcacggttttgaccaagtattggtagagggatggaacgaaggttgggaagactggtttggcaaaagcaaagattatgttttcgactttgtgaccccttatcccgactttaatgtgaaagaacttcagaactatgcggcaagtaaaggtgttaaactaatgatgcatcatgaaacttcggcttctgtacgtaactacgaacgacacatggacaaagcttaccaatttatggccgataatggttataactcggtaaagagtggttatgtgggcaacatcatccctcgtggagaacaccattacggacaatggatggataaccattatctctatgcggtaaagaaagcagccgattataaaatcatggtaaatgcacatgaagcagtacgtcctaccggtatttgccgtacttatcctaacctgataggcaacgagtcggctcgcggaacagaatatgaatcgtttggtggaaataatgttaatcatactaccatacttccgtttaccagactgattggaggtccgatggattacactccgggcatctttgaaacacattgcaacaagatgaacccgacgaataattcacaagtacgctccacactggcacggcagttggcattatacgtcaccatgtatagtccattgcaaatggctgctgacattcccgaaaactacgaacgcttcatggacgcgttccagtttatcaaagatgtggcaatcgattgggacgaaaccaaatatctggaagctgaaccgggagattatatcaccattgcccgcagagccaagggaaccaatgactggtatatcggctgcacagctgatgaaaacggtcatacttccaaactgacatttgatttccttgaaccgggaaaacaatatatcgctactgtctatgccgatgcgaaagatgccgactggaaagacaatccgcaggcatataccattcgcaaaggtattgtgaccggcaagagcaaattaaacttgcgtgcagccagtggcggcggttatgcaatcagtatcaaagaggtgaaagataaatcagaggtaaaaggaataaagaggttataaattaattgtgattattgagaaaaccgttttcaataggtatttattaaagtaaaaaacatgaataaataacttaactttaaatttaaagacatgaaaagaaacgtgatgtttaaaatcctactcatgatagtagtgggattgttcttgtccctagacgcatttgcccaacaaatgacggttaaaggaattgtcaaagatacaaccggcgagccgattatcggtgctaacgttgtagtaaaaggaagtagtaacggtacaattaccgatttcgaaggcaacttccagttcaacgccaataaaggcgatattattgtgatttcatttatcggttaccaagcacaggaagtacctgctgctgccaacctgaacattattctgaaagacgatacacagttattgcaggacgttgtagtcattggttatggtaccgttaagaagaatgatgcaaccggctctgtaacagccatcaaaccggaccagctgagcaaaggtatcactaccaatgcacaagacatgttgtccggtaaggttgccggtgtaagcgttatttccaacgacggtgctcccggcagcggtgcccagattcgtatccgtggcggttcctctttgaatgccagcaacgacccgctattggttattgatggattggctattgataatcaaggaatcaaaggtatgtcaaacggcctgtcaatggttaaccctgaagatatcgaaactttcaccgtactaaaagatgcttctgcaacagctatctacggttcacgtgcatccaacggtgtcattatcatcactaccaaaaaaggaaagaacggacaagcgccgaaaataaactacaatggttcaatttctttggctaccactcaaaagcgttatgacgtattggatggtaatgaataccgtgcttatgcccagcagttatggggagataaatatcctgcagaaatggatacagccaatacagactggcaagaccagattttccgtactgccgtaagcaccgaccatcatatctctattaccggtggacttaagaacgttccgtatcgcgtatctgtcggttatactaatgaaaatggtattattaaaacctccaacttccagcgcttgaccgcgtctgtcaatcttgctccatcattctttgacgaccatttgaaattcaatatcaacgccaaatatatgtatggtagaaatcgttatgccgatgcgggtgcagccgtaggcggtgcattatctattgctcctactcatcctgtttatggaacaggagatgcgtttaaattctcaggcggttattggcagaatatgcaagctacagacggtttcagtgataaagactggacttatacgacagataaaaacactcctcaaaacccattggctgcactggaacaacgtaataaaaaagcaaacagcaacgactttgtaggcaatgtagaagtagactataaagttcatttcttgccggacttgcgtctccatgccagcatcggcggtgaatatgcagacggtaatgaacgtgaaattgtttctccatactcatacaccaataactattacggatggaacggattatctacccagtacaagtataatatatcctataatgcttatgcacaatacatcaagtcccttggcgcacatgatttcgacatcatggtcggtggtgaggagcaacatttccatcgtaatggcgctgacggtgtaggtcaaggatgggattcttataaaaacgaaccggtggatcaagcattgcgcagtcaaaaagcttatgcaacacgcaatacgctggtttctttcttcggacgtttaaactactccttactgaaccgctatttattcacgttcaccatgcgctgggatggttcttcacggtttagcagtgacaaccgctggggtacattcccttcattagctttaggctggaagatgaaagaagaaaacttcctgaaaaacgtgaacttcctttccgatttgaaacttcgtcttggttggggtatcacaggacagcaggatataggtgatgactttgctttccttcctctgtatgtgacaagcgatgattatgcacaatatcctttcggtgacacttattacagttcttcacgccccaaggctttcaacacagatttgaaatgggaaaaaacaactacctggaacggcggtttggattttggtttcctgaatggaagaatatcaggtgctatcgatggatactatcgtgaaacagaggacttgctgaacagtgtcaagattcctgtaggaactaatttcaatgcacagatgatgaagaatatcggttcattaaagaattatggtgtagaattctccatcaatgccaaaccaattgtatccaaagactttacatgggatttaacttacaatgttacttggaaccacaacgaaattacgaagctgaacggtggtgatgatagtgactattatgttgaaaccggtgataagatatccagaggtaacaataccaaagttcaagcaaataaagtaggacatgcagccaacgcattctatgtttaccagcaagtttacgatgaaaacggaaagcctatcgaaaatatgttcgtagaccgcaacggtgatggcaagatcaacagtgccgacaaatatatctataagaaaccggctgccgacgtattgatgggcctgacttccaaaatgctgtataaagactgggacttcagcttctctttgcgtgcaagcctcaacaactatgtttattatgacttcttgagcaataaggcgaatgtcagtgcttccggactgtatactaacaatgcatacgtcaacacgaccaaagaagccatagctcttggtttcacaggaaaaggcgaatactatatgagtgactattttgttcgtaacgcttcattcatccgttgtgacaatatcacattgggatattctttcaaaaacttactccggtcacaggcctatcaaggagtgggcggccgtgtatttgctaccgtacagaacccgttcgttatctctaaatacaaaggactcgatccggaaatcaaaagtggtatagacagtaacccataccccagagcaacgacattcttattaggtcttagccttcaattttaacttaactttaaaacgaaataatcatgaaaacaagatattttaaaaagatatttgcctcagcactgatggttactgccattctgggcaccagttcgtgcattaatgatttggatattagtcctattgatcctcaatatgcgcccaactttgaccaaaatgatgtattcgtaaaagaatatgcattattaggcttgacaggacaaaaaggaccggccggatcagccgacctcgacggacaagatgaaggtgaatcaggattttaccgtaccatctttaactgcaacgaattaccaagtgatgaatgtatctgggcttggcaaaccgacacagatatccctcagctgacaaacatcagttggaactcttccagtatccgcaccgaatggacatacgtccgcttgggatacaatattacacaactcaacttcttccttgaccagacagaaggaaaagacgatgaagaaacaatgcgtcaacgctccgaagtccgcttcctgcgtgcattacattatttctacttccttgatttatttggtaaagcaccttttaaagaacactttaacaacgagcttccggttgaaaagaaaggcagcgatttatatgactacatccaaaatgagttaagccaatgcgaaagcgcaatgtatgaaccacgccaagccccgtttggccgtgccgacaaagcggcaaactggttgctgcgcgcacgtctgtatctgaatgcagaagtatataccggcaaagctgactatgccaacgcaagagattatgcagacaaagtaatcaattcatcttataagctatgtcccgaatatcgtttattgttcatggcggataacgatgaaaacgcacaggcgatgcaagaaattatcctgcctatccgccaggatggtatcaaaacacgtaattatggagggtccacttatttggttaatggtacccgcactgccggcatgccacgtatgggaactaccaatggatggtcttgtatcttttcacgcgctgcattagttaaaaaattcttccctgatctttctcaagtgccgatgttacccggcgacattgaagtgcctgcagcaggagaaattaacacggatgaaaaaatagatgctttcgatgcccaatatggcacaagaacaatagatatgatcaaagcggcaggcgatgaccgcgccatgttctattcaggaatcggtggcggtatccgcaaaatcgaaactgatgtcatatccggttttaaagatggattatctatcgtaaaatggcaaaatatccgctcagacggacagccgacacatcataccgaatatcccgataccgatattcctttgatgcgtttgtctgaagcctatttgacccgagctgaagctaaattccgcctgagagaagatgcaaccgaagatatcaatatcctccgcagacgcgccaactgtaccagacttgttcagacagtgaccgaaaaagagattattgacgaatgggcacgtgagttctatctggaaggacgccgtcgttcggacttgatccgtttcgatatgttcactagcaataaatatttatgggactggaaaggtggagcagcaaccggaacttctgtttcttctttctacaatgtttatcctatcccggcatcggatatgaataacaatccgaatatgtcacaaaacacaggatattaatcagtagtttccgtttaacaattaaagtatgtatattatgaaaaagatattcaacatattgcttcttgctgtattcaccctgtccgtgtttacagcatgcgaaaaggacgacgatagcaatcccgttctaaaagagcctaccaccttttcactcaacctgccgccatatgcagccaacaatatctacgacttgaaaaatgcgaagacagtggaattgacttgttcacagccagattatggttttccggctgctacaacatacagtgttcaggtggcgcttaattctgaatttacagaaaagacagaagaaagtgaagcaaactataccgaattgactacaacttattctacagccaaaatggatgtagtggcatctgaactgaatacggctatcatagaattatggactgcccagaatgaaggagccgatttcccgactacaccaatcagcgtctttatccgcctgaaggctaccattacagatagtgaccggggagtgtgcatttctaatgtgatagaattgccgaaagtactgggcaacgcatccaccgacaagttagaagccccccaaaccatgttcctcgttggttctatgctcgacacagaatggactatctggaaaccaatggtacaagtcagcggattggacggacaattctggagactcatttatttcacagccggtgatgaattcaagttcggaaccaaagaaaaagaatacatcggttcggacgatacccgtttaacaatcacagacaaagccgagtccggtgttatcggcaccaacagcggtaatataactgtcaaaaacgccggttggtatgtagtatttatcaaagcggcagtaaaaggcagtgattatacatttaccatgacattctatccgggcgaagtatatctgttcggagcaaccaatggaggaacatgggactataacgacacttggaaatttactgctcccgacaataaagacggttcattcgtgtctcctgccatgacagcaagcggtgaagcccgtatctgtgttaagacagatgtcgactggtggagaacagaatttacactctgtaacggtgaaatcttctatcgcgaaaacaatccggtcaatgacagttggggtaaagatgttggtcctgagtattctattcaaggagcagcaggcaagaccatccgactcaacttcacagccggaacaggagaactaaaataataaccttaaaacgaaagattcatcatgaaaaagcaatttatatacgcaggaatgtttctatttaccataggattctctgcttgtaatgaagacttcaaggactgggctgccccccagtccaatccccaagaggatagtgcagaacaaatgacagcaactttcacaaccggtcaagatgccaatattagcatggatgaagccactgccgactcggtagaaattgtaaaattaacttcaactaccgctgtggaaggcagtaccataactctcagttctttactattcaacgatgattactctttacccttcacgaccaaagacggtactgtaaaagtagccttgacgcaactggacagtattacccaggaaatatataaaagccgtgccagtgtagcacgcaatctgcgtgttatagtcaaagcagcagccaccactccggccggagacggtatccaactttcgggcaatgaagtaaatatcacgctaaagccgggagcaacaccggcagtagacccgaaaggttactatgtagtaggtgcatttaccggttggaatgcagaaggcgccttgcccatgacactcgatcccaacaataagaatgtctatacattggaaaccgaaacgacagaagccaatcagaactttaagattttcccggcttccgccatcaacggcaaagatattgactggacacaggctttaggcgctcaaaaagatggcgacaccgccgccgaaaacttcctgacttggaaagtaggtgataaggaagcaggagccatcatggtggaagaagccggtaaaatcaagattacaatcaatatgaccgatttccgctattcagtaaaagacaacagtgctcccacagaactctatatgaccggaagcgcatataactggggcaagatatggaaacagtttgttcccgtcaacgacacaaaaggtgccttctggggcatttactatttcgctgccgatgaccaagtgaaatttgctccgcaagccgactggggcaatgacttcggttttgccgccactatttcgcaagcatctgtcgaccgtgccggattgtcggattctgacggaaacatcaaagtgggtaaagcaggctggtatctggtctatgtatcagtcatcggtgataaccgggtggtagagtttgaaacacccaatgtatatctgataggagatacctctcatgacggttggaacgaccagttggcagaacaagatttattcaccatcccgacagatgcagacggctcattcgtctcaccggcattcgccaagaacggagagctccgtatatgcgtacaccccgaagccgccgctaccgattggtggagaactgaatttattatcctgaatggtaaaatcgaataccgcggcaatgatggagaccaagaaagagtacaaggaaaagccggacaaaaggcatatctgaacttctcggacaacaccggaaaagtagaataaccagtatacagattttaaaaaccctgaaagccgtccttcgtccaaaagggcggctttttttaatcaagtccatcatgaagaaatataaatttccccttttaccggggttattgctatcctgcttattcatcgcctgctcggatgacaataaagaagatttgcccgacctgcagccgggcgagggcatgaactactctcccaaaacaccggatgccgaccaaccgctgaccatcaccttcaaagcaccgacctcttccgccctgttcggatacaagggggaagtatatatccacaccggtgtagtgggcgaaggcgactggcagtatgtcccggccgaatggaaccagaacatagataaatgcaagatgacaaagctggaagaaaatatatggagcatcacgctggaacccgacatacgccaatggtttcagtcaggcaagacaccgatagaaaaactgggcatcgttatccgtagttcagacggcagcaagaaggggattgacatcgattcctttgtgaaggtcacagaccataagtaccaaggcttctcgccggccgaaattaagcatgcagccctgcccgggaatgtggaagaaggcatcaacgtcatcaacaacaccaccgtgactcttgtactctatgacaaagacaccgaaggcaaccacaaagactttgcacacgtcctcggcgacttcaacaactgggaactgaccaataaggaggactgccagatgtgtcgcgacgatgccgccggatgttggtggataaccctgaacaacctcaacccgacaaaagaatatgcatttcaatactatgtagggaccaaaggcggtgaagtcatccgtttggcagatgcctactgcgaaaagattctcgacccggggcatgacgatgacatcccggcatccacctatcccgacaacaaaagatacccaaaaggcggaaaaggaattgtttcggtattcaagatacaacgagacaactatgcctggagtgtacccgatttcaagatgcaacatcccaaacaaccggtcatttacgaaatgcacctgcgcgatttcactgccgaccatagtatcagtggcgccctgcagaaattggattacctgaaaaacatgggcgtcgacgccatcgagttgatgcctgttcaggagtttgacgggaacgacagctggggatacaacccgtgtttcttcttcgccctcgataaggcgtatggcaccccaaaaatgtataaagacttcattgacgcctgccaccgcaaaggcatggccgtcattctcgatgtagtatacaaccatgccaccggcaacatgccttttgcccgcctgtattgggacagcgcaaagaacaagaccgcgcgaaacaatccctacttcaacacagacgccccgcatccttacagcgtcttccaagacttcaaccatgaaagtcccttggtgcgcaagttcgtgaagcgcaacctgaagttcctgctggacgaatacaagatagacggtttccgtttcgacctcaccaaaggcttcacccaaaccgcatctaccgaagccaccgcctccaactacgatgccgcccgcatagccatcctgaaggactaccactcggcagtgaaggcagcaaagagcgatgccctcgtcatattcgagcacttctgcgaaaagaaagaagaacaagaattggcggcagaagggatatacctgtggcgcaacatgaacaatgcctattgccagtctgccatgggttggaaagaaaacagcggtttcgacggactgtatgagagcaccccttcatgggtgggcttcatggaaagccatgacgaagagcgcatgggctacaaacaaacccaatggggaaacggagtcctccaaaccgacctcccgacccgcatccgccaactggctgccaacgcagctttctttttcaccgttccgggccccaagatgatatggcagttcggcgaactgggatatgatttcagcatcaacagtaacgaaacgggaacagccgtcagcgaagaataccgtacatcacgcaaacccatccgttgggattattacgaaaatgccacacgcaaagaactctttgagatatatagccaattaattgacttgcgcaatgaaaagccatccttgttcgaaggaaacgccaccctgacatggagagcaggcgcatctgattgggaccaaggacgctccctctatcttagcggaattaccggagaagctattgctgttgtcggcaacttcagcaataccgatgcggatgttaccttcccgggccccataggagagtggagaaactacttcaccggacaaaacgaaactgtaacggaaaaagtcactgttcccgccaatcatttcattctgtatacccgtttctaaccgattcgggcacagaacgaaatataaatgaagaaaagccatttattatcaaaataaatatccgaatagtttctcattcaaatcttattatgtacatttgccgagcattaagtattctcatagaagaacaatattacttttccaactttattcgcatggtgactaatgtagaaatgtttatcttcataagattccttatcgcataatttccctattttattattaaaacatttattttaaaatgaacatttttattgcaggactgagctataatttgagcgaagccgaattagaagaattatttgcagagtatggagaagtagtttcagccaaagtcatcatggacagagaaacaggccgttccaaaggatatggatttgttgaaatggcagaagatgaagccggaaacaaagcaatcgaagcactaaacggcgcagaagttgacggaaaaacattatcagtatcagtagcacgtcccaagacagaaggaccgcgtcgaagctataacaacaacggtggcggtggataccatggcggaaaccgtggcggtggatatggcaacagagacaacaactacggcggtggtaatagagacaacaattacggtggcggaagaaacagatattaatctgtagattcctcactccatatatcaaacgtgcggagatacttttcagtatcttcgcacgtttgtttttatattttccacgtcatatcagcatttccccaaaggggtaatccccatttacttacctttaagtatgctcttccctactcttatggtttggagaaaagcatattgcgattgcttaaccacgtccgtggttaagtatagtcaccttggtggttaactttaaccaccctcgtggttagacttaaccacctaggtggctaagcaatcatgaacctgggaaaagcagggaaacgactgaaggacaggggaatagacacacatagatgaccgccaactctatgtacaagccatgcagctgctttataagaacgaacgctattggttgaatgatgaaaaagagaaggtattgcgacaagctgtcaatcaacaagatgaatcagtttgaatgcattttccgcaaactgtcaagttctgtatatgcttttaatgttgaacaatcagtcttagaacagttttttctttaattattatgaagcgaagagatgtataacgttcagaaatcggatataatgtctgattgagctttggctgatgtggaagcgttggcgggttgcgaggttagttcagacccttccaaaaatacaggcgtttgtagtggagatgtaaacggtagtagcgagtattgtgtaaaaagctcatctcagtggggaggtggacctgcatgcagtggtacgatttaaataatttagatggattgtcggattatttttgaatggttcgacaatccttaaaatagaatggttggtaggtttactgttcgctttttttctttctatcatgtagcgtgaaagaatgaatatcagcaactcgtacagccctacttctgtcacgataggagcttcctatacattcgaagccactatcggaagtaagcagggaagcggaagtaacagcaattatcaccaaccgtttgtagcagaaagaagggggctaaaagaccggaatcgtatacaccaagccgatggaaaagcgctgagtatcggggctcactgctcccaacgccttggcacggtctgtcaaatgatgacctttataaagcatgtgagcaaagatcagcaattcacgattacgcatcgggaaatactccacacaagcttgggcattccaggtagtacggtaaagacctttctcaaagatgccgtttgccttgtaaacacttgccgtttcgtatgctcctttgacatacacattccaattgggatgaatacgataatcaaaattggcaatggtgctgaagtattctgcattctcggctgtagcaggagtaaccacggccggaccttgcaaatcactgattatgcctttactatccagcccttcacgagaatacatcacatcaatataggcaataaccggacctttctcatacacatttcccgcagtcaggtaataaatattcttgccttcggccagttgtccccatgcggcagcatacctcagttgaagtgctttatctacaaaaagaccattccaattcaaagtggttataataggaatctttgtcttgttgactccggcaggaagcccatagacgtaagtatcattatcttcaccgttacgattattaagcacttgcaacaccaactcttgagtcggtgagaaattgaatgtgcctgttactcctgcctgataagcaggtacattatcattaaactcactgaattccctcactttgatggcatttacataatattcataaccgcccaaagagagaaactgcttacccactgtcaggttgaacctatcagacattttccagttcatatacgcatattcgatagaagaggacagattatccagcgagtgcggattactgtatttattaaaagactgacgaaaatgataagaaaagtcctttgtaaaagaacccaatatttccaaacgcacacggttcagcttaaaagcagcctcatccagattgccatctgtaaaataagcggctcccgaagtgtaaaactctaaattcatatgtgccgaaagattgggattagtattagggaatatacgccctaacaaacttcggatggaatcatccggactgattaaaggctgctcttgtgcgcaaacagaacataaagtgcacaacaggatacagcatgacaagaatgttcttttcataatatatttcttagtattagatttaacaaaaacgattgccgacctccctcccggcaaatagtaaggcggactgaattaaatcagccctctcctttcaagctcttcggctgctatttccatttctttataccattcttcgccaaacttacgaatcaatggttccttcaaaaacttataaacaggcaagttctctttctttcccaacaaaacagcagccttgcagacatcccaacggtgatagttcacagccttataaggaccataatcaccgatgcgtatgggataaagatggcaagaaaccggtttataaaaatcagtctttccggctcgataggctttctcaatagcacaatagcaatatcccttttcatcataacaggtaaagacacaatccttgtgattgacaatggaagtcaccaagtcgccctcttcatcggtataaacgactccctgtttatctatcacggcacgtgcctcgggagacaattcctcccaaataaccggaagtacttcttccaacttctccacttcatccagttctaccggagcgccggcatcgccttctatacaacattcacctttgcaagcatccaaattgcatagaaacttttcacgaaacacgtccaaagatattacaacatcatctatctgaatcatcttattacaactaaaaaagcgggagacgcaaaagttctcccgcttcgtttatcgggtttattatattacttaatcaaatcttttccagtcatgtcggccggctgagccatacccagaatatgcaaaatagaaggagcaacatctgccaatacaccattttccactttggcattcttgttctctgtcacatatacaaacggaacaggattcaaagagtgagcagtattaggtgtaccatcttcattcagtgcatgatcggcattaccgtggtcagcaatgataatcacttcatagccattagccttagcagcttccactgtatctttcacacattcgtcaatagcctttacagccttttcaatagctccgtaaataccggtatgacctaccatatcaccgttagcatagttaactacaatgaaatcgaacttttgagtattgatagcttccaccaacttatctttcacttcgtaagcgctcatttcgggtttcaagtcgtaagtagccaccttcggagacggaaccagaatacgctcttcagcatcatacggagtttcacgaccaccattgaagaagaaagttacatgggcatacttctctgtttctgcgatatgaagctgagttttgccgttggcagccaagtattcgcccaatgtgttctgaacattttctttatcaaacaaaatgtgaacgcccttaaatgatgcatcatacggagtcatgcaatagaactgcaagcccggaatagtatgcataccctgttcaggcatatcctgctgagtcagtacaactgttaattctttagcacggtcattacgataattgaagaagataaccacatcaccttccttgatggtaccatctaccgtagagttgttgatgggtttgataaattcatcggtaacaccttcatcgtatgattcctgcatagcctgcaccatgtcggctgcttgctttcctttaccttcaaccaataaatcgtatgcttctttcacacgttcccaacgcttgtcacggtccatagcatagaaacgacctacgatagaggcaatctttccggctgactgttcgcaatgtgcagtcagttgttcgataaaacctttaccactcttcgggtctgtatcacgaccatccatgaaacagtgaataaatgtattctcaaggccatattctttagcgatatcacaaagcttgaataagtgatcaaatgaactgtgtacaccaccattggaagtcaatcccatgaagtgaatattcttaccgttttctttagcgtatgaaaaagcagaaacaatctcaggattcttcatgatgctattgtcagcgcaagcacggttaatctttaccaaatcttggtaaacgatacgtccggcaccgatattcaagtgtcccacctcagagttacccatttgtccgtcaggcaaaccaacattttcaccgctagcctgcaactcagagtgcggataatcagccaacagactatcccaataaggagtaggagtattaaagattacatcgtctttaccttggtcgccgataccccagccatcaagaatcattaaaagggcttttttgctcataatcttatttttgtttaaagtttatccttgcttttacaggtgcaaaggtacaaaaaagccctgtcaatgaatcatgtttcactttttttttattgtggaagtttgaagataaaacgcaacccgtctttaaattcttcatctttccataaatgagcattcatgcattcagcaatcattttgcatacgagccaagtcacatcatcattggtacctgcagagactgcaccggcgacagatatatttcctgttccggctatcaaaaccgaagctacattcttctccggatttaagcaataagagacaacgatgcgtccttcttccgttatttggttgatacagttcagaatagttcttcaaggtcacataataagccataatctcacgcaaagcctcttctttgtgatactcgtctttcttttccaaagcaacctgataaagtttctttgcccattgtaaatgctctgccccacgggtagcatccacagagtccgtcaaaacttccatctcattttctttgtcgataacaacgttcagacttttgcccgaactgctctttgttcagtgcgtgtacctgaagagtttcaaaggacaatcccaagaacaggattaataaatagaggtttctcatcacctttaaagtgtttgactcattttaatatcgacccaagtgacaaacgtaaccaattgccacatatcatccaacacaatttaagatattattcctgcaaaagataaatataatgattaatctctgcaaaaccgtgttgcaaaacataccaaatcatattgttgtttataaataaattacattcctttgcatcgggacagttcagcacagttggcgtctgaattaaattcttgaatagcacatgaaaataacctttggacaacagacaacgaaagtaaaacaattggcagatttaatcagccaagaaatctccatggggacctataaatcagacagtgcattgccctctatcaatcaattaagccgtaattatcatgtttcgagagatacagtattcaaagcttttatcgacttgaaagatcgcggcatgattgattccactcccggaaaagggtactatgtcactaacaagctgaagaatattttattgctgctggatgaatactcccagttcaaatattcactttacaacagtttcatcaagaaattatcgattaattataaagtggacctgcttttccaccaatataatgaaagactgttcaacaccattatccgcgaatcatcgggaagatacaataaatatatcgtgatgaacttcgacaatgaaaagttctccagcaatctttataagatagagccgtccaaactattgctactggacttcggaaaattcgataaaaaggaatattcgtatgtatgccaggattttgatgatggattttatcaggcattgaactgtctggaaaagcaattgggcaaatatgaaagactcatccttttgcttcccagcgaaagcaagcatcccggcagcagtggcaggtattttataaagttttgccgtgagaaacaactgaaaggagaaattattgacaataccgatgaaataaacataaagaaaggagaagcatatatagtcatacgccagatagatgtggtaaatatcattaagaaaagtcgcgccgaaggattaaaatgcggaagcgatttcggagtattggcttacaatgacactccctcttatgaagtaatcgatcaaggcatcacttccataagtattgactgggagcaaatgggaaagctggcagcagattttgttctgtccggcaaagaaataaaagaatacctgccgacagaagtacacatcaggcattctttataacagaaaaacaggaataaaaagcatatagttaaaaacttattatcaacaatatcatgaaaaagtatccgaaaatcgggattcgtcccactatcgacggccgccagggcggtgttcgtgaaagccttgaagaaaagactatgaatttggcaaaagctgttgccgaactgatttctactaacctgaagaatggtgacggcagtcccgtggaatgtgtcattgccgacagcaccatcggacgtgtaggcgaaagcgccgcctgtgccgagaaatttgaacgcgaaggcgtaggagccaccatcaccgtaaccagttgctggtgctatggttccgaaacaatggacatgaacccgcattggcccaaagccgtatggggattcaacggaacagaacgtccgggagccgtatatctggcagcagtattggcaggacatgcgcagaaaggtcttcctgcttttggcatctacggacatgatgtacaagatttggatgacaataccattccggcagatgtagccgaaaaactgttgcgttttgcccgcgctgccatggctgttgccaatatgcgtggaaagagctatctttctttcggcagtgtctgcatgggtatcgccggttctatcgtagacccaaacttcttccaagaatatttgggtatccgcaatgaaagtgtggatgaaacagaaatcctgcgccgcatggaagaaggtatttacgaccacgaagagtatgccaaagcaatggcatggactgaaaaatattgtaagtccaatgaaggtgaagactttaagaaccgtcccgaaaaacgtaaaacccgtgaacagaaagatcaggactgggaattcattgtcaagatgaccctcatcatgcgcgacctgatgaccggcaaccccaaactgcgcgagatgggatataaagaagaagccatcggacacaatgccattgctgccggcttccaaggacaacgccaatggacagactggaaacctaacggtgactttaccgaagcattgctaaacactactttcgactggaacggtatccgtgaagcctttgtcttggcaaccgaaaacgatgcctgcaacggtgttgccatgttattcggtcacttgctgagcggctgtggtcagatgttctcggacatccgcacttattggagccccgaagctgtaaaacgcgtcacaggcaaagaactgaccggaatggctcagaatggtattatccaccttatcaactcaggcgcaacgacattggatgctaccggcgaaagccgtaatgccgccggagaaccttgcatgaagcccaattgggaaatgaccgaagcggatatggaagcctgcctgaaggcaacaacctggtatccggcagaccgcgattatttccgtggtggcggtttctcttccaacttcctttcaaaaggcggtatgcctgtaactatgatgcgtctcaacctggtcaaaggccttggtcccgtattgcagttggccgaaggatggacagtagacattgatccggaaatccacaatatattgaatatgcgtaccgaccctacttggcctaccacctggttcgttccgcgcttgtgcgacaaaccggcattcagagatgtatattcagtaatgaacaactggggtgcaaaccacggtgccatcagttacggtcatatcggacaagaccttatcacactggcttctatgctccgcatcccggtatgtatgcataatatagaagacgataagattttccgcccggcagcatggaatgctttcggtatggataaagaaggttcggactacagagcttgcgctacttacggacctatctataaataacaattacactgtcaggacacaaagtattgtgtcctgacagtcaatgaataccctattatactttgaaaaaacaaaccatgaaagatacagaccaacctattttgcataaagacggagtcagctatatattgccttttatactagtcacctgctgctttgccttgtggggatttgccaatgacattaccaatccgatggtaaaggctttctctaagattttccgaatgagcgtcactgacggtgccttggtacaagttgccttctacggaggatatttcgccatggcatttccggcagcaatgttcattcgcaaatattcctataaggcaggcattcttctaggactaagtctttatgccgtaggagccctcctattcttccctgcaaaaatgacaggcagttattatcctttcttattggcttatttcattctgacttgcggactctcattcttggagaccagttccaatccatatattttgtcgatgggaacagaagccaccgccacccgacggctcaatctggctcagtcttttaatcccatgggctccctgctgggcatgtatgtggccatgaatttcattcaggcaaaactcaatccgatggacacggcagaacgtgcacagctgactccaaccgagtttgccgcggtacgggattccgacctttcggtattgatagctccttacctcaccattggaatcgtcatatttatcatgcttttggtgattcgctttactaaaatgccaaagaacggcgaccagtcacacagtattaatctcggccccacccttaaacgtattttctccattccccactatcgggaaggagttgtggcacaattcttctatgtcggtgcccaaatcatgtgctggactttcatcatccaatacggcactcatttatttatgtcacaaggtatggaagagaaggcagcagaagtactctcacaagagtataatatcattgcaatgattatcttctgcatcagccggtttgtatgtaccttcatcttacgttatctcaatcccggaaaacttctggccatacttgcagtggcaggatgtttcttcacggcaggtgttattttcttccaaaatatttggggtatgtattgcctggtagcagtctccgcctgcatgtcattgatgttccccacaatctacggtatcgctttgaccggcttaggagatgatgccaagttcggtgctgccggtttgattatggcaattctgggcggttcggtgcttcccccgttacaagcaagcatcatcgacatgcatacgctttggaatatgcctgcggtaaacctatcatttatcctgccgttcatttgttttgtggtgattgtcatttatggacatcgctcttacagacgagggcaatattaaagccccccgaccgagaaatcagcaatcaatagcgtgatgatttctcggtcggagagatattataaatgcattgtttcaatgtaggataagacgatatttagataccttcgggtgtcttgtggcctctctttatgtggaataaaaagatgacttatggagtaatctttatttaatacaaaaataaatggctcatttagattttccaatgaaatacccaaggaatctatcctatagataggataggacaaattattaatacgtttgaatattaataaatcatttcgattatgataagaagccagtatatgaatttgttgtagctcattctgccattcttatccgggtggacagataaaaaactgcctaacattaaagaaacgataataaatatggcaaaactctttttcattttatttcttgaaataatacaataagattattggattatcatccatcttcaaatccttgcagaaaggaatgagattatcccctatatttgtaactttgcctttacaataccccttcttctccaaccattcttgttcagtacgttcatgaaaagaatcatatatagacgctgcatctatggcaccaacaagatattgttctgtagcaccgacaataggtcgtgtaaatgggaatatcgagtttatgctattcaacagcagaggtctcattatagtttttttacttgcaatatgataaaataagtgatagtttaagttctttagcacacacgatgcatatatatagtctgatgtaattgcataagtatctattatcacatattttccttcttctatctctcgcggccatatattttcattcccttttctaatcaattcttgaggaaccgccttaccatttaaatctatgatatattcatacttcatttcaccctccggtgaaattgaaaaaatagtatcactccatgtctttttataatagagtgtatccgaaaatgaagccagactgtttctttctaaaatgttttggtatttttccttttctttgtatgctaaccggttattcaccttaaaacaagaatccgtctgccacaaggaataattcagaatttcaggaaaatgataattgaaagcgtttataccaaaaaatacataattgtttgtagaaaagcagtgtaattgtatacatgaaaaaggaagttgtctgatatcctttaaaataccatccaaagtatagatgaatattttgctttgaaattggtctaaaatcaaaacttcgttttcagagatacaaaagtcagtcacttccctttgcatctcaggaccttccccatactgcccaataacattcagatatttcccttccaatgtaaaacgctttactgatttggtcttgaacttatcaagtacatacatacagctgtctacgacaatgactttatcaacaacccctaccaaagattcttcggtagtttccaatcggacagcaatcaccgtatcaaataattcatgcattaggcaatagccctcagagttaaactcaccagcatgaatagtgatattttttcctgccgaaacagcaacctcatgaaaagattcagagatgtaatcgtccgactgtatgcccctgaacaatgtttctgccctcttttgtcgggaacatgaaagcaggagcatggatattaaaaaaaaacacaaatacttcatgtcaacatccggccgatgccaaacatgttccggctccatatccgcacacctttttgttatactccgtccatgtggctgtctgagtctcactcaccgttacccctgttcccggtatccctattgtaacagaagtgcctgacgttttggtataagtacaatccgtggtgtattcttcccaattagtaccccgaggaccgcgtacaaatttgccatcatcagctaacacctccaaatcagtaagtaacggtagcttttcaatctcttcactattggctttaaatacaaaatacatatttgcaccaacggtgaaaattaagatgaatcttaaaaaaaatctttttgttttcatagtatatcatatttctatattctacaaatatatgaaaaagaaataagacagaaaagcattccgtaaaaaataataacaaatttagaacttaatatctcagtcaaaataacaagcgatttcagccaatcagtctaagtagcacagttcttgccccccaagaacaaaacctctgtatccgtctgcaatcctagttagtttcattacgttgaaactctaatttcatcgccataaaactaaagtttttaatgcctgataccgggatgcctacggtatttctttttatggtttttccattgctttgctcagcgcacaccgcacttcctttatcacttccgggctatcagtggcaaagggttgccgaatgatttcggtacgttgcatgtcaaggttcatttctacagttttcataagcgggttctcctaatataaacataataagtttcccctagccggaatagattatagacaatagttaatgcaattttcgatattcgccaaaaagtaagtggattatcttctgcatctacataaagtattcatcacaatgcgtccgctttaaaactgcaaggataattgcgaatcttctcccaaaaggttgaatgtcatccgatggtaaggagtcgtgccatattccctgatggccgcacgatgcttcttggtgggatatcccttattagatctccagtcataataaggatactcttcatgcaaagccttcatatagtcatcacgatacgtctttgccagaatagatgcagccgcaatagaaagatatttgccatctcctttcaccaccgtggtatgcggtacatcctggtactttttaaaacgatttccatctatcaacagatgttggggcttcagtttcaatccgtctacagcacgatgcatagccagaaatgaagcattcaaaatatttatctcatcaatctctgcaggtgtcaccactcccactgcccatgccaaagcttccttttctatcacttcacgaagagcataccgctgatgttcggtcaactgtttggagtcattcaacaactcatttttaaaatcttttggtaagataacagcagcggcataaaccgaaccggccaaacacccacgaccggcctcatcgcatccggcttctatcaattctttatttaaataaggcaataacatacgattcctgttttatttcttgtctgcaaagataccctttttaaaaaataaaatcattaggcagtctcaaaataaacggttaattttgtcgcagaaaacatcagtttattataaaaacgtcaaatatatttcgtataccacacacttacagaaaagaacatatatttgcagcaaaacaagaaaaaatatgtttattattataggaattatgtttgccgggatgttactcggctttctgctacgcaaacaacgactatcgtggatacacaaagtcattactgtttttatttggttactgctttttctgctgggaatagatgtgggtagtaatcaagagattatcaacggattacatactatcggtttggaagctgtcatcctcacattggcagccgtactgggtagcgtcactgctgcctgggcattatggtatatggtatataaaagaaacaggaggagcgaagcatgaaaggaagcctgattattatctctttttttattattggcacgctgtgtggagtttatcatttgattccatacgactttacgcaaagcaatttaagctattatgccctatgcgcattaatgttcagtgtgggcatcagcgtgggaaatgatccgcagacactccgtaatttccgttcactcaatccacggcttatattcttacctgtcatgaccattctaggcacattggcaggatgcgcagtaatcagtttattcctcccccaccgttctttatcggattgtctggctgtcggctccggattcggttactattcattgtcaagcatcttcataaccgaatataaaggagcggaattaggaactattgccttactgtccaatatatcgcgtgagattattacactgctgtttgcacctttgcttgtaagatggtttggaaatcttgcccccatatcatccggtggagcaaccactatggatacaaccctgcctattatcacaaggacagcgggggaaagttttgtggtcgtttctattttccacggatttgtggtagattttagtgtaccgtttttggtcaccttattttgttcgtttccataagttttaccacctataggataaacaacccccataaagcttaccaattagacataattcaggcacggattacacagaaaacacagaaagaaattcatccgtgtaatccatgaaatccgtgcctgaagaatcgaaggcaccataacaggcaaggtatcagaacattttgctgacacgttcgatgccggcagccaaagcttctacctcctcttttgtattataaagtccgaaagaagcacgcactgtcccttctatacccaaacgaatcatcaacggctgtgcacagtgatgaccggtgcgaacggcaatgcccaatcggtcgagcaaggtccccatatccaaatgatgaatattccctaccagaaaagaaatgaccccgctcttgtgttctgcctcaccaaagatgcgcattccttctatagatttcaaacgtttcatggcatacgctgtcaattcgttctcataggcagcaatcttgtccattccgatagccgatacataatcaagcgcttttgccaatgccgtagtaccgatataatcaggcgttccggcttcaaacttaaaaggaagttcattgaaagtggttttctcgaagctgacattctgtatcatttcccctcctccctgataaggcgggagtttatccaaccattcctcctttccatagagtactcctacccccgtaggcccatatatcttatgcccgctaaatgcaaagaaatctgcatccaagtcctgcacgtccactttcatgtgaggtacgctctgcgcaccgtctatcaagacagggacaccgtgactgtgagccgttgcaatcatctccttcaccggattcacagtaccgagcacattgctaacatgcaccaaactcaccaattttgtacgttcagaaaaaagtttctcatacgcatcgataagcagttcgcctttatcattcatcgggataaccttcagcacaatacctcttttctcagcctgtaactgccagggaacgatattactgtggtgttccatggtagaaacaatcacctcgtcgccttccttcatctgactttcggcaaaggaagaagccaacaggttgatactttcagtagttccccgtgtaaacacgatttcattcgaactgcgtgcattgataaacttacggactgtttcacgcgaggcttcgtgtaactcggtggcctgttgggaaaggaaatgcacaccgcgatgcacattggcattaaccgaataatattcatcggtaatagcttctacgacacaacgcggtttctgtgtggttgccccgttgtccaaataaatcagcggtttgccatatacttccctacccaatatcggaaagtcttctcttattttctgtatatcgtacatagttagtcctttctatttacacatagcacatccccggcacttattcagttcgccacggaaacgtttttccactaacaagtgcaggcggtctttcaacgcctccagacggatggtgtcaattacttcattcacaaatgcaaacatcaacaacagtcgggcttcgtgaagactgataccgcgttgctgcatatagaacaacgcattttcatccaactgtcccacggttgctccatgtgaacacttcacatcatctgcataaatctccagttgaggctgagtatacatgtgtgcatcacgtgtggcgcaaagattgcggttagtctgttgggaattggtatgctgtgctcccggacgcaccaaaacctttcctgcaaaagcaccgatagcctgatcatccaacacatacttgaacagttcgttgctggtgcagtcactcactttatggtcgataaacgtatggttgtccacctgctcgttcttatcagcaatagccatgccgcaaagattgatttcggccccccgtcccgacaaggttacttccgtcgtattgcgggtagtaccgttatgcaaggtcattccgttcagcaatacattgctgttggcttcctgattcacatacagattgctgaaacgcacactgctggtatgagtttcttcaagctcatataaatcaaagactgcattttcgccgatatgagcttcaatcacctgtgtagagaggaagttaacgttatccatcgcatggtcgcataccaacaggcgggcttgtgccccatcttccaacacaatcaagatacggcgattcaccataaagttgacatctgcacgaagaatattcaccaactgaatcggcttgtctatgactacccctttggggacgtagagcatgaagccatcctgtgcaaaagttgtattaaaggcagttattccatccttggcagtatcggccaacttaccataatacttctttaccaatgcaggatgttgttcggacagttctttcaggctgcctagcaacacaccttccggcaactgcggcttagtcaatgatttattgtagaaagcatcgttcactacaaagtaaagggaagtgctcatattaggcacatcacacttaaacacttcgtatgggttcacaggtatatcaagtcgattcagatttaagccataatcaggctcaaacaacttacttgcatcgatatacttatacttttcctgtttacgagtagggaatcccaatcgttcaaaatcagcaaacgcctgtgcacggggagcattcaacacctcggcactatgcttgcatatcattgcttcgcattgggaaaagaggtcaatatattgttgttctgctctcataattattctcctaattctgctttaatccaatcgtaaccgcgcttttccaattccaatgccagctcaggaccggcagtcttcacaatacgacctttgtacagcacatgaacgatatccggtttgatgtagtccagcagacgttggtagtgagtaatcacgatacagctggtttcgggagttttcaacttattcacaccttccgctacgatacgtaaagcatcgatatccaatccggaatccgtctcgtccaaaatacttaacttcggttcgagcattgccatctggaatatctcgttacgttttttttctccacccgaaaagccctcattcaccgaacgattagccaacttattatccaattcgacaactgcacgcttctcgcgcatcaattttaagaattcgctggcagtcaaaggcgccaaaccttcatacttccgtttttcgttcaccgcagcacgcataaaattcaccatgctcacgcctggaatttctaccggatactgaaatgaaagaaacaaaccttcatgactacggtcttcaggactcaaagccaataaatcttttcctccaaatgtaaccgaacctttcgtcacttcgaaagccggattccctaccaatacagatgacagtgtactcttaccggagccattcggtcccatgatagcatgaacctcacctttctttatattcagattaatacctttcaatatttctttgccattaatactggcatgcaaatcttttatctctaacataatcctttatctttttatttatcctacgcttccttccaacgaaatagccaacagcttctgagcctccacagcaaactccatcggaagtttattgataacttctttagcataaccgttcacaatcagcccgatggcatcttctgtcggaataccgcgctgattacaatagaacaactggtcttcgctgattttgctggtcgttgcctcgtgctctaccacagccgtttcattgtgaatatccatgtaagggaaagtatgtgcaccacaattactgcccaaaagcaaagaatcacactgactgtaattacgcgcattctcggctttctctgccacacgcaccaatccacgataagaattctggcttttacctgcactgatacctttgctcacaatcgtagaacgtgtatttttacccagatgaatcatcttggtaccggtatcggcctgctgatagttattggttacagcaacagaatagaattccgccgtagaattatctccactcaggatacaactcggatacttccacgtaatggccgagcctgtttccacctgtgtccaactcaacttgctgtccactcctttacaatgaccgcgcttggtcacgaagttataaatacctcctttgccttccgcatcccccggataccagttttggacagtggaatatttcacttcggcacggtcgtgtaccacaatctccacaatagcagcatgcaactgattctcatcacgctgcggagccgtacatccttccagataagatacataactgtcgtcatccgccacaatcaatgtacgttcaaactgtccggtatttgccgcattgatgcgaaaataagtagaaagttccataggacagcgtactcctttcggaatatacacaaacgaaccatcgctaaatacagccgagtttaatgcagcaaagaaattatcacgatagcccactaccgagcccatatatttctgtaccaaatccggatgttccttcactgcctcactaaacgaacagaaaataatgcctttctccaacaacgtctcgcgaaaagtagtttttaccgatacagagtccatgaccgcatctaccgccataccactcagctggcgctgttcgtgcagaggaatacctaatttattaaaggtcttaatcagttccggatctacttcatccaagctcttgggaccttcctttttcttggtcgggtcggcataataagaaatagcctgataatctatttcgggaatcgtgaggtgtgcccatgtaggcatctccattgtaagccaatggcggtatgctttcaatcggaattccaacagccattccggttcctctttcttggcagaaatcaaccgaatgacatcctcattcaaccccttctctataatatctgtgtgaacatccgtagtaaagccatatttatacttctcctgcgtcagctctttcacatatttattgggttcttcttgcatatcttatatttctattaattgttctgttacatttttgaataccgggaaaaagataccggacaaatctcttattgaataatataacaccgactcctgcttctttgttgcatctatcatctcatctttcgggtcaatatattccaatacatggatagctaaccctatcagtatcatatatttcaaagcccccaatccacttcccagccaacggttcaaccatcccaaacggacggcatccaaagccttcgtcaaaaaagaggcaaccaatacaaagcctaacggcaccgccacccaaataagaacaaatgccaatatctgggcaataacggtcgatgttcccaaaacaggagcaagcttttcggcaacggaggcaaataaagcccgcgccacaagaagtcctgctatcaacccgacaatagaagccagttgcttcacaaatcctttcatcaagccctgtatcactccaacacctatcaccaccaatataataatatctattgtcgtcatctttatgatataaaaaaggcacggattacacggaaatacacggtttttataaataccatccgtgaaatccgtgtaatccgtacctgaaaaaattattatagagtctgtttaacttctacttcttcgtaagtttcaatgatatcttcaaccttgatatcattgcagtttgtcaaactgataccacattcaaagttagtaccgacttccttcacatcatccttgaaacgcttcaacgcgttgatagtacctgtaaatactacaataccatcacgaatcaaacgagccttatccgaacgcttcaccttaccggtcttcaccatcgcaccggcaacaatacctaccttgctgatgttgaacacctcacgcacttcgatggtagcagttacctgttccttcaatgtaggagccaacataccttccatcgcagccttcacttcctcgatagcatcgtagataacagaatatttacggatatctacaccatcttgttctgccatcttagcagcagcactcgaaggacgcacttggaaaccaacaataattgcattcgaagctgcagccaaggtaacatcagactcagaaatctgacctacacctttatggattacgttaacctgaacctgctcggtagacaacttaatcaaggaatcgctcaatgcttccactgaaccgtcgacgtcacccttaacgatgatgttcaactcatggaaatcacccaatgccaaacggcgtccgacttcatccaatgtcaacatcttctgagtacgcaagccctgttcacgctgcaactgttcacgcttattggcaatttcacgggcttcctgttcggtatcaatcacatggaaagtatcacctgcggcaggagcaccattcaaccccagaatcaataccggctcagaaggaccggcttctttaatgcgctggttgcgttcattgaacatagctttcaccttaccgtatgaagtacctgccaacacgatatctcccatgcggagtgtaccgttcgacacaaggatagtagctacataaccacgccccttatccaatgttgactcaataatagaaccggtagccttacggtcaggattagccttcaaatcaagcatttctgcttccaacaatactttttcaagcaattcgtgtacacccgtacccttctttgccgagatatcttgcgactggtatttacctccccattcttctacaaggaagttcatagcagccaattcttctttaatcttatcaggattagcatgcggtttatctaccttattaatagcaaacacaataggtacgccggcagccatagcgtgattaatcgcttctttggtttgcggcatcacattatcatcggcagctacaataataatagcaatatccgttactttcgcaccacgggcacgcatcgctgtaaatgcttcgtgacccggagtatcaaggaaagtgatacggcgtccgtcttccagcttcacgttgtatgcaccgatatgctgggtaataccaccggcctcacctgcaattacatttgccttacgaatatagtccaacaatgaagtcttaccatggtcaacatgccccatcacggtaacaatcggagcacgaggttgtaagtcttcttctgcatcctcctcttcggtaatggcctgtgccacttctgcgctgacatattcagttttgtacccgaattcttcggcaacgaggttaatcgtttcagcatccaaacgctgattgatagaaaccatgataccgatgctcatacaagtagcgataactttagtaacaggaacatccatcatacttgccaattcattggcagtaacaaactcggtaatcttcaataccttgctttcttcctgttccatctcttccagctccaactggcggttcatcacgctttcacgtttctccttacggtacttagaagccttactctttgtcttgttagtcaggcgagccaaagtctcctttacctgcttagctacatcttcatcgctgacttccgctttgacaaccggtttcttaaagcggtccttattaaattttccgcttccactctggttattattcggtctgttatttccacctttaccggaattgttattatccctgcgctggttattattactattattgttattcgtactaccggcggcagtaatatctacccgctccttattaatacgattgcgtttctttttcttgccgtcatcggttgcatttccggcacccggtttggcaattttttcgtcgctctttcttatctccttgataatagcgtccttcatctgcttacgctgttcctgacgctgtttatctttctcttctctctctttccgtttttcctctttcgatttcttcttcggacgagtagactggttcaatgcatccaggtcaatctgacctactacattaatctttgatttaaattcagtaggacgaattttaaatatatcgtcttcttctttttcctgaacgggtgctgcgggtgcttctttttccatttctatcacctggggtttcttctgttcttccgctttttgttgaacttcgggttctttcttttcttcttggacaggggcaggcttcggttgcggagcaggctcttgtatcttctcctctaccacaaccggttcttgaggagcttcaaccttctgttcttcaaccttcgcaggctcttccttcttggacaccggctgttcggtcttcacagagaccggttgctcggctaccttaggagcagggcgcttgttcaagctgtccaaatctattttgcccacttgcttgaatttggggcgtacgtcttcagggataacagttttcacgacttcttcttttttaggtttttcaaaaccgtcaatagagatggaagccttgttccgatccttattctgtctttcctgaataaatttttcagactctattttcaaattcttatctgtgctgaactctttcacaagtacagcatattgttcttcggtaattttcgcattagggctggcctcaatggtataacccttcttttgcaagaattcaactaccgtcgttattcctacatttaaatctcttgttactttgttcagtctaatcgtcatactcgttttttaattattaactacgagccggtgccgaagattactcttcaaattcagctcttaaaattctcaacacgtcatctaccgtgtcttcttcgaggtccgctttttcaatcaacatttcgcgcggagcattgataacagccttagctgtatccaacccgatacctttaatggcattgataacccattcatcaatttcatccttgaactcatccaagtagatatcttcgtccattgcgttttcatccagttcgcggtacacatcaatcgtatattcggtaagcatactggcaagcttaatgttcataccacccttaccgattgccaaagatacttcttccggtttcagataaacttcagctttcttatcttcttcgtgcaacacgattgaagaaatcttagccgggctcaaggcacgctgaataaacaactgaatgttagaagtatagttaatcacgtcaatattctcgttacgcaactcgcgcacgattccatgaatacgtgaacccttcacaccaacacaagcacctaccggatcgatacggtcatcgtaagactcaactgcaatttttgcacgttcgcccggaatacgcgcaatttttttaatggtaatcaatccgtcgttaatttcgggaacttccatctcgaacaggcgctgcaaaaacacaggtgaagtacggctcagaataatttttggattattgttcttattgtctacacgagccactacagcacgagccgtttcgcctttacggtagaaatcgctcggaatttgttcagtcttgggaagcagcagttcattgccttcatcatcgagcaacaagatttccttcttccaaatctgataaacttccgcactgattacagtacctaccctatcaatatatttgttgtataaactatctttttccaattccagaatcttcgatgccaatgtctgacgaagattcaggatggcacggcggccaaacttggcaaagattacttcatcggtcacttcttcacccacttcatacgaagcatctatcttctgagcttctgtcagtgagatttgcatattcggattagtcaagtcctcatctgcaacaacttcacggttacgccatatttcgaaatcacccttatccgggttcacgataacgtcgtagttttcatcagtgccaaacattttcgcgattacactacggaaagactcttcgagcacacttaccatagttgttctatcaatattctttaattccttaaattccgaaaatgtatcaatcaagctgattgtttcttcttttttggccataattatttaaaactaattaagtatttagtgtattttatctcatcatacgcaaaagtgacgtcttcctccaccaatttgggacgctttgctccttccggtttcacttttctctcaatggttacggtaaagttgtcttctccagcctccttcaacacaccttccaacttcttgccggtcttagtcagcacttcaacttctttaccaatgtgtatcagatattgttgcaacaccttaaaaggttgtccgataccggcagagcctacttccagctcatagtcttcctcctcacggtctagtttagactcaatgtagcggctgagttccacacaatcatcaatccacaccccttcggcatggtcaatttctactacaattttgtcatccggagtcactgtgacatctaccaaaaagtaatctttaccttccaaccattcgtcaacaatccgggttactacattcttatctatcatttattagttattaagaacaaaaaaagggcttaatcaagccccaccattcatccacttcggtgcaaagatacaaattatctatcagtgccacaaaatattctaataaaaaattgtagttttgcagaaacttataacactatgggtaaaaacagtttaaataccaacaaacaattcatgataggcaacggcatacttgccttcggagtcttggctgtagtcattatcttcctttatatgtctttccgtttcaagcgggatgcaaataaggtagtcacttacgaaggtgtgtataacatcgaagtaagtaaagactttgccggtgacagtatcgcgatatatgtaaacgacagcctactgatgaaccgcaccatgcccgatgccagtttaaaactagaaatcaatcggtttgcagaagggaatgtcctaatggtggtggacaacaaaacggacaaaaccacccctttcaatcttaatccaaatggaagcaaagtgattgtcaaaaaggatggagaggtaatttatatactcgaaaaagaagcggatacaggccaataaagaagtgaaacaccgaagaagagatgtgttgaaagttatttgtattacacaagaccttaacacatctcttcatcatgaaaataagtattgaaatctatttattgcaaaccgaaccaattgcttttgatattaaataattatttaccaaatctcttttcgatgctaattcttcactctacttttttatcactttttcagtttcaacttacgcatagtttccaaatttcctgaaactgcttttaacacaagcatcggagaatcggtagtcgccacaagaaacgaagcaacgccggcttcagcttttattgtagccggaccacgcaactcgccaccttgtaatacttccaatttcacttcacgattattctctccaaaacaaccggtaccttgcaaatccttcaagttgacataaacaatcagcaaatcacggcacgaagcagacacgccactttcaaaataagtaatatccattgcctcaaccgcacccggtgtacgaacaacatgttcggccacagtttttccatccttatatcctatcgctttcaattcacctcgctcccagttgacattgaaaaatgtaaaaggagggaagtcgatattctcggcatttccgccatcaggacgagatacatattccgaagttgatggtttgtcatcagggtattgacgtgctatcacccgtccgttaagctgcaatttcacctcatccacattgccatatacttgcagtgtatctgaagaaccttccaaccaatggctattaataaatacttcgtacgtcataggcccggcaggtgtaaaagtaccttctttcatctgcgtacggaaataaagtaaaccgaatttgggtaagcggaacaaatcggccaaaccactgtaacaaatattatcacaacatccccgattataatcatacatactccacactgccccgccaatagtccaaggataataagcacgataacggttataactccactgggcattccaggcattctgcatcaatgcatagtcaccatctccacgagtcacgcgagtggtgctataatgaccaccaaattcataatcataatattcacggataaatcccggttttgaagttgtattgggacggttatatccttccttccaatcattataacatacatcgaaaccatcatatccataggtgtcgcccgatgtgtaacattgatcaccgggaaactcctcatgagcaatccgcaccgcttgatctttccaacttttgggaggccatgattcattaagagtagtttcccacataataacagaaggatgattacggtcacgacgtatcaaatcacgaatatctttgtaggtatgatcaacgaacccctgtgctttattgaagaactgccatccaggaatcggttcaataactaataaccccaactcatcacaagcctccagcacagatggatcttgcggataatgtcccaaacgcaccgtattaaaaccattatcacgtatctgatacatatctcggtattgcgcctgatcggaaatagcattccctacataaggatactcctgatgccgattacttccttccagtttcaaaggtttgtcattaataacaaagcccttttcgcgcgtcatttcaatacgccgtataccgatacgtgtatcctcacagtcagtaactttcctaccatccatcacctcagtgcgcaatacataaagagccggcgaatccggataccataatttaggattattcacggtaaactgttgcgtatggtgctgtgtagtgccggcagctaaaacaagcggactttctaccaaagccactttcttgccgcgtcctttcttcttactccattcataaagagtatgtcgtatagtcagatgtctttgcgtcccaaccttattacttacctgtgttttcacttttatctcagcttcctgtttcgacacgtaaggataagtgacaaatattcctccaccggctacttcatttgccataatgggatgagtaatatgtacaggatgctttacaatgagattcacatcgcgatacaatcccccatagtaacaaaagtcaagggtttccaaaggctttccgggaggtataagcggattattacgattatccaaacgtactaatatttcgttgccacggtcggcatgaagcatccctgtaacatccaccacaaatggagtataaccaccggaatgctgaatcaagtgttgtccattcacccatacatcagccaaatgcattgctccttcaaactccaaccaaagttgcttatctatctcttttttactgacattgagtatcttacgataatagcatatcccttgccactgatgaagcacaacaagcgattccacaaaaggagtatgaggcaaattaatcttctcccaatttcccatcgaaagttgattaaattcctgcttcaatgtatccggatgtactgccaaagcctgattttgtgcctccacatgctggatattgaattgcgaactccaatcagaaccttgattctttatttcaatctgtttctgttccttcttcaaacgttggaattcccaatcagtatttatttttatactgtgtgcgccaagcggtaaagcaaataataaacttaatgcaaaaaatacaatattctttttgttcataatatttatataaaaacctctcaaaattcaaacgatattcaattaaacaaaagtaaatgattttccgcttattagatataaattcactaaaaatttagtaagtagagatttagcagtaatagtctttcaagaatcaaagcagattaatttacaaggagagagcatagtgctcttatcaagcactacactcccatattctgtcatttagccaaacaagtcttttcaaacaagatatttttctgtttatcaactacttgtagttttaagctattcctatcaatcttaccttttaaagctgttacactttcatttaccaaaactggaaaatgaactttttctgatggttcgtaataataatatcccggcttattaatgtgataatgccctgatatcattacatctattttacctttattcaaaataggtataaacttctctaatacttcagttggaccatgccatatatcaccctgccactctactggaggcatatgaccgattacaatcttataagaagcttgtttaaattcatcggattctatgacttgttccaaccatttagcttgttctgtccgataattatcataatcagttatcccactatattcaatatcagaatccggtttatcttcacctgtatcaagaaaaataaaaaaagcaggtccttgacgcaaagtaaaatataaatgcggttcttttactgaaaaataattttgaaaagaagttgcaaaaacccctctcgtttcatggttaccacgagcatagtacattggcttttcttgagcaaataattctattgacttattcataaagctattaaatacttgctcttcactcttggattgagaaaccatatctccattataaataaccatatcattttcttcataatttacagcattcaataattcagagatatcatttgtccgaccatgaatatcatttaaaacagtaaaagatatctctttcttatcacggtcattagtagtaaagcacaacggtttcttactccaaacatctgttgcagctattcttccatagataacttctactccttggtgatctaatatttcctgagaataaaccctataacgataagttgtgccaggctttaaatctgaaatcttgacgctatgaatcaaacttgtatttttcactccattcttagaatcaaaatacctacttctctccttttgataaaaattagatccatcatctggagccagttctacccaacctattgaaggtttattagacacccaaacaatcgtagtttctgtttccttcagattctgcaaatatggaccatatttaatctccacgcgttcttgagcaaatattaccaccgctccaaagcatatcaaaagaatgcttatcaaaaagcgcttgactttttccatttcatttatatttaatatttaaaagttctaatagccttcattctgtttcaaattaggattccgatctaattccgtttgtgtaaaaggtaagtatcggttatgtggctcataattaagttgttccaatttacgaaatttctcattctccgctgttggtaattctattactgccctacgagtaggatccgtttctttcatatccactgtacctgaaatacgatacaatgtctgattcataattgtttcggccaaaggttttcctgttgtatccctccagcgaagtaagtctgccctacgcaaaccttctcctgccaattcgagacaacgttccttacgcaccagttcccgcaatttatcttgagtattatacttatttcgatccactacgatatgtcctctcgttgttcttaattcatctaatatttcaaaaacttcttctatattctcattcttttccacattaatttccgctatggtcaacaaaacctccgcataacgaaacaaaataggacaaatagcagcattacttaatgaaggagaaaactgagttgttggaagaatatatttagcccagagcagtcctgtgtgcgaagcattagtagccgcatccataaaatcagcatttgcacttccacctatttttttatctaatgtattaaaaatgcgcttcacacctgcgggtgatacaaaatccatacctggataaatcacagtcttatacaaacgtggatcacggttataaaacggatgaataggatcataacctgaatcttcctcatcaatagttttcccattactcatttcatacatatctacaaagttctgagttggtacccaagaagcccatcctccatcttgattattaaacatacgcactgcattatcgaaagcataagtatcctttacatgttgcattgcgtatataatctcttcagaatcaacaccagcctcactgaacattgtcaaaaaatcaggatccaacttatacaaatctaagttttgtatatcacgagcagctttcatagcttgttccaagtctccccaatacaaagaagctcgcattttaatagccaaggcagtacctttggctatccgacctcgctcttccggtttcctattcaaatccgctatggctaaatcaagctcatcataaacgaattttttaatatcatcctctgaacttctaggcagctgcgcatcttctgcaagctctggtagattagttattaaaggaacacccccataccaaaagttcatctgaaaataacgccaagctctaatagtacgagcctgtgccaacaagtccttctttttaacctcatcagtaaaagatacttgtcctgcattttctaaaaccagattacaacgacgaatagtcgtataactataataccctacagtagaagtagatgataaagaaccatttgacacatttttataagaactagagccagtaaagctataagctatgtctgacatacaatcagcaaaaaaaacatcactagaacctgttgctggattgttccaatcttcgtagcaagccgtaacagcatttattacatcagcctccgtcttccaaaatgtagccggagacagttgatcattaggaaccgtatcaaaaaaatcatcacatgcagataatcccccgcttaaacaaacagatataatcaaacattttatcgctttcataatataattcatttttaaattaaaaagtcaaattaacacctattgaatgaattgcaatctgtggataatgagagcctcttcctgatggagcttcagggtcaacatcaacaggcaaactatcaaaacaaaacagattttcacctgaataatatacttttgcattagaaatacctaaaccttttaaccattttttagggagtgtatatccaaactgcacattctttatacgtaaataattagcagattgcatccaaaagctagaataattagaaggatcactagcagattttccacctaatgccacacgtgggaaagagccatcagggttttccgttgaccaagcatctaaccatatagtagaaggatgagaatcatcaccataaaattcgccaaacacttcgctagtaaagtaacgttctactccagtagccccctgcaataatacagacaaatcaaaattcttccaagaagtatttaaattcaatccaaatgtaaccttaggctgttctgctcctccaacacgacggtcatctgccgttagttttccattaccatctgtatctttataacgaatatctccagctttaaaagcctttccaaagggattcccataagttttcgtaaactgatctgcttcttcctgactttgaaaaagaccatctgccacatatccataaaaagaattatatgcttctcctacccgattgatatagtaatttgaaatcttatctcctccaactcccagatctaaaacttcattatgattaaatgctacatttccagatgcattaaaacgccaatctccccattgtttatgaaacgatgctgtaacttcaactcctcgattctccattttccctacattatctttataagcccccaatccaaaggtagcaggaacaagtacatccattataataccatcagtcacacgactataatattcaaccgagaaatccaagcaggaaaatatactagtttcaacagcaattccccaattagttgtagtctcccaagaaatagactcaatcttttgattcgtttgagttacccctgtattagttgtaccaccaaatggatatttagaacctatactataagtcaccatccaaggataaaaatcatccaaagcatcttgatttcctaactttccccaagaaccacgtatttttaacgactgcagccaatcttgtgtaccttccataaaagactcttctgaaatcctccaagcagcagaaatagaagggaaatatccccaacgattacttttgctaaaacgagaagaagcatcagcacgaaaattagcttcaaataaatattttccagcataatcataatttatcctaccaaaataagacatcatagccaactcccgagtaaatcctgaattttcctgagtagcaacagcacctgcattaatatccgtcaagtcattagtaggaaaattctcacgagaagctcttacctcatctttgttatacttctctatatgatatcccaataacccttttatattatgctttccaaatgcatgatcataattagccaataaatctaaattataacgattccactgatagattcgtttatcaacagagttaggaccatgatatttattagcattatactgaatatccttcacatagtccttataatcctggatattagatacataagaaccttgagcagtcaattttaagctaggaagaatatcatagtccaaagctaaagtacctgcaaaattctgattttttctagtaacaacctgatctaaatccaaccatgctattggattaccatccccaatagttccatatgttccatctgcatttttatacggaatccaaggagcaatacgattaacttgacggattatttgatctgaaccacctcccacataagagttcgttgggtcatcataatcattatgtatatatgccatgtttgcttttaaatctaatttatcggtcatcctcacatccaagttcatacggaagttaaactgttccctattactattaaccataataccattctgatgctgatatccaatagaagtcatatatttcacattatcagttccaccagaaagatttacattatgcttatgcataaatccattcccttgaaaagccaaattctgccaatccgtattaggatgtccataagggtctgccccattacggaacaattgaatatcttcctctgtaaatcgaggagattttccatccgattctaacgctctattatataggatagctgcatctgcagaacttactcgatcaatcatactagtggccttttgccaaccaaaacttccactataagcaattgtcggttttccacttttacctctttttgttgttatcaaaattacaccattagctgcttttgatccataaatagctgcagatgcagcatcttttaatacagaaatagattcaatatcattggggtctatagagttcatcgtgccagtttcgataccatccaccaaaatataagggtctgaattattcagggttcctgtacctctcaccctaatcgtaccagcatcttgccccggacgtccttgtcctgaagtaatagtcattcctggaactgccccctgaatagccgccgtcacatttgtaataggccgttctgtcaattcttcactgccaacagtagctacagatcctgtcaaattcaattttttctgagaaccataacctaccactaccacttcttccaatgtctgtgtatcttcttgcaagactattttaaaagattctttcccctttgtagagacattttgtgctacatagccaatgtatgtaacaagcaattctccattaacgtctatctcaagactaaactgtccatcaatatctgtaattacaccattcgtttttacattcctttcaactacatttgctccaatgataggctcaccagtagcatctgttacgatccctgttaccttttttctttttgaaggagtagttatctctgattccttctcgataaaataaattttattgttctttatttcataagccacttttgtaccggtcaataacttacccaaggcttcctctaaattacaatcctttacctggatagaaaccaatcggtttacatccactacctggtcactaaataccagtgccatccctgtctgactctttatagaagacaggactttttctattttctcatctttaaaatttaaagaaactttttgtgaccatcctgaggcagtaaagccaaacaagagaatacccaacagcagtaactttttcgttttgttttttgagttcatttcatacacagtattaaatttattatttcatcgttaataaaaggcctttctgtataggctaacacatcattagaaaacaggtatgagtcaaattcttctttttttctttaaaatcgcagaaagcctcgttcatagtaaaaacaacaatcggtgatacctctgtcttaccttaatctataagaacaaaaatatcaccgaccaattttataataacgaatttattctttttcggttatcctaaacacgccttcttctgtttcatcaaaagagatatgtgataccgcttccaaatcatttaagacatcaatcacattaaccttgttagtggataaagtaaacctgttatccagcaatgctgaatccggtattataaaatgcacatcgtattgccgttccaataccttgactatctctttcaaaggagtcaaatagaaattcaaacctttggaacgccatgaggatatctgttccatattctcaggacgagaaatctggcaagcacccgaccggcgattatactcggcactttcccccggaagcaatggatattctttgcctctcacatctttcagcaacacgccgccttcatccagtgtcacccacagattcgattctgccgtataagccttgacattaaattttgtgccggtcacttttacatttatgtcccctaaatcgactacaaacggacgattcttctcctttgccacttcaaaatatccttctccccacaattccaccgtacggttgaatataccaaacttttttggatacttcaaccgggtatccgaattcaattgaacaatcgttccgtcttgcagcacaacacgcatctgttcaccacagggaacgaccagttccgcatattcagtttcagaaaaaagaccaaccttgtctgccagaaaccagacagagccacaaagaaagataaaaggaatcagcactgctgccgcccaccaacgacgataggaattaacccgacgacggagagttatttgctgtaagaagcgctgctgcatcttttcttccggtatgacatgaggtacccagtcctctacttcattctccgtcaaagaagacacttctctgtctatccgtttcgacaaataatcatgcccttcttcggtagcaagccactccgaaacagcttttgcatcttctgcggatgctttattattcagtactttatctattatagcatcatctattttcatcttttgcctgtttttcgctaattaataagacacttcacccgaataaaggtatgagtccgtttctaataaaaaaaataaaaccacactgcatgaagcaacattatcaacggctcgatagcgctccgcaataatttaatcgcttgtgtgtaatgtgattttacggtagggacagttatctgcatcatgtccgctatctcttgattagaaagtccttttccaatcttcaattgacatatttttcttttttgaggaggaagttcgcttatagccgaccacaaatgctccttcaactctttgctctcaaattcctttaagaaaccctcatccacctcttcaccttgctgggctatctcataatgcttttcaaacacaatctgcctatgccgcaattcattcaatatatagtttttaagaatggtgaacaacagactcctaatgccggaccgaaaatcaaaagaatcgcgctgtccccacactttcataaaagtatactggactgcatcttctgcttcttctccggattttaaataccgataagctaatgcatacaacagccgattgtaccgttcaaagacaacggtaaaggcggcctcgtctccctgacggagtccggcatataatttttcatcaaaatctataaattgattcatcacagaatagtttcaattaaaggttaaggcgatattcaatgaagcaaagttaaataaaattcggctcattagatatagattttcttaaaagattccgatgcacaccaaaaagactaaagtgttttccgaaaagactaaagtgtttttgaaaaagacctaagtgtttttttaaaaggccttggtcttttaaagacttccatcttttcagccaacaataaaagcgttattcatttttactcaacaggaaacaagaatcaattatcttgctttcacacaattcctatcataaagtactgatttaaaactacataccgtgaaagaaacatctgctttgtgtgaaaggagaaaacattataactttcctgtcaatgtacccattgatatagcaaagctttcaggataccacctaaattcatacctataaagttttgccaattctataatacttattgcttatcatctaccggaagcggagtggagttatctttataagcggcaaaacctttaacctttacacgctcctgcttatcgctttccgatgcagcattactcaactgttgcagattctctttgatactgtcatgagtaataaagaaatgatcaagcatcgctttcaaatattcatccaacggtccctctttcggagtaaacaacgtgtggcatttcgaatgaagccccacattcttctcgtcttcatcggctgtatagatagtagtgaccaacgattccacattcaccaaatttactatttctttcagataaggtaaggccggattctctatgctgatagatgcccaccacggattccaaatcatgataaagcgggcctcatcctctacagcaatataaaaatcatctccctgatacttaaacacgatatgcccctcttcatttgtctcgggttggcaacctatcttcttcagcacagcaatgaccagctcttctgtcccgatttcttccaaatcttctttcgtcatgcggtcaagatgatctctgcgctttttccgttcgtggcggatacgaagaagtaaaaaggttaacggccataatgccaatgctataacagcaataaggatagtaagatcggtcatgtttgttcgtatttaaaggttatgatatcgaaacaaatataagcaatataatcgaaaaaacacactattacagtttaaatgtttctgcctctctcccctacggagtgtttttcctttcattagccgttgaaacgtcctgttgatggggggggaccggtaaggtcttttggttttatttccagccggatatatattgcagcaattggcttctggtcattcctgccactctgataaattccatcctgtttgcatactccaacctctgattaccaaaccaagagttctgcattctgggatgaaacaaatgcaggagtggtccttgagcccgatagatgggtaaaccaagtatctccatacgcttgcaacgttccgcatcctccggtccccagccatagaaatgttgattttctccgccatacttgatataaacattcttattgaccaaaaacgc

SEQ ID NO: 6939 - DNA, 31865 bp, Unknown
  gut microbiota DNA sequence
gccaagtatctccatacgcttgcaacgttccgcatcctccggtccccagccatagaaatgttgattttctccgccatacttgatataaacattcttattgaccaaaaacgcacctcctaccgagttcggtccgtgagccaatacatattcatatatcttctgacagcattcctccatgttcatttcccgtttcttcagcagcatactgtcttcctgcggaagcatataaaatcttccgtcgtatggaaaactcatgaccgcattcccttttcttatggcatcaacagcttccagtatttgctctttcggaagcagcacatcggtatcccatataccgacaatcgctccctcagcttcctgcatcagttggttcagatatttggttctgtggaagacgggggaggcatccctcacaaaagtcttgtgtatatgttcatcgctgattttcaattcataatgcggatgttcatcggcctcaagaattcttatctccatccggatggaatttttcaaagccattagctgctctactaccagatccagattctgtgccctttcgggcgagtccacacggacgggaatgacaaaggaaaccttccgattcgattgcaatgcggataaagaaagtatatcgaaagttgtttccgggcataataatcagattggctgtctatggtggttttcttatatagatgaggcaccaactgggggtgtgtcaggaacagttgtttgcgctctctgtttatggtgtatatattatgacctgcagtcatgcaacttaaaatgctgtccatctttatatcagtcttttaatttataaatagccagaatcggattatcatccggccccatcgagtcaatcatatctagaagctgctgacgcttttcggggaatttcacgttcgtggattcggatactatctttctgatttcatccatattgtcttgggtgatacagattgcaaactggttttcattgacataactcattttacgaaggtggtcggaacaaccgtcaatgtcgttggtgatgccgggggcagatctgattatccattcaaatcctggaagattatcccatggtttagcctcttgtttccatgtctttatttctttactttttttgtcgtatctgaagaaccatgctttttgctccaatccaaaactgcctaacagacagtctttggtttcacaaaaatgatgaaatatgatataatttttccattcaggactaacctttagttggagcggacgtttgtatttccctaatgataagagatatctggggcggatggtgtcatcaaaagctgcatagatggtatccgtgaaaaaagaatacacattgggatgattcttataagcccatgcgacagcgaagcctgtatttggtttgtttctgtagtcaaatccggtgtagtccacctcaggtgtttgttcttggatgatatttccatcaaaatcctgaatggtcatatcgcacattgaatatttaccatcccaaacgttataaaatggaaagtggatcactctgttgtcgccaatgtaataataccatgcagaagcataaggtttgtttagggggatacatctcacaaactctccgttttttattttataaacaaaaagttcatcgcgatagtctgaggatagatagaccaagctgtctttggctacaacattaaccggtgaatacatttcacccggtccttgtcctgatttaccaattgtgcggataaatttccctgtgaaacggtcgaacataaagatatgagggcgaattgggctgccaatgcaggaaaaaaagatggcactgtcggatacataacccttatacatttctccaaccaaagcattgtctgccgcctctagttttacatattccacatcctccacaatatcgctcagcagcaaagagtcgctacatggcttcaggttatttgccaaatctattactctgaagagcgtgtcttcgttcacttccggttcgtctgttgctattgcggcagattgggaggacttattattgcaagagagcaacatgaaaaatcccatgcacaaggttaacaagtatttcatagtgtgtgttttaatattttattttttcaaagagtagggaaggagtaaatatattgctgcattaggcaaatttttattttctcattccctattcttatttttaacgcacggcgtatttagaacatggttcgttattatataattgttctaaatagagtataaccaccatcagtaatacatccaccagttgaatttccgccgctaggaccgattttatagttagcagttccattattatgagtagtagaacctccgctaccttcataattgcaaccgcaaccacatgtcctatcaccaccattgagagcatccatttcgcgatctttcaactcggcatcattcaaaccatttagtttgattttcttcaatgtcttcataattcatttaatttaaaattatagtttattttacctataaatctcttgagaggaacaaaacaagaaaatatcctattgcccaagcgtgcgcacacttaagagccctattccttttgccccggtttctaatgagcggtccttcatgtacagaagattgtattccattactttctcgtccatgtctttaaatgtttcttggatgtctgtttccataaatccttgtttgataagatagagcatgccccaccctatgcctgccagccctcttttgaaagagatgggtgtttcggtgtgcagcttctccaatatttcatttaaaaactcttcagcaaaatcttcgtataaactattgccggtatatcgtgcataatgaaagaagaaaatgaccattcccatcttgccgttgtatagccctaaatcagagtgaaaagaaccataaaacaggtaatgattggctattttttctaataaagcattatcatcagccatcttcttctttcttagttagggattttctaaacacctattttaaagtttcccgataaacaggtccctctgggagtagttatcaataaactataattccctgctgcataccggcttacatcgaagatttcagtctggaaatcattaaatgataccgtgcgtgtttctactgtacctgagtttcccacaatagagacagttacatcttctattgcatcaaaaaaggtaaggataagtttctttcttatcttcatttactgtcccccatgcgggaatagtaataaatgcaaggagcaaaaaaagtacgtgtttcatagtctgaaattttaaatgatggcaaacataagcctattttaattcagatccaaatgaaacttgaaaaaataatgagatatcactatcatgctgattattaatatattatcacattctacactacacttaattgccaataacgagatgttttgacgaagaaaaagcattaaaaagtatttaaatcacgcctccaactcttttatagaattgataaattctacaaaaatatgttttcctcccttgggaagccctacttttttacaaatatcactggtatatcgttcgacagtccgctccccgatacccagtaatgtggcaatgtcttctatgctaaggtttagtgcagttaaacaacatacgtccataagctgatttgatttggataatactgggtaatgctttatcagcttatcggtaaaattttgattcgtcaagttaagccattgacgcaggttgtctctctccagctctttgtcatacgttttgtccttcgtgatggacaaataggttttgaagattgaactataatcatcctctttgttctccttgctcttctttgttttctttatgaaatacttcagccttcttttttcattttttaaatcgtttatttgactttccaactcgcttatttggattacataacgttcgttttcttgggaactactagttagtaccttcttcttctcttccaattcttctatttgtttttgcagagcatttgcctttctccattttttttgcaagaaagtaactgcaattatacaaatgagtgaaccaacaacactagttagtatccatttaaaatatagttggtcgttggtacgcgccagcacttcattatcgtatttctgctgtatttttcctacttcttctgcacggttttccttgtaaatggaatctgttagtgctatataatgatttagataggagtgctcttggggatgagaagccaaaaaatagtttaataaatccagatagctattggatcgcactagcaagtccgggcaagacaataagtgagtaaagagactgtctgctttctctttctgtccagtatatgcatatagattggccagtcccagcgacaacttgtcgggaaaatggggagaagataatcgtatggcatgaatcagatatttttctgcttctgcatagttcttttcaaatatctttctgtttgctatattattgtatattttgacctgaaggtcaaggtcatttagagaatcggcaatatctattaaggtattgatgcacctattagcgctgtccgcttgatgaagggtataataaagagttgacagattgagcaaattactggcgtatgcaaccgtgtcctttccatctatatttgcttgcacggctttttgataatattctttagctgggtcgaaatggaaagattttttattaatatatcccaagctgctataaatacgggcaacataccgtttttcattcatatcgggaatacacatttcggcttctttgtaagctagcagggcattgggaatgtctttggtatattcttccaatatacatcccttcacataaaaggctgccccttttttatctgcgtcattcttatctttataatattctatggcaaggtttatcaatgaatcggaggatacagggatataacagcgatattgggctagcgaaagcagcaaagcatagtctgcctgctcttttccggttaagtgccgagaggtagagatggattccagtatatgcagtgccgaatcgggagcggcccatataagttcctccgcttgcgacaagtgctctgtgacatgacgagcggaacggtcgcaagctgtacatgccaatagtaatagaatggtcaggataaatagaatgtttttctcccttttcatagttagttatatatattattgcgaagtaaataaaaaagtttcgcaatatcaaagttttagaaacttaacgactcgttttttacagattatcagaacacagccaaatgctgaaagcagattgggaaggggcttggaagcacggctgaagggaggatgaggggatgtgcttgctaaaaatcagtattgaattgtcgtaattccgcccgcagcagatgtgcccttccctccgtcatgctgtccagcagttcccaaaaacgaggaccgtgattcatttcttttgtatgcgacagctcgtgcaacagcacataatccatcaggtgcgaaggcaagagcatcaaatagcaggaaaggtttatactcccggccgccgagcaactgccccaacgtcctttgcttccggttatcttcactcgtttgtatgacaagccatagtgttctgccaatgcatcaagcaaaggtggcaaatattcacccgccactttcttcatcgccctgataatggcattgcgcaccaaccgctgcacctcctcctttgtaaagtcaacatcacgaggacaaatgatttttattccttcctccgtattccgcacagaaaaacaggtaaaattgcctttttccagccatagcctgaaacaaggggcctgaatacggaaatccaagtctatagatttcttgcataccctctgccagtcctgcaacaagcgttcacgatattgctctacaacttccatcaccttactgctcagactgtaaggcggtaccgtaacatgcagtccatccggctttacacgcatggtaatgttacgtgccaaacgatgggtacgcacaataatacgattgaaatctttgtcagctaatactctctttgttgccatatcagccacaaagatatattattcataagaaaaaaaagagggaattgcaactttactgccactctcttcgtctaatagatagaaaccaataaaaaacacagaaatatgaaacgtacatacttttacttattcagtctggttatgactctgacaagctgtgtaaacggcattgctcccagcaagaacaaaataaccaagaaatacagtgtggaagcattcgataatattgccagccagggtaccgtcaatattgtattcaagcaaagtaatgccacaactgtagaggcttatggccccgacaatatcatttccagtcttattgtcacttcggaagacagtacactgcacatctccatgaagaaaggtgtgaaattccgcagtttgaagaacaacaatgtcacaatcactattactgctcccaaattgagcagcatcagccaacaaggtacaggcaatataaccttgaaagattccgtcaaggtagatgatataaaaatcacctctaacggaactggaaactttaaagcagatgaattgaccgccgataatataagcgtaagatccgacggaataggcaatgtcatactgaaaggaaaggcagagaaggcaagctatcacatcaaaggtattggaaacctaaacgccaaagatatgattgtttcagatgttgtcgttgaacaaaaaggcattggaaatgtttcttgttatgcatcaggaaagataaccgtaagtacaaacggaataggcaatgttgattactttgggaatcccccaactaccgatataaataaatccggtatcggtaacgtaaaaagaagataaagctcatttcataattctctctttacattagattatctacctaaaaaaggattactgctcacgcggtaatcctttttacattatttagttagttaatttaaaatttgagagaattgaaacttcacagcctcgaattaaaaagttgttttaataagcactaactatctatttatatataaaagcaaatgaaaatgttatctaattcttcactcctgctgcctcatctccggctatctttgtaaccgtatctatcggcagcaccggttcgtatgccacttgcggatcatttacggtatcacggtaatcatcatgcatatacaccatatcgctaccatcatcctgcatggaacgttgcaccaccgttcccatcacaaacaagacagctatcatggcagcagccttgaacaacggcataaagcgcgttcgcaaagtgaggcgttgcgctttcacaaccggtttttccacccgggccagaaccttggcatcaaagtcactgcccagccccctctccttctcaatctcctgataagcaaacattgccttgtaacggagtaaatgagcaggaatctctttctgatgaaagaaagaacgcaaaatctgttcctcttccaaggaagtctcacagttccagtagcgttccaataactgttcaatgtacttataatccataatcttctatttccgtatatctttgttttatcttttgccgactgcgaaagagattgattttcacctgctcttccgttatctgcaaaatatctgcaatttctttatagctctttccttcaatatcccgcaactgcataatactccgctgcttttcaggaagttcgttcagcaggcggtgaatcaaacctaattgctcactctgtgccaactgttcataagggttcaatgcatcgggcagttcctgtgtttcgggtgtcaattccatgtgctgtgaatctatcttttcactccggtctattgccagatttcttgctaccgtcagacagtaggcttcgatggattcaaaattcggccactcatcacgtttattccataccctaatcatcgtatcctgcaccacatcctccgcttcagcactgttcagcgtaatacgaaaagccaacctgtagagtttgtctttcaggggcaaaatgtcgtttcggaaactgatttcttgcattgctctgtaataatgacgggtgagttgtacaaaagttacactcacccgcctattttttgaattattttttgattatagttccgccttctcccttaatggctgaagccaaggtaattacaacctgactcactcctgcatcaatggcagagaaggaattttccagtttaggtatcatccctccctgaatgatacctcgggctacatactctttaaattcttcgggagtaataacaggaatgacgctatcatcgtcattttcgtcgcgtaatacgcctttcttctcaaaacaatagacaagtgtcacatcaaaaagtggcgccaacgcttttgctgtctccccggcaatggtatcggcattggtattcagcatacttccctgcccgtcatgagtcagaggagccatgacaggaacaataccctgacgaatcagtgtagccagaaaatcggcattcaccttttccacatcacctacatagccataatccacctctttcaccggtcgtttcactgaacgaataacgttcatatccgctccggtcagtccgatagcattcactcctctagcttgcaggcctgcaacgatattcttattgaccagtccgccgtaaaccatagtcacaaccttcagcgtctcggcatccgtaatgcgacggccattcaccattttactttcaatacccaatcgggcagccagtttggtggctgaacgtcccccaccgtgcaccaacaatttatatccttcaatagcggaaaagtcggccaaaagccgactaagcgtagtttcttcctctacaatctttccgcctacctttatgacagtcagtttttctttcatccttttattccaaataagtatatccataaagcccggaacggtagttggacaaaaattcttttccttcttctaccgatatcttaccttcttttacagatttagtcacccaggtttccaatgtacgcaccagtttcttcggattatactgaacataatccaacacttccgccacggtttcgccatcaatcacctgatcaatagaataccctttatcatctaccgatacatgcactgcattcgtatcaccaaacaaattgtgcatatctcctaaaatttcctgataagctcccactaaaaagacacctatgtaataagactctttttgcttcaatgaatgcacaggcaggtcgtgcgatacataacgggtagatataaagttggctatctttccgtcagagtcacaagtaatgtcttgcaaagtagcattccggtcgggtttctcgtccagtctttggataggcataatggggaatatctgatctatcgcccaagagtccggcaaagactggaaaagcgaaaagttacagaaatatttatcagccaataatttatccaatttacggaattcatcgggagcatgttttaacccggaagcaatttgattaatctcacgagtcacagaccaatagagacgttctatctgcgcacgggttcttaaatccacaataccatgactgaacaaatccagtgcctcttcacgaatttgctgtgcatcatgccatgcctccaacatacggctctgattcaaattatcccatatttcatatagttcatgcaccagttcatggtctttttcacttacttcaaagtcttcatccatttcgggcagagtagctgtttccagcacttcaaaaatcagcaccgaatggtgtgccgtcagtgagcgaccactttctgtaatgatattggggtgcggaatattatttttatcactagcatccaccaacgtagagatagagtcgtttacatactcctgaatagaatagttcacgctgctttcactattggaagaccgggtaccgtcatagtcaacacccaagcctccaccgatatcaacaaactcaacattgaagcccattgcgtgtaattgtacatagaactgtgaagcttcacgtaaagctgttttaatacggcgtatcttggttacttgacttccgatatggaaatgaatcaacttcaaacaatctttcatgtctttcttttccaaaaagtcaagtgcttccagcaactcactggaagtcaatccaaacttgctggcatctccaccgctatcttcccattttccactgcccgaagaagccagtttaatacgaatacctatattagggcgtacattgagctgtttcgccatctttgcaatcaagcgtaactcattcatcttctctactactagaaagatacgtttccccatcttctgagccagtaaagccaactcaatatagctctcatctttatatccgttacagataatcagcgagtctgagtccgtgttaatagcaatcactgcatgcaattcgggtttggaaccggcttccagtcctaaattaaacttcttgccatgacttatgatttcttccaccaccggacgcatttggttcactttaataggatagatgataaagttttcagctttataaccatactcttcggatgcttgcttgaaacagttcgaaattttttcgatacgattatcaagaatatccgggaaacgaaccagcataggtgctgcgacatcccgtaactgaagctcgtccaccaattctttcaaatcgactgcgacaccgttcttacggggagttaccactacatgacctttgtcattgatactaaagtacgaagttccccaacctgtaatgttgtagagttcttccgaatcttcaatacgccattttctcatttcttgttctgtgcaaatagtgtgtatacttttactaaatagattataactttcaatctgtttatttatccaacagctttctcaagctatctactgatgcctgtatctgcgacttgtcttccaactcgtcggcccgaaacagaaacttcgcctgcgaataaaaaggatgacgcttctgcaacgcttcacaaataaagttcatcaattcttcatcgcttttgtttgccaataacggacgttgttgcttcgccacttttaaacggtgaaacaacacctcgggctccacctgaagaaacacggtatccccacaagcattcatatagtccatattgtcaaaaaaacaaggagtgcccccaccggccgagattacaacatcttcaaactcagccacctcatgcaacattttttgctccaattcgcggaaaccctgttcaccgcgttctgaaaacaactgctgaacagttttatgaaaacgctcctcaatataccaatccaagtctatgaaagtaagacccagttcgcgggaaaacgctttacccaaagtcgttttccccgcacccatatatcctattaaaaatatacgtgtcatttctttttcttagctgccactcgtttacgagtctcacttttttctttctgcagttctatcaccttaaagcaagtttccagatttaaatctttcggttctacgctttcaggaatcttataattctttttctgataagcaatataaggtccgtaacgaccgttcagaatctgcaaatcaggctctttatcaaatgttttaataatcttcttttcggcagcttcgcgcttggcattaatcatttcaatcgctttttccaaggtaacctccatcggatcttcccccttgggaatagagacgaatacattattatgacggacataaggtccaaatcgtcccactcctaccgtcactgtcttatcttcatactcacctaacgttttcgggagcttgaacgaatcaagcgcttcttccaacgtaattgtttctatcgaaagacctttcggcaagtgcgcaaacttgggtttttcttcatcatcggctatgcctatctgtatcaccgggccaaatcgaccaatttttacggatacaggcttcccactcaccggatcattgcctagaattctttcacccaccttatgctcgctcttcgcattcatggtcttgtctaccaacggatggaagccgtcgtaaaagttcttcattacactcgtccactctttctcgccttccgccacttcatcaaattctttttcaacactcgcggtgaaattatagtccataatttcggggaagaatgccatcaagaagtcattaaccactatacctacatcagtaggcaatagtttagacttctcatttccggttgtttccgttttgactgtttcggttatcttgttccctttgagcttcaatatctcgtatggacgttttacgccttcactgtttccttttaccacgtagccacgttgctgaaccgtcgatatggtaggagcatatgtagacggacgcccgatgcccagttcctccagcttacgcaccagactggcttcggtataacgcggaggacacatactgaaacgctgagtggcagaaatttccttactctctaatgactgtcctttactcaaaggaggcaacaagcggctttcatcctcttgttcgttatcgtcgtcataagactctttatatacacgcaaatagccatcgaaaatcacaacttcaccaatagcaacaaaagtttcttcactattgctgatagagatagtagcagtggtcttttcaagttcagcctctgccatctgtgatgcaacagtacgtttccaaatcaattcgtacaatctctgctcctgtgacgttcccgcaatagtctcgttcgacatatccgtcggacgaatcgcttcgtgagcttcctgagcaccttttgtcttcgttgcaaactgacgtgtcttcacatacctttctcccatcagtgaaatgacagttgatttgcaggccgccaatgccaagtccgaaagattcacagagtcggtacgcatataagtaatctgcccgctttcatacaaccgttgcgccaccatcatagtctgcgcaaccgtaaaccctaacttccgagcagcttcctgctgcaaagtggaagtggtaaatggagcagccggcgacttcttaaccggacgagtcgtaatatcttcaatagaaaactctgcatccttacacaattcaaggaatgcctgagcctcttcttttgtcttaaaacgtctgtctaactcagccctcacttccgttttattaccatcggcatcaggagcttcaaatattgctgttacacgataagaaggctcactgacaaaagcgtgcacctcacgctcacgttccacaattaaccgaacagcaacagactgcacacgaccggcagaaagagcaggttttaccttcttccataaaataggagaaagctcaaaacctacaatcctgtccaagatacgacgcgcttgctgagcatttacaaggttcacatttatgtcacgcggggtttcaatggcttttaatatcgcagttttggttatctcgtggaatacaatacgctttgtcctcttcgggtccagttccaacacttcatataaatgccacgaaatggcttctccctcacggtcctcatcggatgcgagccacaccatatcagcgttctttgccgcagctttcaactcgccgaccaattttttcttatcagaaggtatctcataagtcggttcaaatcccttctctacatcgatactgaaatctttcttctttaagtcacggatatgcccgtaactggaaagtactttatagtcttctcctaagaatttttctatggtcttggcttttgcgggtgactctacaattacaagatttttttgcataatataatgtattccattttatttaagggcaaaagtagaaaaaaagcagaactacacctatataataaggtatgtttctgcttttttttcttaaaaaggctctttttagaagcctatttaactaaaatcgaaaagtaagaccacctaaaacattcagtttttcggcagggtatcctccttcgtaataatattgtttatttaacaggttgttcacatccacaaagatagagatgtcttttaaaagctcataggtagcacccacactcagattactgacaggatcgacatcctcacccttacgctttacataatcataacctaaccgaagctttaaaccgtccatcagcttggcatcaactttaaagttcagttccatttcaggcttcatggcaactatcatatcgtcgtcactatctgttgtccaaccgtaatacgtaccttttaccgatgcatcaaaatagtccttatagccatatttcacttctgcacctccataaccaatttttcctttatcctgtacaaaacccgtatatacaaattgtcccgcaggcactaacgtacagaataactcatgtttacgtatctgataaccaccaaatatattaaaccataacccacttacaggagacgccttaaaacccaaagttgcatcaaaagggacataagtcgcatcaagctgctgctctgttccccaatagggagagatgcggctcaacatacgataatcgtttacctgtctgcctccttgtgcattcaaataaagaatataactatcggagaagatatactcagcacgaatgtccggggctacatctataccgctatcattaccggtcatccagtcgacatgcgcacccagatgcagtctccagctatcttcatcaatagcataataaggattcagacctaaagaagtataatccttcatcaagttatctgaataaaataaattatccatttcaaatttaatacccacacgctgaatatcgctcagttttccccatacatcacctgctgtatgaattattttttccgtgctgttctcatcagaaattgccggatatttctgtttaaaatactgaaagcctgtttgtacagtaaattgcaatggcatcatttcatccgtagaagacaacccgacatagaaatctcccagtgtgtgatgctgtttatcattctcgccggagatagaagaaatcggactcaacatataattaaatacacgagaatgaaatcctcctccaagattcaaatccatattcctgaaactatgtctataccctatattgaaagaagaagaataaaaacgggatttccaatcattatcaattgcatctttcagggttccattcatgccatccaatgaagtagcaacattcagacggtcacctttcgtaatgtcccatatatatccggccttgaagtccacattaccataattaccggcacccgcacgcacatatcctcgtttggccttctcccattcccattcacggactataggaaacatttcttcataattccaggcagccacaggacgcaaagccgtagcatactctattcctttcttcactactgccggttcttccaccctgggcaacacatttattttggaagcatccatgacagtagggttatactcattctccactaccacagtgcggttcaaagtactgtcttgctgtgcatatacagccgacagaggcaacaagcccacaaacgctataattgctattttcttcataatctttaattttcggcatttaacttattcagtctgctctctatcattcctgcaatatcatcatctgcctggtaattctgcttcaatgaaagcaaatattgcttagcatctaaattacgtcccaatttcatataaacatcagacaacagcacaaagctacgcgccaaccaataagtatgtggagtgctgacttcaatataatccaagacttctttctcagcctgttctgtctgcccggcatcaaaataaatctgcgccactttatatttcgcttctgcaccatatatattgcgagtgtcttttgccaatatcttcaaatcatccatggcaccttccacttttcctgcatccagataagccttggcacgataataatgagcctcgttggataattcaggagcaacctttgtctccgccagcaaatccgttgccgccagcattacttcttctccattgcccaacatataagcactacgaagtacgcctgtctttgccaactgccggcgttccggcgaaacagctttatctttcagttgcttataaacagtcaacgctttttcatagtcttttgccgagtaagccatctcagcactcatcatcatggcatcttccgaatatttattattgggataagccaaaactttgtccaaatgttctatcgcactattgtaagccttccggttataatctatcaacccgacataataattggcattcaaactaaatgcaccttccgggaaagtttgcagataatgagtaaaactattgcgtgcttcatctatttcaccgcgcatatataccctttcggcagcaacataagtcaacgaatcacgttcgttcacatcaaaattggctccaccgggaatggtagaagcaaagttggcatattcatccaccttattcaaatcaatataaatagacttcaaatctctttgggcaagacgagcctcctcactacccggataattagtgattacctgcttataagcctggatagcctccggatacttatctccttgataatagagcaaacctatttcgttagccgctcgacgggccatattgctttccgggaatttcttcaacaaaatattgaaacgattaatagcattcgtatgatcctccatttgaacaaaagcacggccttgctcatacaaagcatcatccagatattgagactcggggtaatccgctatcaaacggtttaaaatttgtatctttccggtataatccttctgcaagccacggacaaaagcctcttgatataaagaataatcccccaaagaaggatctatttccacagcacgggcataatcctgacgggccgaatcaaaacggcgggcataaaagttacagtcaccgatacgattgtaagcatctgcctgtacagcacggtcattgacagttccacggtcaacaaaacgggtaaaccaattcaatgcaccattataattcttttgtttaaaatcagtataacccaaattgtaaagcgccagcccgtactcccgattcatcttatcgggagcgaattccaagtaccggcgtaaatcatttccagcctgagcatagtgttccagtctgtagtttgcctcaccacgccaataatatgcatcagccttagcagacatgttatattgcccgatagccaaagagcggttaaaatattctattgctttggaaaagtcggcattagcaaatgcctgagtaccgagacggaacagaatcttttgttttgcttccatgattcgtgcacccggatgctcaatctttgcaatagacttcaatgcagcttcgtagctacgagtattcatatacacctctatcaagtaatcatttacccgttcggcatacggcgaattgggaaattcattaagaaaacgttcaaataccgttacagattcagcaaaaggagaataagaagtctcatgtatacacaaagcataattataaagagcctgctctttcaccaacgggtcaaatcctgatgcagacgcctgctcaaaagccattcttgcctgattgcgttccttcaaattcaaataagccaagcccatgtgcaaatatgcattctgagacaaagcatcattcaccgaagtcgtttcacccagtgtggcagccgcctttgaataaacaccggtataataataactcatacccaactcatacaacgctttacgctgcggacgcgacaccgcaccctgataacgttccagcggtgcaatagctgcctggtaattattcaacccaaaacaggcttctcccaaaacacgttccatctgagcctcatctttatgaccggaataaaccttcaaatagcgttcagccaccgaacgtgcctgttcataattaccttgcaataaataaatctctcctatataataaggcactaaagatgaatatacagcatcatctttcaaagataaaaaagcatctaatgccttattataccgtttttccacataatcgatataagccaagttataagtggcatccgattgataacgcgggctcacctctttcagtaaaaggaaccatacggaagcatcgcgcaaattaccttcctttaaataagaagtggcaagacgcatggcacaatcatcgcgttctgcatcaggcagtgcctcaaggtcacacgccctaaacatagctattgcctccttatatttaccttcttcaaaatacaccgaagcaatcaaagaacgtaccctgtctgtatatcgtgaatccgggtatttatccagataagcctgcaacagctccacactgttttttgacttcaattcatattctctgcatacccttcggtattccttatcgcctgccacgtcatcgggaagaatttgctgggccatactttgcaaagcacatccccccatcaatgcagctattaatagagtccttttcttcatattctattctaatatttatattctttcaaaaagcgttttactccctcacgtacagagtcaagaccaaattcttcaggattcactttgtcaagcggcatccaaaaagaatccgccacatcatccatcgcttcaagatgagtcgcatcttccaccgtacaaaggaaaaactggtctaaggtatgtaccaaaaagccggaataaagataagtattgggcaacgaaaacagatatgccgctttttccactttcagtcctgtttcctccagcacctcacgcgccacaccttcctctccagtttcatacatatctataaaccctcccgaaaggtccagtgttcctttcttgggttctttaccccgacggcaaaccaataattcattcctctcattcaagataaatgccactgtagcggcacttgaattaaagtagtagacaaaaccacaatccgcacagcgtttggacttctcattattcaccacaaaatgtgaagaaccacatttgggacagtacttgaatagttctagtggatgcataattactccttttcttttatagacaccgcaaagatagcttaaatgacagataattcattaattaaatctaaaagaagaaagagaaaacacaattcttagtacatttgttagcaaatacaaatgtaaattactcacatggagattgttataattatcgcacttattttactaaatggggtattcgccatgtccgaaatagccttgatttctgctcgcaaaagcagtctgaacaatgatgtccgtcacggcagttccaccgcgcgtatcgccttaaaattagccaatgacccggataagtttttatcgaccatacaaatcggaattactctgattggtattctcaccggtatttattccggcgatgtattggcgtctgatttcagcaaagtactgactgcagcaggcataccagtcacttatgcccatataatagcacaaattctgattgtcatcttagtgacctatctcaccattattttcggagagcttgtccccaaacgaatcggaatgagcgcatccacacgcgcagccaagctactggcacgccccatgtattggctgtcagtcatagcttctcctttcgtatggattttggcaaaaagtacttcactgattttcaacctgctgcatataaatacagcagaggaaaaagttacggaagaagaaatcaaatccatgattgacgaaggagccgagaatggcgaggtacaagaagtagaacaagatatcgtagaccgcgttttctctttgggcgaccgcagcatcaataccattatgacttatcgtaatgatatagtatctattgatatagatatgggaaacaagcagatttatgatattgtatgccagcatttatatcaagtttatccggtgacacaagacaatactttggataatattataggtgtggtttacctgaaagatcttttcggtaaattagaagaagtgaactttaatctgcgtgatgttattcgtccggcacaatacttccatgaaaacatggatgtctataaggtattggaacaaatacgccagcaccacattaaatatggactgatctgcgatgaattcggcagtttgcaaggagtcattacaatgaaagacatattggaagcattggtaggggcactacccggcgattcggaagaaccggatatcattctccgcaaagacggcagttggctgatagacggacaatgttctttctatgacttcttaagtcattttgaaatggaagatttatattccgaatataattataacacattgagcggacttattctgcagcagttgggacatgttcccaaaaccggagaacttctccaatggaacgatttcctttttgaaattgtagatatggacggagcacgcatcgataagatattggtcaccctgtcagacaaaaacaaagaagataaataagatatgttacaaagagattatattatgcgtttggttcgccaattcatagaagcattggaaaaactggtggaagaaaagaaaaaagaggatggtcctgagtttcagttaaagatacaaagtatctatcgagcctattttaaccatagccatcacttctattatgaacaggatgcggaatatattttaaccgatctgtctcaagactatgaagggcaagagtttctgacccgaatcgatatgttatcggagttgctctatcaagacgctctattgaaagagccggacgaaaagaaataccttttagcaaaagcactctatctaaaagagtatttggacagccatagtgataccttttcttttgagcgaagaaacaaaataaatgaaatcaagaagttattagagttatagactaaaaaaatgcactttttttcaaagaatatgtgttttttctttcaaaatagtagataaattaaaaactattcctatatttgcttacagattgacaacactaaaatcaaaatattatggagaaaatagacagtcttgacagacagatccttgaaattatatctcaaaatgctcgcatcccatttaaagatgtcgcagcagaatgtggcgtttcccgtgctgctattcaccaacgcgtacaaagattaattgatttgggcgtcattatcggttcgggatatcatgtaaatcctaaaagtttaggatatagaacatgtacgtatgtaggaatcaaactagaaaaaggctcaatgtataaagctgtagtaaatgaattaaaaaagattcccgaaatagtggaatgccattttactaccggtgcatacaccatgctgacaaaagtatattctcgtgacaatgaacacttaatggatatattaaattccagaattcaagagattcccggtgttacagctaccgaaacaatgatatctttggagcaaagtatcaagaaagaaattcctattcaaaccgggaaataatggaatggctgactgactaccatttaggcggcattgttatcggcatttgtacatttctgataatcggtcttttccaccccatcgtggtcaaagccgaatattattggggaacgcgttgttggtggattttcctgattttaggaatagccggtatcatcggctcaatcttaatcaacgacatactcatttcttcactgataggcgttttctctttttcgtcattttggactataaaagaaatttttgagcaacgggaacgcgtattgaaaggttggtttccaatgaatcccaaacgaaaacacgaatacgaagaaaaataaactcctattttccgggcatttcttattatatttgaaatacccggaaaataccactctttctgcaaagacaattttatcaccatagagaaaaagattctcataataccattaacggttactctatttgccatatttttcgtatttttgtgagcgacatctaatataaaccgaagaaaaacaacatgagatacaaatatttattactcttattagcactattagcattaaatactcccatttctgccgaatatttcaggcatattggattatccgaaggattgacgcagccatcggttatgtccatacaccaagatcaattgggaagaatgtggtttggtacaagagagggaataaatctgtatgatggcaaacaaatcactgctttcaaaggttggtgcaacgcttccaatgattcagctcccatctggttgggaaatgaagtttcatccatcgttgaggacaaacaaggaaatatttttttcttagtcgatgacgatattataaaatttgatatacagaccgaacaattcagtcgtctttctaaaggaagccgcatcccggttttaacttcacttgaaggagacctgtggtatatgagacgtgattccttattcaagcattcttcaggagccacggaatcaaccttcatgctaaaaaccggaattacttctcccatcacctgcctgacaatgttacccaataaaatctgtattggctcgcatgacggaattttcttctatgaccgttccagcgggaaagaaacacatgtactcagaggtattgacatctaccgcatttttgaaagctcacaaaaagaattgtggattggaacaagaatgtatggattatacagaatcaacaaaaaaggagaaatcaggcaagtgcctttcagccccggttcccccacaggaatcagcagctggcaaattcgtgattttgtggaagacggcgaacggaacatctggtttggaacatttgacggactacataaatatagtacgaaaacaggacagtattcccttatccaaatccccaaatacgtaggaggattaaaccacccatctatcttttccctttgtaaagatatgcaaggtactatctgggtgggaagctattttggaggagtaaattatttcacacccaaacaagacagctttgtacattacgactatgaccaaaacgccaccaaaaatcaatattattcatatataggcgatatcgtagtagacaagaatgaacacgtgtggctcagcacagacggaggaggaatcagctgtaccgacaagaactggaacattatccatcagtttacggcaggaggcaaaaattcaatcccccacaataacataaaaagtatatgttatgatgaagaaaacgaatgtatatacataggtacttatttaggaggactgtctcgttatgatttgcaaaccggacaattctataactatctggaaaggaggaaaggagagcccaatactccgaatgaagttgttttccatgtaaaaatgtggaaaggaaaattatatttatcagcacgcaacggtgtattttctttggataccaaaacgcaaaagtttcacaaactggatatcccaatcgcctactacgaagatttcgatatagacccggaaggatatttatacctgagcggaatgtttaatctggtatgcatgcatttagacaagctggaagcatcttatattccgctgacgcaaaaaggatataatgccaaaataacccgcatcttggcaactaataacggcgcctatatcagcactttaggaggcgggttgtttttctatgacaagaaaacacataagacagcccattacacagcagaagagcatcagcttcccagcaacttttgttacaatgtttgtttatcacccagtgggaacatactgataaccagcgacaaaggagtgacaagctattctcccgaaaaaaacagctttaccaccattaatttaatgagaaactttccaacagcccacattataagtggctgcggcattttcgcctccgaccaaaagcgcatttatgtgggcgataccaaaggggtaacctctttttcggaagaagaatttcacaaagccaataccttccgccataaccccaacctttatttctcggaattatggattaataatcaaaaggtagtggcaggagatgaaaccggagtacttaccaaggcttttccatatactcaaaagctcaaattaagccataatcaaaataatttgattctcagttttgccctgcctgactatgaacaacaattatcccaaaaacagttccaatataaattggacgggttcgataaaaaatggattaaaaccagccagacagaagtacactataccaatcttgatccgggcacttatacgttgcgagtagctgccatcaataacagcagcaaccaaagcggagacatcacagacaaagaaatcagtatgcaactgaccatctctgctccttggtatgccacttggtgggcattcttgctctatatcatcagttttataggatgcctttattattttatatccagtcgaatcgccaagcgcaccttagcactttcgttagaaaaagagcgttttgaaaaacaacagatagaacaacttaatcaagagaagctggtattcttcactaatgtcagccatgaattccgcactcccttaacattaataatcagtcatatagatatcattctacagaaatcttcactgaatccttctatctataaccaaatattaaaaatcagaaagaatgcacagcaaatgagcaatctgatttcagaattacttgagtttagaaaactggaacaaaaccataaaacattacagatatcccaacaagatataactccatttttgaaagaaatttatttttcatttgttgattatgcccatttgcgtaatatccattatgactttcaactatcagaaactcccacactatgttggtttgacagccaattacttgaaaaagtattcttcaatttattatccaatgcctttaaatatacacccgacaatgggaatattatcatatccggccgtacaacagataatgaagtagaaatcagtatatccgacacaggatcgggaattgccaaaaacgatgtttcacaaatattcgcgcgcttcttccaggcaaacaaccaaaagccgggtgaatattcatcgcccggtaccggtattggtcttgctttgtccaaaaccatcgttgaaaagcatcatggtacgataactgtcgacagtacactaggcaaaggaagtacatttaccgtccgactccccagaaacgcagacgttttccaggcagacaaaaacatacagttatcaaaccagcaacaagaaagctccattgtacccggttctttagatgtcctgcccgaaacagatacttacctgacggaatcagtccataccgaaaacgcagaagaaaagacccacaccgtattattggtagaagacaatgaagaactgctccaattattaacagagctattctccccattttatgaagtaatttgtgctaccaatggagaagaaggcctaaaacaagtatacgagcataagatagatttgattatcagtgatatcatgatgcccaaaatgagtggtacagaaatgtgtctgcaaattaaaaacaacattgattattgccacatacctctcatattgctgactgccctcaattctaccgaacagaatattgaaggactgaaccgaggcgcagacgattatatcaccaaacctttccatgcccaattattattagcacgtgccaataacctgattagaagccgtttgctcatgcagcaccaatttgataaaaagccgatatccgaaattgatttgacctgtatcaatccattggataaggatattctgaaacggacagcagagagcatcgaacagcacattgatgatacagaatatgatattccggtactttgcaaggaagtcggcatcggacgttcacttctttataccaagtttaaagcattaacaggaatgacacccaataatttcattttgaattatcgactgaaacatgctgcagctttattgcaacaatatcccgatattcctattgcagaagtcagtgaccgttgcgggtttagctcacctgtatatttcagccgttgcttcaagaatcagtatggatgtactccgcaaaactatcgcaaggaaaagaaaacggaaagttaattcaaagactatccggctcaatttatagtcttgggaaatgacactatgacatatatacgtgcaggctcatgcgtacgtatgtgcaggctcatgcgtacgtatgtgtagaccgatacgtatatacgtgcagaccgatgcctacgtgcacatttaaaaatagacagccggtactgaatgatgcaaaaagaccttgatgtttttcaaaaagctcggtatctttttcaaaaagctcggcatctttttgtaggggcagattatatctcaccctcacaaattcggttattccttcttttccgttcatccttacattttaatcggaacacacgggcaatcaaccgattaagaatgacaggacatcccctcatcctcctttcagccgcgtttatcaagtcccttcaaaatctgccttcagcctttgttttcctgattttggtggaagaagttttacgaatgaaaggaggctgaaagggtggtgacgaggtatcccctcactaccaaagcccccataaacagggcgtttcaacagctaatgaaaggaggaaggaagaagtggatttccggtagtaaggagaataaacgcagttggtttttgtgaattcagtcattgtatgacaagtcatttatgaaagaagccgaaaccgacattcttaactacaagccacatacaataaagaaaaggattgtatcaaaacgtggataatgctgtcgtttaatccgtaggggcgaggttcgctcgcccgaaaacagtttactttatgtcttcgggcaggcaaaccctgcccctacagccgacgattggaaaagccggtttagttttgacacactcctctcctttcatatactctccactcggcggaagagaaaacgttcaggccggattattaatagagccatcccggtgtctttttcagattcggattcttctctatctctgcactaggtaccgggaagatgctataatcatttgtctcagaccatttcacaccaccgttaccactactttgctgtccattacatgtatgagcacaaggttcataacccatataagtagagtattttgtttcacgcaatgtaccccaacgcagttcttcgtaaaagttaacactctcattgataagctcacggcgtgactcgttacgaatcttgttcaatccgtcctctttgcttgcaaaagtataaggaggcatctccaccgatgtacgctgacgtatcatgttaactttctcggcagccgcatccagctcatccaattgcaacaaagcttccgaccacatcaaaagtacataagcataacgcagaatcggttcatcaataggactattgtatgcatactcgcaatcataaccttccatcacaaatttacgatgacgataagcaaactctgcctcaccattgccatcctgtttcaagtcatacttaccggttactccccaatctgcagcctcttgcgctttcacagaatggcttgactgtcttaccggccaacgatatacataaggaaccggcgtcgtatttcccgccttgtacatatcgccatctccgcccaaaaactcttcaccataaggcataataacattgtaattgagtcgcgggtcacgattctcccatgctttcttcaagcgggcttcgttacctcccgaaagatacaaatgctcattggatgccttcattttattcttaactgcttttctgagcgctgttccaccgaccaattgtccgtcagcaatagtatcgcgcaagaaataaaccagacgatcgagagcaggcacgtcaaaatatccgggaataatatcattccagtcgaatggagtaccatctttatactcataaaggtcaacaatagcaggtgaaggagcataatatgagaaaccggtattattctcacggtccatcatagaacgtgttccacaatatttctgtatggcagagccatagtcaggcttggatatattttgcagcgaaaaaatcatttcgatacaagcttcattctcttcagtaaacaactctttatatcctccctggaaaaggtcgaatccacaacccttcactttctcaaaatcagcaacagccaatctcagcaaacttgcatcaatcgtagtgctttccaccttaccaactgcattgttatagttatatttggcaccctgcatcaagtacgctctaccgcgtaatgcgtatgcggctcccttacaagcacgtcctttttctttataatggtcaggaaaattcggttcgttaatacaatccgtaagatcttgtacaatcaaatcccatacctcagactcgggtgactggcccttcgtgcaatcttcaacagaagccaaaggttctgtataaataggtactcccagaccataacgtccgtaaagttcattgagacgcatataataataggcacggaggaacttactttcggacaacaagcgtaaacgggtttcttcgtctaccccaccgccacctacttccgaaaggttggcaatagcatcattggcacggtgaactccttcatataagtttttccacatcgtagagaagaatccgttgtcggcacccgccgtaccactcgtataaggaatagaacgatacgcttctcccgtcatgcccaagcattcaaaaggaaccacattataactataagaagtggaataaacaccccatccacgcatttttgcataaacaccggccactccctgattggtcagtgccgcattagaccacatgttgccggatgccacctggttataaggagccatatccaaatcaacacaactttgcaacccacaaaggagaatggaaagtaaggaatatattatctttttcatattcatgtcttgtttataagtaattaaaatgtaatattaacacctccggagaacatacggggaataggataagaggtgaaaccaccaccgcccatttcagggtctacacccgggaagtttgtaatagtcagcaagttctcacccgaaacgaatacacgcaggttactgatagccgcctttgttgtccatgatttcgggaaagtataaccaatctgcaacgtcttcaacttgatgtatgaggcattatacaagttaccggtattggcacggtatgctgtctctgtattaccgatacgcggatacggagcattgatattggcagtaggatcattagccgggtcgtatgacggatcggttgcggcagcctcagggtttgagtaatagaagatatttcgtgcattacgagcaataatcgttccttcctgccagctcttttcactcatattattgaaaccgcgttcaaagatataatagtacatcccggcattaccggcccaagtcatattcaagtctattcctttccaggcagccgaaatattcaatccataagtatatttaggagtagttgacttgcctgtaaagaaacggtcattgttattagtaccatacataccatctccgttcaggtcggcatataccaattcaccataccacaagccttgtccctgacctatactctgaccattgaagtcataaactttattacctgacgcatctctgtatgccaacattgcccttacccagtccaaatcggcttttgtacgaatcataccatcacgcggacctccattggggtcaggggtcacaccatctgcaagataaatattgccattaccctgatgacgttcccagagataatactcatcaaacatgtggtcttctacacgaatcgtattaccactgacatctgctacatcacctctgttagtaacaaacgaccggtttccgttttcatcggttacccaaccttctttgtatttacctttatacttgacaattctattcttattataagtaaagttagcactaatactatattcgaagtctttgatacggtccgtccagcgtaaagtaaattccataccttgatttctcatattagaagtattggtagtaggagcactgacagttcccattgtcatgtataccgaaggagaagcaagaatacccttcgtggtacgtgaataataatccgcttccaaagacagacggttattcaagaaaccggcatcaattcctatatccacagattcactggattcccagtgcaagttaggattggctatctttccctgacgtaaaccatcatatacatttccgtcaaaagaatagttaaccgaaccgtaagtcgcctgccattcataataaccggaagtagtattacccaattttccgtaagatgcacgcagcttcaagtttgagaaaatacctttcattttttccataaacggctcttcactgattctccatgcagcagagaatgaagggaatgttccccaacgtgagtccggtccgaaacgtgaagaaccatcacgacggaagttagcttcaagaagataacgattcttataagcatagttcaaacgaccgaaataagaaataacaccataatcttgctctgccgttcctcccaaagtcgggtccaacaaatcaagtgcagccgtaaagtcaggtaaatcaagatcaagcaaacctgtacgagtagcactgaatcctttcacattccagtaatactgctctgtacccaacaaaatagaaatatcatgtttaccaaaagttttcgcataattaatggttgctgtatttgtatgattctggtaacgtgtagtggcacggcttgtagtggcagtgctactgctgacacccggaataatctctccggtacggaaattctgtttatcaacctttctgctgtaagtagccgtttcgttaaacaaagtctgatagttgaaacgtgcctccgcagtaagtccgtcaaggatattcacctttgcataccaagtagtattcaaccgagtatcatcataagaacctcctctgctcattacatcagccaacaagttactggtagatgcgccatctacagacactccatatttaccgtcatgataaggagtcacagcaggcgtattctgatacatataagtaaaactagtattacccggttctctcgtctggaatgtggcatacgtctgtgtacccactttcagaaacttggtaatttgtgtttcaatattaatacgacccgaataattctttaatccggtgttcttcaatgttccgggattatccaaatagccgaatgaaagaagataatttgtattctcactactgccaaccaccgatacattatgcttctgtgaagtagtagacaagaacaattcatccacccactgtgtgctcgggtatgccagatagttaggaactccatacggattatccatgccgttaggatcttttgccagaccttctctccattcgtcaatgtcagcctgtgtatatttaccggcagcctgataattacggttagtagcccaacggttagccatttccatgtattcagcataattatcttcaaaacggaaagcctttccactcatcttagtattagatatgatacctgaataagtgattttcggagcttgtccttttttcccttttttggtcgttatcaagattacaccattagcacctcgtgaaccataaatagctgcactagctgcatctttcaaaaatgaaatagattcaacatcgtcactgttaacagaagaaatacttgcttctgaaccgtcaacaattaccaacggagaaaggtaactactattaaatgtaccaataccacgtatacgaatatttgcaccatcactaccgggtttacccgaaccctgatttaccgatacaccggataccaaaccggaaagtgaacttgacagatttgtagtcgcacgactttccaatttaccggcagaaactgtagcaaccgcaccggtcaaattcacctttttctgtacaccgtaacctactactacaacctcatccaaagtttctgaatcttctaccaactttatagctaggatatttgttgcgcttgtgacctttatatcctttgtaacgtaaccgatataggatatttgcacggtgcagtttaaagggacgtttaatgtgaactcgccattaaagtctgtgatgacaccatttgttgttcctttttcaactacattggcaccaataattggttctc

SEQ ID NO: 6940 - DNA, 17783 bp, Unknown
  gut microbiota DNA sequence
gataattactcacttttcaaacccttaaaaaagggttgcgttcggtgcatctcttagtaagagatacaccgaacgcacataagcactttattattagttgtttaagcccattaaaaagcgtcctgaaacttaagactaaagatatttttgcacttgccttgtgatttttcttctcaaaaagttttaattatcaaaactttgtgtaaatttgcagcgaaaagtgtatctcttactaagagatgcactttttttcttctctctcctgaaatcttattcaccacgttcccaacaggttaagtaccatcaatcatttgttttacatccaactcgtaaatcttaacggatgtcaacgtatcataatggatagattttgaggtatttggaaaagaccaaagagtttccgaaaaagaactaaggctttttcaatacgaccaagactttttagccaaaagggagcaatctttgttattattctaagagccgcttgtcggagctgccggatagtggaagaagacattcgtaggggagctacagaagacgggatgaaaaagacccggacggaaacggtttgcaaaatgaagagtgacggaatccccttttctacgatggcccaatatacagaactgtcgatagaagagatcgaacaattgtaaatctcagctaaggttcgcctaaaaggttctacaaccgagaacctttatttaatccgtggctgagggacataaaaaactcctcactattttcgcaaacaatgaggagtcggctatgttaaaacaatattatgttaaagtcgatattattcacttctgagtgaatgatgtccatcaataggaaacggttgtccgctccatgctttctgtgatgtccatggttcggctgcatctttccagaacgggtgatcggcaggcaatcccaatggcatgaataccaaagaagtcatgtacaaactgccgttgttggtataataattggaaaggtcgggctgatgaccggcaaatcccaattggaggaaccctttttcgttgaaatttccttccactttgaacatattgttcattacggcagttaatgcgctgcgcacctggccgttgctcattccttcgggcagtccgtatttccatgctgccatggcaagtgtctggaaagctcccatacggtacactacagaccggccaaatgcaggatatgtgccttcgggagaaataagacgttccataaatacattgaaacgctgcatgcgtttgatggcaagtttggtgctgataggagtccagaagtgatgtttgttcagtacttccagcatttcgatatacatagggtgaataacgtaagcattgtaataatcaagtgcgaactcagaaccgtctgagtaccagccgtcactcaaataccattcatttatcttattggaagcaactgtcaacacatattggtcggcatcttcgcctaccgacatcaggaatgcttcaatcaagccgcggaataatagccagttattatatgccgggcgtacgattttcaaacgttggaaacgttcgatgtagcgtttctgagttgtttcatccaacaactgccaggtagcttcgggtgcacgcaggaaactttctgctatataggcagcatctaccaatcgttgtgttgatttggtttcccacaataagaagtcggggctgtcgggatctacggcatttttgtaagcaagcacagcccattcgcgcatctgtttgcgcatctttccttcttcggtatcatcgtcaggcaatgccagccaaggcgagatgccggccatcagtctgccaaacgtttccatataggccacacgtttatcacgtccgtcccaagtggggctgagttcgagttgcatgtttttttgaagttcgcccttgctcatgttttcaagcaccggagctgcaatgcggtaacacaattcaacccattgttgtcggtcgttgaccggtgcggtagttttctttttggcagaggctgccgttaaaaagaaaacagatataaatgctaaagtaattaatcgtagtttcatgtggagttttatttaaatacttgtttcatggcacgtcctgtccatacttgtggctgttctaatccgaaaatgtatgccatggtagcagcaacatcatattgtaccatgctttcctgaaattctccggcttttttaatgttctttcctgcgatgataaaaggtgtctgcatttcggccattgtctttccgccatgacctttcttgatacctccgtggtcggaagtaatgataaagatagtgtcatcatacataccggcttcttttacggctgccacgatgcgggcaatgtagccgtccagttcttccagtttactgtaataagccggagtgtcatgtccttccttgtggcctacgtggtcgggattgtcaaagcaaatggctaccaatgacggtttgctctctttgatgtatttctcggccatttcgcacagtgcggtcgggaacttgttatagtccggtgctacggcatgatagtcggtagaaagtgtgtcaaccaggaattggatacctgcccactcgctcaatactccgatttcggcctttgggttagcgtcacggtagatttggaagatagtggggaagatgttattcttcacgattacgcgtgaaggcaattccggtgtgcgtgacccccattctgtatatccgtgaacttcgggaccggcccccatgaacatggatgcccagtttactgcgcttgatgaagggagtactgttcttttctgcatggtatagcaacctgtttccatcagtgatttcacggtaggcatatttgctttgggcatactgtatgaaccccaaccgtcaagaccgatgtaaactacatgttttgctttgggcttggctgcataacttgccattgagaagcatcccaacagcaagaaagcgagaatcaaaagctttttcatgatacttatttttatggtttttatttttcaaggtcaattttacgttttaatgcttccagataataatagtcggcatagttcaacggtacatcgatttcactgttgtgaggaatactgcccacgctgtgcatcaacaggaaacgtccgttttcacccaaaggtgcggtatagtcgactgtagcaagcgattccatgatcttatcagcgtattctttataagattgcggattctctacgggatatgtacagatttcgtacaaagcagaagcaataacggaagcagaagaagcatcacgcggttcgttcggaatgttgggagcatccaagtcccaatacggaacaaggtcggtaggcatattcttgtgattcttcataaattcgaaagttttgagtgcctgatcaagatatttgcggtctttggtttcacggaagcatactgtgtaaccatagatggcccatgcttgtcctcttgcccatgccgattcgtcggcataaccttgtgcagtttggcggtgacgtactgttccgtcttctatgctgtaatcaatcacgtggtaacagctgccgtcgggacggaagtgttcttgcagagtgcggtcggcatgtgccacggctacattgtagaatgtagagtcgcctgaaagtttggtcgcttcaaacaataattcaaggttcatcatattgtcgataatcaccggacattcccatccgcgttgtgactgccagctgttgccttttacatcccagctttggataacctgcggtttttcacggaaacgggtgcaaagcgatttggctgcctgtatcatcacatctttatattcgggcttttggttaatacgcagaccgttaccgaagctgcaattgataatgaaacctatatcgtggtgccaagtgaggtattgtgcttcgctgatggcttcagtatatttctgtgccaaaggaagtaaagtttggtcaccggtcagttcgtacagataccatacactgccgggaaagaatccgctgcgccagtctgccggaccgcaataatatactcctcctttactgttaagggtaacggggttgaggcatttgccgctggcttcgattgtatctatctccagaccaatctgcgcccgtgcgttttcgataacttgttccgaccaggatttcttggcgggtgttgtagtacatgaggttgcagtgaacagagctgcacatcctagaagaattgaggttcttaatttcatattatagtttttttatagtaaatgaatagttccctttgttggtttgttgtttggctttgaaggacagacggtagattgtacttccccatactttggataatctgatatcatccagctctttgggttccacagtcagctcaaacaaggcagcatcatagagcagtgctgcttttacattattgacatgaatgataacttttcctttttccgaccggtctatttcgccccaagtcataaagttgacaatattgggggctgttgcttcttccagttcgaaggagtcgctgatgcgggcctgtttacctttcacatggtatgagcgtatccattttttcactttggcttcttcgggataagcagtggctatattggcttcgaaactgttctttccggcttttacttcagtagctttatatttttttccatatttttcgggcacgccgtttatcatcggaaggttgtgatagttactttgcatggtccagatgctataacgttcattactgaatgtctggcgggtgtatgtgccgacaccggcatctattaaaatcggtgtttggttcatccataccgagcaggttccggcatcgttgtgattatggctttcgtcattataccctccttttgctgccaggaataatccttctttggtagagagatagcagaactcggtttcgggataccaggtaaaagggcggttttcatggcggggttctgtctgttgcagttctttgtcgacagcgatggaagcaagggtgcggaaaatatcgcgtccgttgttgggcgaagatttaggttgatgcatcagggctgcgaaacctttcagttcttcactgtttacagccttaccgaaacgatagataaggtatgagttgccttctccgcgtgccgaagcgtcggcaaagttcactacccatccattacctatgtaagagcgtgagatatattcacccatgttcttaatcatcggttcattgaatatatttactttgtcgccggtaatatccgaaagcagttcaaggtaatccaatgtttttccggctgcatgtccccagtaggagggaccttcttcacaagctccatcggctttgatatagtttaggaatttgtctaccgattccattgtcagatggacagctttggcaagtgtgtcgcggttgtcttcaagcagcatgaagcacatcagggcgttactgttgcaccacggattccaattgttgagcatacgtccgttgtagttgcgtcccatccaccagaatgaatcattattcatatatgggtcgagaatgcgggtttggagttcatgacgcaggcggcgtgatatttcagggtctaccttgtcaaatgatgggcgcatgaagtgataagtccatgcgagtagtcctcccaagtcaccggaagtaaggtcgatgacaggataatcgtatgcgggtaatgctctgtgggaaggttgcacgatgatatgtgcggccagtgcccatgatgtcatttcgcaagcattgaacactccgttgataagttggtcgacaaatcgtcctttcccttctgccaactctgccatcagaaggtcggcaatggcaccgttgttggcaccaaaaggtttttccatgatttgccggttgcctgtgcgttcgaaagccaggtaatcggtggcttttactacttgccactgataatttagccgtttttctccacggcggatatattcgtctttgaatgttcctagaaaacggtcccaaccggcacggtcattataatcggggtaagtcacccattggcggtctaataccagtatttcttttaaccggttgatgtcggcttgcttttggagcaggtcgcgttccgtgtatgcgtatgtgagtgtaacatacaataatgcaagtagtaatagagttagtttcttcatcggtatatagattaagatatttattacactgcaaaagtgcgaaaaaagaatagtggcaatactctatttttgtccttaaaacatgtatatattttccataaggactgaaaaacagcctattttcggatatgcataaaaaaagccgcctcaaatgtgactttgagacggcttactatccaataatactttttaccttgaaaagacagggatattaccagcccggattctgtgtcaggcttgtattcatatctgtttcatgtttaggtatcggccatacatagtattggtctccaccccatgtccagttgtaagttataacaccccaaatgtctttcatgccggcagtaccgtcagcgttgttgaacttgctttctttccaggttttccaacgcatttcttcatagaaggaaacaccttcaccggcagtttcccaacgatattcgttctggatacgagtgcgcatatcgtcttgtccgttaacctgtgttgcagcattgctgttcaaaagagctacaccggcacgttcacgtacgaggttcacttgttcaattgcctcggcagtcttaccttgttcgttcagtgcttctgccaatcctaatacaactgttgcatagcggatgataggcaggtcaatcggagatttttcacggttggtcatttcgcttgaaccttcggctacaaatttgcggaacaagtagtacaaatggctctgtgtatcggtacggaggtcgaatggagcatcagtgtctgcaccataatatggccagcgtgaagtaaaggtgtggtctacactgttacccgagccattataggtggcatacggagtaatgatggtctgtgtcagacgcgggtcacgcttttcataaacagctttgatacgtgcttcattgcctgccggtaaatataatgcctgtgcagcagtgctcaacttgcttaaacggttttctaccttttcccggatacctttaatggctgcgtcaatgtcgccttcataacccaatgaaagaagttcggcctttaaaacatctgcatctgtattgcgcaagaagaatacttcacgatcttttggttccatgcttgaatagccgggaagataatcatcccaattgaacttgctaccgtctatgttttcataagtgtcaacgaagtcggtgctggccaaaatggtattccagcaagagccgaatgttgtacgaccaccgtaacggaagctcattgagttaccgtcggcagtttcgttgttgtctatacattgtaaagagaaaatagcttcatcactttgttcgttagcttctttgaagagttgtttgtaacctccatcgaataacttgtgtcccatatttcccacctgtcggaagtcggcttcggcttttgcccagtcctgcatccacaggtacactttaccacgcaatgcataggcaacggatttggttacgcgtccccattgtgcattgccggctgcaatacggtcgggcaacgtcggctcgttgatggcatccgtgaggtctttcacacaagcttcccatatttcgatttcgctgcttcggggtttgttagcttctgtaatcaatacaggtacgtcatagtagggcactcctctgaacacggcattcagcttgtaatagaagaatgcgcgcaaaatcttgacttcggcaatcagcttgttcttgaaagcgtcgggaaccggagcctctgcaaggtgtgagattgcatcgtttgcacgttggattccttcatagtgctgtttccaatagtcggaaaaaagaccggaaccggtggatgccgttcctgccagaatggaatagtcgttgtcacggcagctgccgctgacgcagtatgcctccagttcgtatgctttttttgcaatgtagtcttcgcgcaattcatggtatacaccggttactcccaattcgcaaaagttttcgtttgtccacatagaattggatgccgccttatcatagggaacggtgtccaataagtcgcttcggcaaccgcttagagctgttaccgcagctgataatataaataattttgtaaatagtttcataagttcgtatcttaaggttattagaatgttatgttggcaccgatggcaatgcttctaaatggagcatatcccataccggttgcagattccgggtcctgaccttcaaaagaggtgattgtcagtaagttttctgcagaaacgtaaatacgtgcattttgcattgctactttagttacccatttctgtggcaaagtatagcctaaagacaagttcttcaacttgatatagtcaccattgtacaaccagcggttagacgatgcattattctgaacgttaccgtcaagataagtcatacgcggatatttaccgttgatgtttgtacgtggatcatcgggattgctcggatcatagaaatagtggtcgtctgcaatgcgctgtgcgatattgttaccccattctgtcttggcagcgttgtaaccggctgtcggaccccaatagatgtcgaaaccggcagcacctgcccataccattgagatgtcaaatccgttccatgcagcagaagcctggaaaccgaagttgtatttcggagtcttggaacgtccctggaattcttcgtcgtcagagtcaccatatacgccatcaccgttaacatcggcataaatatagtcaccatagtagatattggctttaccgattgagttacccggtttgaatttgtaacctgcatccatcatggcttttacccagttcatatcttcttctgtacgaatcataccacccttgggaccacctgccggatttacagagccgtctgcattaaagtacttgccatttcctttatatacactgcgataacggtattcgttcagcatgtgaccttctactaccggagtattgccgccggatgaaacatcaccgatattgtctgtccatttaccgccggttaatgtattgttcggatcttctacccaggttttggtatattcaccattgtacttgtctaccttattcttattataagagaagttaccgcttacagagtattctacttttccgattctgtcgcgccatcccaatgagaactcgataccgtcattgctaacttcggcaatattctgtctgggggctgtatgattacccaaaacatattccatggtaggacggtagaggataccggttgtcattttgtggtatatatcgatactggctgttagacggttgttcaacaaagaagcatcaataccgaaattggttgtggtagtagcttcccactgcagcaactcattggatgctgccgtaatagccaaaccggaagctaatgcgtttccgaatacgtatctagaaggaccgtaaacagactggtattcatagttaccgatttcagagttacctaatttaccccaagacaaacgaatcttcaggttatccaaccatgaacgggttgattccatgaatgattcttcagaaatacgccatgcaccggacaatgatgggaagaaaccccaacgatggtctttgtggaagcgtgaagaaccgtcataacggaagttcgcttcgaacaaataacgtgagtcatatgcgtaatttacacggccaaaataagagcgggttgcatagtcctcggtagaaccaccgatgcttgtcatttctgtagcttcgtcgaattggttcaatgattcgtcaatcaaaccttttttggctgcatttaccttataatagttcttgtagaattcctgataacctaacaatgcagaaacatcatgcttctgagcaaatgtgtgatggtagttaatcaggttctccaatgtataagaatagtttgattcgtagtcgaagctggtactcaattgtgagggaggagtaataccgtcaacaattacaccgtcactgaaacgtgtctgataagcaggtacaccatgctggcgtgtttcatagatatagcggttatagttgaagttgaaatcccaactcaaatcttcaaagaatttgattttgctgaacaaagtggtattgaagcggttgtaacgcttgaatccatcgttacgtgccaacttgtataacgggttattggctgtagcacgttcgtcaggacattccggataaccgtagctgccgttccaatagggataagtaccggctgtagactggcgcaagaagttatttgcatttgaaaagtcaccaacttcacgatccatctgtgatgcataagtacgagtacccacagtcagccatttggtcggattcgcttcgatgttggcacgcattgaataacgtttgttggcagtattgtctaccacaccttcattatcctgataaccggccgacaacaagaagcgaattttgtcagagccacctgatacagacaagttgtgatcatggattacaccacctgagaataattcttcagcccagtcggtattcggataagcaatgtaattgggtacaccgttctcattcagaccattcgggtctttagatttctcacgccacaaatcaatgtatttctggtcgaataaatcatcagactttcctacatttctatatgattcattcattagctccatgtaatcagcataattactcatcattttaatcatacgggtcgggctgttgaatgagatgcgaccgctatagttgatactgattttgtcacgtgtacctgttttggtggttaccagaataacaccgttggcagcacgtgcaccatagatggcacaagaagcagcgtctttcaaaatagagatgttttcaacgtccaaaggatttacggcattcaatgagccttccataccgtcaataataaccaacggagatgccgtattcatagtgccgacaccacgaacgcgcagagtagtgttatcttcaccgggcattgcagaacctgatgatgcctgcaaaccgggacttaaaccggctaatgcagaagaaacagtagtaatgggacgagatttagtttgttcctcgaagtccacggaagcaaccgcacctgttagatttacttttttctgtacaccgtaacctactactacaacctcatccaaagtttcggtgtcttctgctaactttatagacaggttatttgttgtgcttgtgatctttatatcctttgtaacgtaaccgatataggatacttgcacggtgcagtttaaagggacgtttaatgtgaactcgccattaaagtctgtgatgacaccatttgttgttcctttttcaactacattggcaccaataattggttctcctgtttcatcaacaactgtacctttgattgttttttgctgcatgatactttgtatcatatcagcatgaggcgacggagagtttccgtttgtagcccatacagaaccgctagcaattaaagctaacgacgctcccaataccattttttttgatagagagcagtaatgtttgacattccttctcatagagttttaatttaaagttagtttttaaaactctgcaaatttctattaaaatgagtaggaagactatctaaattatccaaactaactataaaaattgtccgtggatattttgtataggattactggaatattttattatgtttgaaagtcaactataagttgctgtaaatcatagatatatatatctttataaaaaaagagactatttatcttttacatattgacttaatgcaggattacgggctatatgcttctttaaagtattgaaactgcatcttaatttgcggcaaatagtctttttaggttcaccttttattaacatacgttttataacatcttctttcccggttaatttatatttagagttttttttgccggggatccttcctaaacggcatccttcagctctttttctagccagtccttctttggttcgttgactaattaagtttctttctatttgagcagaaagcccaaatgcaaaagctaaaatttgagaatttatattattcccaagttcatattgctcttttacggttaatactgaaacctctttaaccatacaaagattaagtatgctcataatttgcataaggtttcttcctaaacggctgatttcagaaatgattagaatatctcctttcttcatcttttttagtagtgaaccaagtttacggtctgctgcagctttagtgccggatacgatttcactaacccatgcatccacaaaaaactttttgtttagagcaaacttttctatttcaagtcgttgggtttctaacgtttgtttgtccgttgaaacgcgaatgtaagcgtatatcatttttaatgcaaagataatattttaaacgtccctttgaattctactgtgcaaatatcctatatcggatataacacgcaagaggtgaaaattacttctactacacaaacattaaatattaaaatggtagaagactctgaaactttggatgaagttgtcgtggtaggttatggagttcaaaagaaagtaaacttaagtggttctgtatcatcagtcagctctgaaaaaatagccaatcgtccagtgatgaatcttggacaggctttggttggggccgctccgggtgtgcgtgtaactcagggtagtggtaaccccggagatgaaagtattggtatacaggtacgtgggcaaggttcattcaacaatagcagcccattggttttagtagatggagtacaagccgatatgggtccattaaatacggatgatgtggaaagtatttctattttgaaagatgccagtgctgctgctatttatggttcgcgtgcggccaatggcgtaattttggtaacgactaaaaaaggaaagaaagacgaaagccccaaagtaacccttacggcaatgtttgcacaagaaaagccgattactgattttaagctgatgtcaagtacagctgatttcatggagttacataatattgctaagttaaatgccaatccaacggctaacactcctgattatagttgggaaagtattgaagagtggcgtgaagcagataaaaacccgaatggaatttataccaatccggtgacaggacagcagatacctaattggttggcttatcctaatacagattgggcacagattcttttccaacctgcattttaccagaaatatggtgtaaatgtatccggtggtagtaaaaacacaacttacttgttgtcactcggttatcaggataatccgggaactttggacaataccagtatggaacgttttaatattcgtgccaatgtggaaacgaaaatagctgatattatcacttttggtacacagacttatggaacgaaggaatttaaagacccaggaagtacttctatgacttatttacttcaggcatggccgggacaaacacctatttatgatggtaaatatggtgctagtgaacatcctgaagtcactcaaaaggataatatcttgcaacaagtagctgcacaaggtgggcagaatacttacacacgtcttaatactacatggtatgccaatatagaattgccgctaaaaggtcttgttgcagaagctaaatttaactggagtcaatactctcgtcatgacgaacactattcacagaatttaccacgctacagtttccgtgaaagttttgatactccgaaagaaggaataggggttctagaccaagctacaacttatcgttatgcttatgaatctaccagttacacagccgacctgttgttacgttataacaatactttcggtaaacatgatgtgggtgcatttttcggttatgaacaatatcgcgctgaaaccacaggatttagtgcagaaaaaaaaggtttgatagattggagcattacagatattacttcaggagctgaaatgaattccatcggtggtagtgcaaaatcggttaatgcaataatttcatatttcggacgtgtgaattatgcttatgccggtaaatatttacttgaagccagttttcgttcagacgcttcttcaaaatttgcgcccggacatcgtaacagctttttcccttctggatctgttgcatggcgtataagcgaagaacccttttttgaatcattaaagaatgctgttaatagtttgaaaattcgtgcttcttatggttctttgggaaatactgttggtggtaattacgattggcaggcactttataagaaagtcaataatgtatttgatgaaaaagtacaaaatggtctgatacaatcatctattcagaatcttgcactttcatgggaaaaagtcacgacttacaactttggtttggatgcctctttcttaaatcagcgcttgactcttgaagcagatttctacttacgtaagacatccgacattcttactaactctattatttataaaacaatgggaagtattagtgcacctatgtctaatactgccagtctgactaatcacggctttgaatttaatgtgggttggaatgatcaaataaatgatttccgttatggtattggcattaacatggctttcaacaagaacaaggtaactgactttaaaggtgcgctacagtatgaattagacgagaatactaaagatatttggggcaatccgacatggcgttatacaaacttggctgatgtatctaccggtggagatacacgtcgcgtagaaggacatatgatagacgaatatttcttacgtcgcccttataaaggagatggttcatataaattagctgatggtagtgtaaatcccaaaggtggtcctcgtgatggtatgatccgtactaaagcagatcttgattgggtggctgctatgatggctgccggatatacattcaataataacttgaagaatatcggttcaaatggctctaatctatggtatggtgatttgataatggatgatgtaaacggtgatggtaaatatggtaatgatgatgaccgtgaatttacaggaaagagcagtactccgaaagtaactttgggacttaatattaccgctgcatggcgtggctttgacctgaacatgacatggtctggacgtttcggtggttatcattaccttaattcaaaaggcgcaaatggttctatgattaccaacgtaggtgatgcattacctggcgatgcatggaacaaattctatttctacgattcggaagcatctcatgcaggtatcatcaaagatgaaaacggaactattattggctcttcttatgatcctgctacagatcccaatgccaatatttcgaatgaatatccgcgtttgctcacttcaggcggtactactccgtcaaatacattctatttgtataatacatcatttttcaaattgaaatcgctgcaaattggttatactctgcctaagaaatggattgcacctgccaaaatcagtaatctgcgtgtatttgtttctggtgaaaacttgttgactataaagtctagcagattccctggtgtagatccggaacttggtagttcactagctgtatatccgattgccagaatgttctccggcggtttatctgtaaccttttaattaaatagaaatgaatatgaaaaagatactcaatttattagcattagcagctgtattgggaacttcaacagcttgcacagacattttggacactgcaccatacgataaactttccagtggaactatgtggactacagaagaaagtgtggaccaaggggttattggtgtgtattattcgttgcagagaccctttcatggagataaatttattggagctaatgccatgatcggatactatggttatgatgcgttaggcatggcagggcagggagaatatggaatgcagaacttatttaccaaatcggtaaatcccagcaatggtttctttctgaaaacatggcaatggatgtatgacggagtacaccgtgcgaatgcagctattgccggtattcaaaatgctcctataaatgatgctaagaaagcgcgtcttgtagctgaatgcaaagtgttacgtgcctttttttatgaccgtttgaatattcttttcggtaatggtggtctgggtgtacctctttataccgagcctgttaatccgtctgaatgtaacaaggggcagagtactgaacaagaggtatgggcacaagtcattcaagacttaagtgatgccatagctgaacctaatttgccggataatcaaattcaaggtgaaggacgcgtaagtaaaggcgctgcttatgcattacgtggtaaagcttatttgttgaccaaagaatatgataaagctattgctgattttgctaaagtaggagactgtggctataaactatttccaaactatagacagctttttaaggttgctaatgaacgttgtgaagaaatgattcttagcgtacagtatattgaagatcctaccggatatggtacaggtatacaaaaatattgtgcagcattcactcaaggtgcaaaagattctcgcggatgctggggggacttacaagtcactcctgcggttgtgaatctctatgaagaagtagatggacaaacagtaaaaaaattcgcttgggaagattatttgtctgattggaaaaaagtaactgacatggaagctgcagaaggtcatactaaataccgcaaagttttctttattcgtgataaatacgtaaatggtcaggaaattcatccaactgtaactaaagttattgacaccgaattagcaaaattgcccaaagaagttcaggcgttctatttacctgaaggcaatgaggcccgtttgaaagcagcttacgctcatcgcgatcctcgtttggcttacaatgtggtaacaccttatgccaactatttaggcgtaaacagtaactctactgcagaagaatggtataccttccgttggccagtagccggaaaatattatgcagaccaagcatctgccgaacccaatgctaatcctaacttgccagatagttattatgcttcaggtttcatgaatgcacaggctgaatttaaatacatccatcgtaaattcattggcgaaggtttggaatatcaacgtcgtgaacagaatccggtggatgagccgattattcgttatgccgacgtattactaatgtgggctgaagctctcgttgaaaaaggtgatttatccggtgctatgagtaaggtaaaagaagtgcgtgaccgtgttggcatacctacaatggcttcaagcttctccgaccaaactacagcccgcaactatgtacgtgatgaacgtcgtcgcgaatttgtaaacgagggtgttaacttctttgacgaaatgcgttggcgtacattgaaagagactaaatttgatgaaaaagttgctcaacatgcgtggggaggttcagaaagtacaggtggtactgtttatgattggataggagaacaatggtatacatggcctgtacctaagagcgaaattgaacttaacccgaatttgacacgtacgccgggatgggaatattaacattcttttagtggttatcaatattcctaaaaagaataaaaactcgcttgaagtttctaaaatagattttcgaaagcaggcgttgatttttaaagctcgatcttctatgatttaattgataaagtcatagattgatacagaatatagctgagtttatctgtttccggatagactcagctgttttcttttttatcctgtcctcttcacatatactggtcatttttgtttcaaataaaattacttagctctatttaggtaaaatgattgaactttatcgtccctttaaactgcaccgtgcaaatatcctatatcggttacgttacaaaggatataaaggtcacaagcgca

SEQ ID NO: 6941 - DNA, 221 bp, Unknown
  gut microbiota DNA sequence
tggaggaccgcaccaataagcgttgaaaagcttctggatgagctgagggtaggggtgaaaggctaatcaaacttggagatagctcgtactccccgaaatgcatttaggtgtagccttgcgggttactgatgtgaggtagagcgactgataagatgcgagggcttcaccgcctatcaagtcttgacaaactccgaatgcgcatcagttctaccgcaggagtg

SEQ ID NO: 6942 - DNA, 420 bp, Unknown
  gut microbiota DNA sequence
tgccttcttttccccaatagtaatggccgggaaggaagggttcgtattcatcacagaacccttcgagggctttcaactcgctggcgcagtatattttgccgtccttatccctgcctatatataaaggtatgactccgatggggtcgcgggcaatgaggaaatcgtctttctcctcatcatagagggcgaaggcgaagatgccgttcaggtcttcgaggaagtgaatacctttgtcacggtaaagggcaaggatgacttcgcagtcgcttccggtctggaaatcatactttccggtgtactttgcacggatatcccgatggttgtagatttctccgttcacggcaaggatttgtttccggtcgggactgtataggggctgccctccgctttgagggtctacgatggagaggcgttcatggg

SEQ ID NO: 6943 - DNA, 221 bp, Unknown
  gut microbiota DNA sequence
ctgtcgattgcgccctgcagctcgttgatcctgtcattgagcgacttcacgtatgactcgctgtaacgttcgttcctgtacgccaccggcttgcagtcgggacatttcagattgaatcccgtaccgaacttgtaggtgatgcccaccagcacgttgtaataggaatcgaagctgtggtcgtcccggcggttccagcggtcggaaacaccgtttgccagggc

SEQ ID NO: 6944 - DNA, 221 bp, Unknown
  gut microbiota DNA sequence
tggccgcaccatagtagaacccctcggcgggcctgctgccgcttccggcccttcccctccagccgctgacagccaggcgggcacccacataaggattgaagtacttgccgacagcaatctgtcctgccggagaaatcagtttgccgatacccgtgccgtccagcgaataggaggcaccaagctggccctggaggaaccagttgtcatccgtactctgagcg

SEQ ID NO: 6945 - DNA, 221 bp, Unknown
  gut microbiota DNA sequence
ccgccagctgacggaatagctggttaaagggtgtagaagttgattgtggcaggcaaatccaccacaagattcgaacctgacagtatggagcgtccttccggacaatccaacagtgcatgtaatcatactgccaagaaaatccgctaaacataaccttcagggtacccgtaccgcaaacggacacacgtagtcgggttgaatatactaaggcgcttgagtga

SEQ ID NO: 6946 - DNA, 221 bp, Unknown
  gut microbiota DNA sequence
gccctggcaaacggtgtttccgaccgctggaaccgccgggacgaccacagcttcgattcctattacaacgtgctggtgggcatcacctacaagttcggtacgggattcaacctgaaatgtcccgactgcaagccggtggcgtacaggaacgaacgttacagcgagtcatacgtgaagtcgctcaatgacaggatcaacgagctgcagggcgcaatcgacag

SEQ ID NO: 6947 - DNA, 344 bp, Unknown
  gut microbiota DNA sequence
tgattttaattgtacgaagataccggattatcagtcattctccaaatttttccttatttaaagattagccttttatcttcttccgcaaataacacagcagtatttaccagtgccagatgagaataagcttgtgggaaattacccaattgttcttttgtttcgaaatcaatatcttcactgaacagacccaaatggtttgaatattgcaaaatttcatcgaacagacagcgtgcttcgtctttttccccgatgacataaagtgcacgaatcagccaaaatgtacagatggtaaaggccgaagaaggacagccaaaatcatcatgagtattatagcggtacatcaa

SEQ ID NO: 6948 - DNA, 534 bp, Unknown
  gut microbiota DNA sequence
cgccagatgagaataagcttgtgggaaattacccaattgctcttttgtttcgaaatcaatatcttcactgaacaggcccaaatggtttgaatattgcaaaatttcatcgaacagacagcgtgcttcgtctttttccccgatgacataaagtgcacggatcagccaaaatgtacagatggtaaaggccgaagaaggacagccaaaatcatcatgagtattatagcggtacatcaatcctttgtgtaacaaggatttcttgacggctttcactgttttatgataacgaatatcatcagcatctataaatccataaggttccattaacagtaaagaagagtccaaatccagattgccgtatgcttgtgaaaaactttgtatttcttccttccatccgtttctcataacatccgctttaattgcatccgcttcttcttcccaacgtcggctattctcatatttattcagaatacgggctatgcgggctcctctgtccaaagcaacccaacacatcactttggacgaaacgaaatgctg

SEQ ID NO: 6949 - DNA, 471 bp, Unknown
  gut microbiota DNA sequence
agcttcttcttcccaacgtcggctattctcatatttattcagaatacgggctatgcgggctcctctgtccaaagcaacccaacacatcactttggacgaaacgaaatgctgtccttcgccccgtatctcccaaattcctttatcaggctttctccaatcttccatcacagtcgtcataatacttttcaccatttcccacatatcttctatttcatccaatgtacctggcatcaaccggtaatattggtaaatcaagtccatcagatagccgaatgaatcattctgcctttgatgataagcatcattgccgatacgcaccggttgggagtttttatatcctgaaagatggtcgagtataacttcagtcaatttcctttccccacgaatgccatacattatttgataagtgtcatgctcggcaacaaaagtagattgtatgaatttcatgaatttgcgggctgcatcggcatg

SEQ ID NO: 6950 - DNA, 26087 bp, Unknown
  gut microbiota DNA sequence
cttcatttcgtggagtagtagataagaggttctttctgtatagattagcaaaggtgtatgcataaagggaaattaacaaatgttaatcccccaagaattacaactgagcccgtattgaagttcctttgacggaagaaggatattttttccgtcctcctgtgaaaatcaagttgcgcaaaggagttaacgaaatattggttcgtacggtcttcgggcattggaaaggcgataacggacagcgtaaatggcagttttgttgtatgcctgtgttgtgggatggttgccattatacggaagtgaaagggctggaatatcttgactgtgagattccggctcgatgagtcgatacgtatgggaatagcggaaatataagtaattcaaattgcgtaagcatattgcatggggatgtatcaaaacgttgataatgctgttgttttgctagtaggggcagggtttgcctgcccctacagttgagggtttgacaggctattttagttttgatacacccccatatagatataaactttacttgttcagtttccaggtaaatccgtcttttgtatcttttacttcaaagcccaaagcggccagctcgtcgcgaatcttgtcgctggtagcccagtctttgttggcttttgcctgcatgcgttgttccagcaacatgtctaccactttgccgtaagcctcttcgcgtgcttcgttgttggcagtttcttctttcagaccgagaatttcgtacatgaaaagagggaataagcttttcagttcttccaagtcttcttccgaaatagtcgctttcttgtcgagaaccgtattaatcattcgtgcaccgtcaaacagatgagcgatgacaatcggtgagttgaggtcatcattcatcgcttcatagcatttggcacgaagttcttttataccgtctataccggtagtctgtttacccggagtgatgcgttccaacccttttacggcttcttgcagacgttgcaatcccttttcggcagcttgcagggcttcgttgctgaagtccaccgtgctgcgatagtgtgcttgaaggatgaagaaacggatggtcatcggactatatgcctgtgtcagcaacttgtgtgagccttcaaagaactcgctcaggttaataaagttgccataactcttgcccatcttctgtccgttgatggtaatcatgttattgtgcatccagtagtgaaccatatcgtctccctgcgaagccacactctgtgcaatttcacattcgtggtgtgggaaaatcaagtccatgcctccaccgtgaatgtcgaaatgttcacccaggtatttcttgcccatagcagtgcattcgcagtgccatccggggaaaccgttgctccatgggcttggccagcgcatgatatgttccggttgagctgctttccacagagcgaagtcggcaggattatgcttttcgctttgtccgtccagttcgcgggtggtattcagcacatcgtccaggttacgtcccgatagtttgccgtaatgatgatccttgttgtattttgctacatcaaaatacacggaaccttcactttcgtaagcatatccgtttttcatgatttcttccaccaggcggatttgctcgatgatatgtcccgaagcatgcggctcgatgctgggcggaagtacattgagggcttccattgctttgtggtaacggttcaggtaatattgtaccacttccatcggttccaattgttcaagacgtgctttttttgcaatcttgtcttcaccttcatcggcatcatgttccaaatgacctacatcggtgatatttctcacatagcgcactttgtatcccagatgggtgagataacggaacaggatatcgaaggtgatggccggacgggcatgtcccagatgggcatcgccgtataccgtagggccacacacatacatgcctacatgaggcgcgtgaagcggaacaaaaagttcctttctgcgacttaatgtattgtaaatggttagtttattttccataattcatccaattagaaatgcaaaggtataaatttaatgtgtggaataggcaaacaattaacaaaaaaaacggatttggcattacaatatgagaggatgctgcatgaacagtttgctatgcaggtttcttttcggcatgattggtcaacttttttaattagagttggggttgtgtcaaaacgtggataatgctgttgttttgttcgtaggagtgaggtttgctcgcccgaaaacggtttgctttgtgtcttcgggcaggcaacccctgcctctacagctgaaactggataggccggtttagttttggcacactcccttttgttgagatttacaacttcccttcgtctcttctgtcgtcaattcccaatttttcgatttcctgaatggataagcctgtaatgtcggaaatggtttcatagtccagtccttttgctttcattttcagtgcatttgaaagtcgttcttcttctcgtccttcttctgtagcttccctacgaatgtcttcttccactatccggcttacccgatagcgatccactgctttgtcataagctattctgttttcttccgataaattggcaacagcagccaattggtccaagtatttaaacacttgttccttcagtgcatccggcattctgttccagtcattcatattcttcaatgcatacattaatttctcatacaatgtctcacattcagcaagttccttattgaaataagggaattgcagataaatttggcgtagatgggggttgaccactcgtcccgtatccctgtcggcgagcactatatccgtacggaatttcttatccagtccgtcctccttgaaattcatcaggaagatgccgtatacggtactcagtctataacgggagccatacgggacactactttcacataccatgccgtccgtatccttctcgacgggtatctttattgtatcgggaggcggaagctcggtcagcctgcctacggcacggcatacataatacaatgtacggtccagaaaatggctgtgccaacgattttgcatctctacaatgatatactcgccactgtccgtgcgacaatagaggtcataaatgatgcctttgtcatgcacattgtccgcatggtcttccttgtcaaggaaacaaagatcctctatatgatgttcgcccgcaagcaactcattcagcagggtgatgagcagccctttactggcaggttgcccgaagatgaccttaaaccccaggtcggtaaagggattgacgaatcgtgacatattcattttttatttgaaatcaaaagtacgcatactttcgggaacacccaaaagatatgtgctttatttttccgatattgcaattccggctgatattcagaatctaacgacctttctgtcttactctcctttcacacataacaagtgctgaaacgtcctgctcatagggcttttgtgtgaaggctgcttttatcaactttctttttctcctattggataattccccctcccaacaccacgtcttcccgataaaaagcggctgcctgtccggtagcaatggcggtgagcggctcgtgcaattgcacatggagcgtattgtccgcttgcagcgtcactgtgcagcgattggcttgtttgcgatagcgtattttcacaatcacatcgtccttgcagagcaatgcgtcaggatttgtgatattccagtctttcaatgtcatttctgtttttttcaacgcttttaaattactcaatatcactttattttcttcgggaaatatctcttttacaaagacagcacgatttaaatcgattcccagcccccgtcgttggccgatggtatagaaaggatacccttcgtgatatgcaatgaagtttcccgtttcatcgaagaattttccggggcggatgctgttctccggtagttcgcggcgtaaaaacgtgcgatagtccatcgggcaaaaacaaacgcccagactgtcacgtttatgggcagcttttaaaaaacctcgttcttccgcaatttcccgaacccggattttggtgagttcacccatagggagcaacatccgttgcagaatatcttgtggaagcccccataaaaagaacgactggtctttgtcagggtctgctccggcagtgatgtggtaaaatccgtcgatgaaacgtttgcggacatagtgaccggtagcaaaatgatagatgcccaattcatcggccagctgttgcagaagtggccatttgaggttattgttacagagcgtgcagggcacaggggtatgtccggccatgtattcgcggataaaataatcaatgattgtctctcggaatatattgcgaacgtcgtaggagatatgcttgattttcagtcgttcacataaagtccgtgcgtcatccaaatattccgtatctccttctttttcataaaaacgaaaagtgacaccggtcacttcgtatccggcatcctgtaacagtaaggcggcaacggaactgtccgttcccccactcatccccagtagaactttattgtttggcttcattggggcaaatatacgaaatcaaaatgagttcttttatatcctgcattcagtcattttagttcaatattacttctccacgtctgtggttaaacttaaccacagacgtggctaatgttaaccacggtcgtggttagagttcttcacggccgtgaagaagcaatatcgaatggcttgtctgacaaagaaaataggatgaaaaaacgttaatcgaatgatatatatatgcgtaggcttatgcgtacgtacgtgtagcccgatgcgtatatacgtgtaggcttacgtgtatatatgtgcaggcttatgccaccgtatgtagtttggcgtgtgcaaaaagaccttgaggttttcaaaaaagctcggtatgtttcttaaaaacttcagcacctttttaaaaaagctcggcatctttttcatgtagggcagacaggatcatccccccccctcactaagtcggttattccttcttttccgttcattcttacattttgattaaaatacattgattatcaagtgattaataatgaaaggatatcccctcatccctgtttcagccgcgcttcccaagtcccttcacaatctgccttcagtacttgtcccgccgggagaaattttataaatgaagggaggttgaaagggtgatgaaacgatgcccattcactaccgaaactcccatcaacagggcgtctcaacggctgatgaaaggaggaagggagaaatgatccggatgatatgggaactttaaggaaaggagaatatataaaaccctgccatgggggctttccaatatcccatggcagagtttgaaaaattattttagcggagtgatagtgaagccccagctataagactggttcgggttaatcaaagcccatttttcgggccatgctccccagctgtcataaccgcctacgccttgttgctgcatatctatgcatacctctacgaaatcacgcggagtaatgtcattgatatgagtttggcggcggagaacattttttgccttagcttcgctgcgattggcaatttcttcggccgagaaattgttccattggcgcggacgattagtggcttcttccgaatcaaaatcttctactgagttacgcaaggcattgaaaccgaaagtcttgtcggctgtgatgcgcaaccctttgccgccttttttgcttaatgctacccaacgggtatcgacgtgatggccgttttcttgcggacgaacataggggaagtacatatcatcggctgttgttttatagaggtcgacgatggttcctgccttgcggtcgatgtagttttcttcagggccgcggccgaagtaggcaacttggttcatttctgccggcagacggaaacgtacaccgatacgaggtacttctgctttgatgtctgctgccttgaagtcacaacctacatgtaggctgccgttcttgccaaaggtgtaatttacaatgtattggttgccggcaggcaatgcgtaagtcacgctcagggtattgtcggcaaaggaagtatgggttactttgaagtccttgctcgattgtttccacacgtgggtgcgcttgggctcgccgttaccgtaatcattgtcattcggtgcacgccagaagttgggttgaatgccgaagccgtctttgaagtattcggtgccgtttactttataagaggtaacgatgccactcttttcgttcaggacaaattgcattccgctgcccgaaactaccatctcgtctccgttcttcactgctttcattcccttgcctgccatgaactcgtctttcaaaggctcgataggcaattggaattggtcatgtgcaatttcgtgacctgccggaatcaggatttcaggttcgacggcaatgacgtggaaattgacgaagtattcggtatctttcttggctttcaaaccgtttacgttgaccgtgaattctttggaggcctgcggagcaatgtctaacgagacttttccgcttcttataatcttgtcgttggctttcagctcatacacaatcatatacttcttcaggttggtgaagtagaaacggttggtgataaggaacttgccttgtgccgcatcggtcatctcgaagcctacattctgataagcatatttcacttctgccatggcaggatgcggagtgcggtcgggactgacgataccgttgcagaggaagttgccgtcgctgggtgcgtcttttccgaaatcgccgccgtatgcccagaacggacgttcgttttcatctttctgcagaatgccttggtccacccagtcccaaatatatccgccctgcagattgggatatttgtaaatggcttgccactgtgcccacagaccgccggtggagttgcccatggcgtgtgcgtattcggatggcatgataggacggtcactgccttctttgcctatcgattcaaaccagcttgcgcccggatattgaggaacgaacatatcggtattccattcccattgtgcgcgttcgtagttcacagggcggttcatgcctttggtttcacggtctttcacccaaaggtaagtctgatagaaattatatccgtttccggcttcattacccaatgaccagaaggttaaagacgggtagttcttattgcgttcatacatattgatggtacggtccatgtgaggtttcagccattcggggttgttgcccagtgtgccgcctttgcggaggtcgtatttcatgccgtggctttcaatattggcttcatcgtatacatagagaccatattcgtcacaaagctcatagaacttgcggtcttgcggatagtggcacagacgaacggtattgatattgtgttgcttcatcagttcaaagtctttgcgcatcagttcttcgggaacatagtgaccggttgcttcgttgtgctcgtgaatgttcacacccttcatctttaacggctggccattgacaaagaagcagatataaggcttgccgtttcctgcaatttggtcaatcggtttgatttcaaagcgacggaagccgacattgaacggaataacttctgttatttttccatcttcttttaaagaaatcaataatttataaaggttgggctgttcggaagtccaagtctttacattgtttaatgaagcattgaaagtaacggtattttttccgtctgcacttacactgcaaggtgtctcggcagaggtaacaactttcttgtcggcatccagcaactcgtaagttacggttacgttcttgttggcggcggtatggttggtcacattcacgtccagtttgaagataccgttcttataggtatcgtcgagggtagagactacttcaaagtcctgaacggcagtcttgggctgtgagaacaagaatacatctctttcgattccgctcaggcgccaaaagtcctgacactccagataagaaccggtgctgtagcggaagcattttactaccaatgagttcttgcccggttgcagatatttgttaatcagaaactctgccggattcttagagtcttcgctatatccgacttcttttccgttgaggtatacataaacgcctgatttagctccttccaggcggaggtatatatcacgtccgttccaattggagggaatctcgatgtctcgctgataaacacctaccggattggcctcgggcaaatgcggaggttgcgggttgctgggctggaagtcgtatggctgattggtatagatggctgttccatatccttgtacctcccagttgccgggtacattgatttctttccatgtaatgtcggcgccgggctgttcgatgttggcaggtaaatctttgtaggcatctacgtagtagaagttccactttccgttcagtaatttgtaataagggctgttttcgtatttgccggtcagtgcctgtcccgagttatcgtatgacatgaaagccgtgcggggagcttctttgtttactgctacggtttggatatctttccaataaggaagcttggtcccttctgcactgatggtttgtgctgagaatgcacagacaactgtgccaatgaggtatctcaataaggttgttttcgtaatattcatagattatcagttgtttaaagaaaaagggcgctattgccggcgcccctctcttaagtcctttacattttattaaaataagcaatttattggatttcttccgataattcagcaccagccttgaatttgattgctttttttgctttaatggtgatagattctttggtcgccgggttgatacccattctttctgctttttctacaaccgagaaagtaccaaaaccaactaatgatactttgtcaccactcttcagagcatttgaaactgctgaaactactccttcaacagctttctttgcatcggctttgctcaagcctgattcagcggctactgcgctgattagatctgccttattcataatgaaaacgattaattattaatgtaatacaaaagaaatttcaaaatcaaggacaaatataaagtttcaaaattagaaatcaaacagatagcctaaaaaagataagccaaaaatcaaaaaaacgtaagagaatggggtttttctgctaaataacagaataaaattgtaaatttgcaagcaatcaatgaattatagaagaaaataatatgaatagtatacctgttgtaacaaagaatatattgataataaacgtgctatgctttttcggaagtgtggtggctgcaaagtatggaattgatttaaatgatttgctgggactgcatttttttctggcttccgattttaatccggcacagttgattacatatatgtttatgcacgctggttttcagcacatattttttaacatgtttgcagtgtggatgttcgggcgtacgcttgaacaggtttggggaccgaaacgttttctgttttattatatattgtgcggtatcggtgcaggtttggtacaggagggagtgcaatatattcagtatgtcaccgaattggtcaattatgagggggttaatacgggagttgccgtgattccgatggcggaatatctcaatctgatgactacagtaggggcatcgggggccgtatatgctatcttgctggctttcggtatgttgttccccaatagtcagatgtttgtattcccgattccgtttcctattaaggcgaagtattttgtaatggggtatgcagcattggagatttatttgggcttcggcagctcggctgacagtattgctcatttcgcttacttgggaggaatgatatttggctttatattaataatgtattggagaaaaaagaataacaatgggcagttttattactgatttaaagaatagttttaacaggggtaatatatatatccagtttatatatatcaatgtcggagtgtttgtcctgacatccctgttgggaattctgtggatgttgtttaaccgtaacggtgcatttattctgcaatatttggagttacctgcatggacggtacagtttatcaagcagccgtggtctctgtttacttatatgtttatgcatgccggagtgcttcacttgttgtttaatatgctgtggctctattggttcgggcagttgtttctttcttttttctcggccaagcatttccgtggggtgtatatcttaggtgggttttgtggcggtttgctttatatgctggcttacaatgtatttccatatttcagtgattcgctttattattcttatttattgggggcttcggcctctgtgttggccattgtggtggcaacggctgtccgcgagcctgactatccggtacatttcatgtttatcggaacggtgcggttgaaatatgtagccctgtttatggtggtgaccgatttgctttttatgacttcgggcaatgccgggggacatatcgcacacttgggaggggcattggccggatggtggtttgcttccggattgacccgcgggcatgatgcaacggcgtggattaaccgttttatcgattgggtagcaagcggatttacggtacaccgttctccgaagaagcccaaaatgaaagtgcattatggcgataaggcgaaagactatgaatataatgcccgtaagaagcagaatagtgacgagatagaccgcatattggacaaactgaggaagtccggttatgacagtctcacgtcggatgagaagaaaagcttgtttgatgcaagtaaaaaatagaatatgaaatatatcggtcggattttaggttggatattattggggataaatatatgcatggcggtgttattgctgatctgtgcatatagttcttatatcaatccggtggcgcatcctgtgtggtcgtgtgccggtcttgcgtttccggcttttctgataacgaatgttttattttttttcttttggttggtggtatatcgcaggtatgctttggtgtctctcctgacttttttctgctgctttggtgccatccgtacttatatacctatcaatctgttcgagaaagaacctcccggggatgccgtcaaagtattgtcatacaatacgatggcttttgaacaaggacatcctaatttgaaggacaaccctaattcggtattggaatacctgcggaacagcaatgcggatattatttgtttgcaagaatatatattgagcaatcggctggctaaaaaggatgtggattatgccctgagaaactatccctataagcattattataaattgaccggtgcgaatggactggggtgctactcccgctatcctatcctgtcggcgcatcctgttgagtatgacagccgaaacaatggctctgttgcttatacaataaatgtgaagggggatactttgttggtggtcaataaccatttggaatccaataaactgacagagaaagataaggctgtctatcgggagatgataaaagacccggataaggttaaagtgtcggaaggggcccgcatattgataggcaaactggcggaggcttcggctatccgtgctttgcaagccgattccatagcaaagttggttgccggttttaggggtggaggagtgattgtctgcggcgattttaacgattctcctttgtcttatgctcaccgggtaatcgggaaggaactggatgatgcttttgtacagtcgggcaacggattcgggatatcttataatcagaatcatttttatttccgtatcgatcatatcctattgagtaaaaatctggaatcttatcaatgtacggtagacaaaaccataaagagttcggatcattatcccatctggtgttttgtggcgaagaaataattagcagacctttaatttaatataagtatgaagaaactagtatttacgttagcgacttgttgtatcatgtgtgcatgtgaacagaaaaccgaaacgaacccgttctttacggagttccggacagagtatggtgctcctgattttgataaaatcaagatagaacactatgaacctgcgtttttgaaaggcatagaagaacaaaatgccgaaataaaagcaattgtggagagccgggaaactcccggatttgaaaatacgattgtggcactggataatagcggaaggacactggcacgtgtcaagggtgtcttttatgcattgacggaggctgatacgaatgatgagatgagcgcattgagcgaaaagattgctcctgtgctttccgaacataacgataatatttatctgaatcaggatttatataagcgtgtggctgctgtgtggcaacaggagcaagaaggcaaaataacgctgaccacagagcagcatcgtcttttggatagatattataaggcgtttatccgttcgggggcaggactggatgccgggaagcaaaaccgccttagggagataaataaagaattgtctacattggctattactttcagcaaccatattttgaatgaaaataatgcttaccggctggttatagacaatgaagcagaactggcaggattgccggaatgggtgaaaacaggtgcggcggaagaggcgaaggctgtcggaaaagaaggcaagtggctgtttaccttgcagaactcaagccgtttgccgctgctgcaatatgccgacaaccgtgagttgagaaaggatatctatgaagcttatatcaatcgtggtaataacggagacgccaatgataataaagagattttgaagaaaatcatttctttgcgtctggaaaaagccaatttgctgggctttgactgttattccaattttgtgttggatgaaaatatggcaaagaattccgagacggttatggattttctgcataatctgtggggttattctttgaaaaacgcaaagacggaagctgccgaattacaaaaaatgatggataaagaaggaaaaggagagaagcttgccgcatgggattggtggtattataccgaaaaacttcgtcagcaaaaatataatctgaatgaggatgagattaagccttactttagcttggaatcagtgcgaaacggtttgtattatgttgccaataaattgtacggcattaccttgaccgaactgaataatgtatctgtttacgaaccggatgtgaaggtttatgaggtgaaagatgccgatggcgcttatctgggcttgttttatgccgattattttccccgtaccggtaaacgcggaggggcatggatgagcaacttccgtgaacaggcaggcgatgtgaggccgcttatctataatgtagccagctttacgaagcccgcaggtgatatgccttcgttactgacactggatgaagtggaaacaatgtttcatgaattcggacatgctcttcacggaatgctgaccaaatgtaactatttgggagtatcgggtacgaatgtggcacaggattttgtggaacttccttctcagataatggaacattgggcggtggaaccggaagtactgaaggtatatgccaagcactataagaccggtgaggtgattcccgatgaattgatttggaagatacaagaccaaaataccttcaatcagggatttatgacaaccgaactgttggctgctgcattgctcgatatggaattgcacaatctgaccgacaccgcaagtctggatgtggtggcctttgaaaaggcagtgatggacaaattgggtttgattcctgaaatcgctcctcgttaccgtgccacttattttaatcatatccttagcggttatgctgccggatattacagttatctgtgggcggaagtattggatgctgatgcttttgaagctttcaaagaacatggactgttcgataaaaatactgccgactctttccgccggaatgttttggaaaagggtgggacagaggatcctatggtgctttacaaggcgtttcgcggtgccgaaccgagcttggaaccgttgcttaaaaacagagggctgaaataaaataccccatgaaatagaacaaattaggctgcgaaatatacttttgcagccttttttcttatttgaaattcaaatatttgtgtttcatgccgtgcgaatgtgaaaaaaaaactatatttgcaaccttgtataaaccaagaattaatcaaaaagtaaaaataataaatttcaaagtaacatgcaaaacaaaggatttgtaaaggtttttgcggtattacttacccttgtatgtgtgttttatctttctttctcttttgtgacccgctatcacatgaataaagcggcgcaagatccgaagggtgaagcacattaccttgattctatgcagaatgaaaaagtttatctgggtagttatacgctgaaacagtgtcgtgagatggagattggtctgggtctggaccttaaaggtggtatgaacgttattcttgaagtttctgtaccggatgtggtgaaggcattggctgacaacaaaaccgacgaagcttttaacaaggctatatcagaagctgccaaacagtctgttaccagccaggatgactttattactctgtttatcagagagtataagaaagaagctccacaaggaaagttggcagaattgttcgctactcagcagttgaaagacaaagtaaatacccgcagctctgatgctgatgtagaaaaggtgttgcgtgaagaagtcaaagctgctatcgataactcttataatgtattacgtacccgtatcgaccgctttggtgtggttcagcccaatattcaggctttggaaggtaagatgggacgtatcatggtggaacttccgggtatcaaagaaccggaacgtgtgagaaagctcttgcagggttctgctaatcttgagttttgggaaactttcgactccaaggaaatctatccttatctgactgctattgacaacagattgcgtgctatccttgctaccgttgctaccgataatgctgctacagattctactgccgttgaaactgccgatgcaaaggcggtatctgctgccgatagtctggctgctgctttgaagggagagcctgcagacaatgctgttgccatggaacaaatgaagaaagaacatccgttggcttctattcttcagctgaacccgaacggcagctgtgtggtaggttatgctgattataaagatacagctcaggtcaatacttaccttgccatgaaagaggtaaaagaaatgttgccgaaagaccttcgcctgaagtggggtgtgaaaggtgccgatttcgacaagacaggacgtatcttcgaattatatgccatcaagtcaagcgaacgtaacggacgcgctccgttggaaggtgacgtgattactgatgccaaggatgagttcgacagcttcggcaaaccttgcgtgagtatgtcgatgaacactgacggttctcgtcgctgggctgttttgacaaaaaataatgtaggaaaatccattgccattgtattggatgattatgtatatagtgctcctaacgtaaacggtgaaatcaccgatggacattctctgattagcggtcactttactcccgaagtaacaaaggacttggctaacgtattgagatccggtaagatgccggctcctgcacgcattgttcaggaagatatcgttggtccgtcattaggtcaggaatctatcaaccagggtatcgtttcattcgttgtggcattgattctgttgatggtttacatgtgtgctatgtacggactgattccgggtatggttgccaactgtgccttggttgtgaacttcttctttacgctgggtattcttacctcgttccaggctgcattgacaatgtcgggtattgccggtatggtgctgtcattgggtatggcggtggatgccaacgtattgatttacgaacgtacaaaagaagagctgagagcaggaaagggtgtcaaggctgctttggctgacggttactcgaatgcattctctgcaatctttgactctaacctgacttcaatccttaccggtatcatcctgttctatttcggtacaggtcctatccgcggttttgctaccacactgattatcggtatcctctgctcgttctttactgctgtgttcttgacacgtgtggtttacgaacacttcatgaacaaagacaaatggttgggattgacatttacgacaggtatttccaagaatctgatgcagaatgttcattataactttatgggtatgatgaaacgttcgttcactgtattcggtatcattattgcagcatgtgtggtttcgttctttatccgcggtttggctcagagcatcgatttcaccggcggacgtaactttgtggttcagtttgaacagcaagtagaaccggaaactgttcgcgacctgctgaaacagaagattaccgaagataacgtgcaggctatcgctttgggtacagacaagaaaacaatccgtatcactaccaactaccgtatcactgaagactctcccaatatcgattctgaaatcgaagagttcctgtatcagtcattgaaagacggtaatttgctgggcgaaggcactacactggaaatatttatcgaccgtgataaccgtgcaggcggctcaatcatcagctctcagaaggtgggtcccagtatcgctgacgatatcaagacttccgctatctggtctgtattgttcgcattggttgctatcggtttgtatatcctgttgcgtttccgcaatgtggcatatagtgtcggtgcaacggtggcattggctgtcgataccgttttgattatcggtgcttattcattgtgctatggctgggttcctttctcattggaaatcgaccagacattcattggtgctatcctgactgctatcggttattctatcaatgataaggtggttatcttcgaccgtatccgtgagttcttcggcttgtacccgaaacgtaaccgtttgcagttgttcaatgattcattgaatactactttggcacgtactatcaatacttcattgagtacattgattgtattgttgtgtatctttgtattgggtggagacagtatccgcagtttcgcatttgcaatgattctgggtgtcgttatcggtacgttgacttcattgttcattgctgctccggttgcttacctgacactgggtaataagatgcctgaagaagaagcgaaggcataagaaggattataattgccaagagataaaaagaaaggaggttccgccatggaaacctcctttctttttatcttctcttctttatcgggttacccttcccgaggtatttcctttcatcagactttccacttcttccacagtcacctgattgaagtcaccgtatacggtatttttcaatgcagatgcggcaagagcaaattccagtgctttctggtcattgtcgggatatgtaagcaaaccgtatatcattcctcctacaaaagcatctccggtacctacacggtcgacttcgtgagtaatatcgtaaatgccggtatattttaatgtttggtcggaataaagcacggctgcaagcagattgtggttggaagtaatcgtattgcgcaattctaaaaatactttccggcaacgcggcactatatgcgatattttctgtccgaatgtctcgaatcctttcaaatccaacggataagcagtatccacagcttgaaagcctaccggagcgatatcgaaaacttctttgtattccggttctgcaccgaagattacatcactgtattgcaccaagggcaacatgacatcggcaaccgaacgcccgtaattccatagttttttgcgcacattcaaatcacaggaaatggttaagcccatgcggtcggccgtttgtagagcttccagacaggcgtcggcaccctcttgtgacagtgaagccgctatgcccgaccagtgaaaccagtctgcatcggcaaatatcttttcccaatctatcatgccgggacgcagggtggcaaaagaagacccttcacgatcgtataccacattggaattgcgaaacgaagcgccactctcaagaaaatacagtcccatgcgtttccctccgaatacgattccttccgtacccagcccgttggcacggagcgatgcgatacatgcctgcgccattgcattgtcgggcagccgggtgacaaactcggtgggaatcccgaagttggcgagcgatacagccacattagcctcgctgccaccatacgtggcaatgaattcgttggtctgggagaaacggcggaagtcgggagcagtaaggcggagcatcacttctccaaatgtaaccaccttgcggtttgttgaaatcatttttttgtccatagcttcttttaaatcaaaaacagccttcacaaccggctttcttaccggtgtatgaaggctgtcggattctttaagacagtatttatttcttgaaacgttctttcaacttggcaagcatgtctttggtcatggtatccaagtcgtattcaggtttccagccccattcttcgcgggcacaagtgtcgtccagtgagttaggccatgattcggcgatagcctgacgcaatgggtctacctggtattccatttcgaagttaggttcgtattccttaatcttgttgaagatgatttcaggatcgaagctcattgaagcaatgttgaatgagttgcggtgaacgaacttgctcgggtctgcttccatgatttcgatggcggcgcgtaaagcatccggcatatacatcatatccatgtaagtacctttgccgataggacaaacgaacttttcacctttggctgccgaataataaatatctacagcatagtcggttgtaccgccgcccggaggagtcacgtaagaaatcaatcccgggaaacgtacggaacgggtgtcgacaccgaaacggatgttgtagtagtcactcagcaactcaccggaaaccttggttacaccgtacatggtgcgcggattgcggatagtgtcctgcggagtcttgtccttcggagtgttgttgccgaatacaccgatagaactcggagtaaatacggcgcacttcatggtgcgggctacttcaagtacattgaacagaccgcccataccgattttccatgcaagctgcggtttggcttctgctactgccgacagcaaagctgccaggttgtagatggtatcaatatgatactttgaaacagtttcggcaatctgctgttcgtttgtgatatcaacgatagcagacggacctgattctgccagttcgcctttgggttctgcaccggggatgtatcccgctacgatgttaccattataaatacttcttaatttcattgttagctctgagccaatctgaccggtagagccgataatcaatacatttttcatagtgaaattataatacgttagtttgctatttgagagcaaagataggcagaagcattcagattttatcaaagttttctctatatttttgcagaaattcaaaaaaaaataagaactttgtccgtcgaagagaaatatctgaacttaatctttaatacttaataaaaatcaaagctatgtatggtaaaatgaaagagttcctcacgaaggaactggctggcatcaaagaagccggattgtataaaaacgaacgtatcattacaactccccaaaaggctgatatcaaagtaaatgcaggagaagaagtattgaacttctgcgcgaacaactacttaggattgtcaaacaaccagcgtttgatccaagcagcaaaagacgcaatggactctcatggctttggtatgtcgtctgtacgtttcatttgtggaacccaggacttgcacaaacaactggaagctgctatctctgattatttcaagaccgaagatacaatattatatgctgcctgctttgatgcaaacggtggtttgttcgaaccgctgctgaccgacgaggatgcaatcatttccgatgcattgaaccacgcttctatcattgacggtgtgcgtctgtgtaaggcaaaacgttatcgttatgccaatgcagacatggctgacttggaacgctgcctgcaggaagctcaagctcaacgccaccgtatcattgctactgacggtgtgttctctatggacggtaatgtggctccgatggataagatttgcgaattggcagaaaaatacgatgcgttagtaatggtagacgaatcgcattctgccggtgtagtgggtccgaccggtcatggtgtggctgaacaatatgatgtttacggacgtgtggatatctttaccggtacattgggtaaggcattcggcggtgctatgggtggtttcactacaggtagaaaagaaatcatcgacatgctgcgtcagcgttctcgtccgtatctgttctctaactcggttgctcctgccatcgtgggcgccagccttgaaatgttcaagatgttgaaagaaagcgatgcactgcatactaagttgatggacaatgtaacttatttccgcgacaagatgctggctgccggtttcgatatcaagccgactcagagcgctatctgtgcagtgatgctgtatgatgcaaaactgtctcaggacttcgctgccaagatgcaggaagaaggcatttatgtaaccggtttctattatccggttgtgccgaaaggtcaggctcgtatccgtgttcagctgtctgccggtcacgaacgtgaacatctggataaagcgattgctgcatttatcaaggtgggtaaggaattgggcgtgattaaataataatccgttctgtctttcgtccggaaggatgattgataagggagtgtgccaaacttctgactactgttgctctgtataacaggacagtgtctcggtgttttagcattcttccttattttttttgtgttttttgcccgtttccaccgcttgcgggagtactcttctttctcctctcctttatgtcctttctttctgtatattacctcttttcctcctgccggttatggctttttctcctgtcggttattacggtcttccatagtagactgtacagtcttccataatggaccgtacagtctgttgcagtggactgtacggtctgttacggcggactgtaatatatgtaaggaaggaaagacctgtgtttagggtgtgaaaggcttattcatagggtggggaatgcttaaagccagttcttgctttttatcactgaacgtgtaggataagcagtaaggaccggcaaaagagattttatgtaaaagagagtatttattctgcttgcatttctacctgcaacacatagacagggaaagcatcggaagagcgccggatatggcagattcgtaatccttcttcggtcggcttccattcgacggttttcttgttgtcgagcaatgtgatgcgcttgatgcggtcggtgtagcctttgaaggcacggagtgtaaattcaccggcaggcacgtggcgtacgataacgtagacatggttgcctttggcagtatatctgaaatcgggaatggcattgacgggtgtaccatcgaacacggcatcgtggaacccttcttttacctcttctctttttccgtgggcaaggggcgaggtctcaccgtaagtatgccagggcgaagtgccgtagatggcttccccgtttgtctttatccattggcggaaagcgttgagtccgggttcggtttgctgcgggaaactgccttgggggttgggaccgatgttcagcaacagatttcctcctttgctgaccacgtctgtcagattgcgaatcatcatgtcgggtttcttgtagacagtatcatatttgttgtatccccagttggcacccatggtgaggcatgcttcccaaggtttcgggtctatctcgttcattaatttctgctctatgatgcggtagtcacccagaccgtttccgatgcggctgttgatgaggcaatgcggttgcaggcgctcaatgagccggcggatggaacggctttgctctttggttaccatttcgggagtgtcgaaccacatcatggcgatttctccgtaattggtcagcagttcggttaattgcggcagcaccttgcggtcgatgtatgcctgaaggttcttattgtcctcatcgggaaaatcccacgtattgcttctgccggctttggtcggccagttggtggggacatcagggtcttcccagtctcttcccagggaataatagaaaccgaatttcagtccttgcttacggcattcgtcggccagttctttcatcgggtcgcgtgcaaacggggtacgggtaacgatgttgtaatcgctgcatgccgagtgatacatggcaaatccgtcatggtgcttggaggtgatgacgatatatttcatgccggcttctttggcagtctttacccattttcgggcgttgaactcggtcgggttgaagtcattggcaattaaagcatattctttgaccggtatccgttcatacagcataaagtgttcgccgccttttgtggggtgtcccttccagtcaccggcagtttgtgaataaagcccccagtggataaacatcccgaatttggcatcggtaaaccatttcatgtcttctttgcctgctcctttgagggtgaagggcaacaggcagcagcagagtgtcattagaaaacgtgtgttcataaaatgtaatttaagattagaatgagttgtatttcgaggtcaaagatacagggtgtattccgaaaacaggggtacatattttccgataataggataataattgtccataaagggggataaaagggggcaagtgaagtatgtttcggcctgtgtggtaccccggaggggaatcgaacccctatctaatgtttaggaaacatctattctatccgttgaactaccagggcaacttatctggctgcaaaggtagtcctttttgttaaaacggcaatatgaaagaatgaaaaatataagaaaagggtatagatgacaagaggaataattattttgtcattctgatgttttaaaatcggccattgatttacttatctgtcagaagaagttttctgatgttcgtaaaatatacataaaaataacaatatgttattccggagaatatcgcgtcgatatcatattgatagtgaagtatgctattaaacagttatttatctactctttttcttcgtttgaaattaaatattgctgtaattttgtgcactttgataatcgcatggagataaatggcggaatattttgttttttgacaggactttccgaactttgcgagcaatgaatttattgtaaccctaaattataagttatggcagatgaaatgatagtcaaggagttggaccaggttgtggtccgtttctcaggcgactcaggcgatggtatgcagctagccggaaatatattttctaatatttcggctacagtgggaaatgatatcagtacttttcccgattatccggcggatatccgtgccccgcaaggctcattgacaggtgtatcaggtttccaagtacatattggtgccggtaaggtgtttactcccggcgacaaatgcgatgtgttggttgccatgaatgccgctgcattgaaaacacaatataagtttgccaagtccacagcctgtatcatcattgatacagattgtttccagaaatcggatttggacaaggcggcttttaagacagagaatcccattgaggaaatgggcatcaagcaggatgtgattgctgctcctatctcgcagatggtcaagaattgtctggcagatagcggaatggataacaaatcaatgctgaagtgccgtaatatgtttgcactgggattggtttgctggttgtttaatcgcgatttgacaatcgcagagaatttcttgcgtgaaaagtttgcaaagaagccggccattgccgaggctaatattaaagtaattcacgccggttatgactacgggcataatacacatgcttctgtagaccatacctataaggtagaaacaaaaacaaaggttcccggaaaatatatggatatcagcggaaacaaggcaacggcatacggcttgattgctgctgctgaaaaggcaggactgccgttgttcctcggttcttatcccatcactccggcaacagatattcttcatgaattgtccaagcacaagtcattgggtgtgactactgttcagtgtgaagacgaaatttcaggttgtgccactgctatcggtgcttcatttgccggtgcgctggcagcgacctctacttcaggtcccggagtctgcctgaaatctgaagcgatgaacctggctgtaatcaccgaattgcctttggtggttgttgatgttcagcgtggcggtccttctaccggtttgcctaccaaatcggagcagacagacttgttgcaggcattgttcggacgtaacggtgaatctcccatgccggtgattgccgcagcttctcccactcattgttttgatgctgcttatgctgcttgtaaaatggcattggaacacatgactccggttgttcttctgacagacgggtttgttgccaatggttcgggtgcatggagattgcccgacttggaaagctatcctgccatcaatcctccttacgtgactccggaaatgaaagataactatacaccttataaacgtaatccggaaaccggcgttcgttattgggctcttcccggacaggaaggttatatgcacattctgggtggtctggagaaagacagtaatacgggagctatctctacagaccctgaaaaccataatctgatgtgtcgcttacgtgccgaaaaggtggcgaagattcctgtgcccgatgtgaaggtgcaaggctgtgcagatgatgccgaccttttgattgtgggctttggcggaacttacggtcatttgtattcggccatggaagaaatgaataaggcgggaaagaaagttgctttggctcatttcgttcatttgaacccattgcctgagaatacggcggaagtgctgaagaaatataagaaggtagtggtggccgaacagaacttaggccagtttgccggatatctccgtatgaaagtagacggatttgttccttatcagtttaatgaagtaaaaggtcaaccgtttgttgtcagcgaattagttgatgctttcacagagattttaaataaataataaccgtaaagaaagtaagaactatgagcgaatatacagcaaaagattttaagaaaggacagccccgttggtgtccgggctgcggtgaccatttctttttggcatcattgcacaaagcgatggctgaactgggaatagctcctcataatacagcagttatttcgggtatcggttgttccagccgtttgccttattatatgaatacatacgccatgcaaactgttcatggtcgtgcggcagcaatttctaccggttgcaaggtagctaatccgaaactcaccgtgtggcagatttccggtgacggtgatgggctggctatcggtggtaatcattttatccacgctgtgcgtcgtaatatcgacttgaacatgattttgctgaacaatcgtatttatggcttgacgaaagggcagtattctcctacttctccccgtgggtttgtcagcaagtcgtctccttacggaacagtggaagacccgttccatccggccgaattatgctttggtgcacgcggacgtttctttgcccgtgctgtggcaacggacggtcccggcactgtggaagtgttgaaggcagccgctaaccataagggtgcttcggtttgcgagattcttcagaattgtgtgatattcaatgacggtacacacgaatctgtatacaataaggaaggccgcgccaagaatgcgatttatctggaacatggcaaaccgatgttgtttggcgagaacaaggaattcggattgatgcaggaaggcttcggactgaaagtggtgaaactgggtgagaatggaattacagaaaaagacattctgattcacgatgcacattgcatggataacacgttgcagctgaaactggctttgatggaaggtcctgatttcccgattgcattgggcgttattcgtgatgtgaaggctcctacttatgatgatgcggttcacgaacaaattgatgaagtctcagctaaaaagaaatatcataatttccgggaattgctgatgaccaatgatatctgggaagtgaaataacgatatggaaattactttttgacatatcgtcgaaaataataaatggttagtaatgagcagcgagagggctgccggttactaaccatttgtgatttatgac

SEQ ID NO: 6951 - DNA, 2004 bp, Unknown
  gut microbiota DNA sequence
caaaaccgggtcgatggcggcacaccataatgtgatatcatcaccgggaaaaagttttgccatatgctctactccttgtcggctggcaatgacacaggccatttgcagtttggcaggagtacctttagtgagtaaagctttccaggcaagttccatgctttcgccggtggcaagcatcgggtcgaccaaaagcaatgtcttgtcattcagagagggagcggcaatgtattcgatgtgtacatctacaatacggtgttcatcatccttgtagaaacggaatgcggaaacgaaagcgttatcggcatggtcgaacatattcagaaaaccggtgtgcaggggcagtccggcgcggaatacagtggcaatcactattttgtcatcatgcgtactggccgtggcagttcccagtggtgtctgtacctgcttgacggaataggttagtgctttactcatttcgtatgccatgatttcccctattctttcgatatttctgcggaagcgcatacggtcgttctgaacatgtacatcacgcaattctgctacgtattggttcagaagcgaattgccttcactgagattgatgattttcatatctgtgttattgttatatgattgactttgacctgcaaagaaacaaaataaatttcatatttgtaaagtgcaaattgcatttttgttacacaaatataaatctttcactattacggaaatttttctctaataacttcttttttttaaaataaagcactaattttgtagcgccttagacaagggggtgttgaaaaacatcttcttccaaaatagagagtaaaaacaacattatacaattaaccaatttaaatcatttaaaaatggcaaatttagatttaagcaagtacggtattaccgacgtgaaggaagttctccacaatccttcttatgatgtacttttcgctgaagaaaccaaacccggattggaaggtttcgaaaaaggacaggtaactgaactgggcgctgtaaacgtaatgaccggtgtttatacaggtcgttctcctaaagataaattcttcgttaagaatgaagcttctgaaaactcagtatggtggacttctgacgaatataaaaacgataacaaaccttgtactgaagaagcttgggctgacctgaagtctaaagcagtaaaacaattgagcggcaagcgtttgttcgttgttgatacattctgcggtgctaatgctgcaactcgtatgaaagtacgtttcatcatggaagtagcttggcaggctcacttcgtaactaacatgttcatccgcccgactgctgaagaactggaagcttacggagaacctgattttgtatgtttcaacgcatctaaagcaaaagttgacaactacaaagaactgggcttgaactctgaaactgctacagttttcaacttgaagaccaaagaacaagttatcctgaacacttggtacggtggtgaaatgaagaaaggtatgttctctatcatgaactacatgaacccgcttcgtggtatcgcttctatgcactgctctgccaacactaacatggaaggaaccagctctgctatcttcttcggtttgtctggtacaggtaagactacattgtctactgacccgaaacgtaagttgatcggtgatgacgaacacggatgggatgacgaaggtgtattcaactatgaaggtggttgctacgctaaggttatcaacttggataaagaaagcgaacccgatatctacgctgctatcaaacgtgacgctctgcttgaaaacgttactgttgatgctgacggtaagattgatttcgctgataagagcacaactgaaaacactcgtgtttcttatcctatctaccacatcgaaaacatcgttaaacctatttctaaaggtcctcacgctcaacaagttattttcttgtcagctgatgcattcggtgtattgcctccggtgtctatcttgaatcctgaacaggctcagtactacttcttgtctggatttacagcta

SEQ ID NO: 6952 - DNA, 4055 bp, Unknown
  gut microbiota DNA sequence
ccgactccgacattctcagcttgcttcggtgctgctttcttgtcattgcacccgactaaatatgctgaagaattggttaagaagatggaaaagaccggtgctaaagcatacttggttaacactggttggaacggtacaggcaagcgtatctctatccgtgatactcgtggtatcatcgatgctatcctggacggttctatcgacaaggctcctactaaggttattcctttcttcgactttgttgttcctacagaattgcctaacgttgatccgaagatccttgatcctcgtgacacttacgctgacgctgctcagtgggacgaaaaagcaaaagacttggctggtcgtttcatcaagaacttcgctaagttcactggtaacgaagcaggtaagaagttggttgctgccggtccgaaattgtaatctgaattttacagatttaacatataaaaagtggttcctgaataaggaaccacttttttttatgcttgaaaatgactagatttgttgcaaatcaaaaatataaaagcaaatgaaatcactaagtattttcttattaggtgccggcttgtttaccctggcattgtgtggatgtacatcgcagccttcacagaaagagaccggaatgtccgatagcattgttaaagtgcaagataatcctgtcattgaaactattatggcacgccgcagtattcggaagtacaaaccggaggctgtggaacgggataaaatggaaactattctgaactgtggtattcatgctcccaatgggatgaataaacaatcatgggaagtgcgtgtggtagataatcaggattttattaatgagctgactgagattttcaagaaagaaaatccaaaggctgctgaacgtgccggatttaagaatatgttcaataatgctcctaccgttgcttttattgcctatgatccccggtatgatatgtctcaaatagattgtgggcttttaggggcgaatatgattcttacagctcagtccatgggtataggaagttgttgtttaggtggtcctgtccgctttatgaaatctcctgcggctgccggttatttgaagaagttggatttttcggatgggtatgaattattgtacgctattgcttttggttatcccgatgaggctccggcagctaagccccgtgatacttcgaaagtgaaatttattgattgatttcccctcctcctttccgctttctatattcgagtgatatgtttctgctcgaatataggaggcagctcgttttgtattcctttatctctataagctaaaattgtacttttagaatctatttttggtgttctctaataaattccctacatttacacccgtttcatttgaattaatcttaatcttaataaatgattgtagaaccggaagttgtaggagaatttgcctctggcagccatgaagcctttcataagatattcaagctgttttatcctaaggtatatgcttttatacggggatttataaaagatttggatgattctgaggatttgactcaaattgtctttataaaactatggaataagagagcgatttttcacaaggtacatcattttgattcttatttgttcatgcttaccaaatataccgtttttaattatatcacaactaaaaaagtctcccggtttacaagcgaagataatgttcccgagatttctgatgaatacactccttatgataaattgatagcgaaagatttgcaattattaattgatatggtagtgaatgagatgcctcctaaaaggaaaatgatatataagttgagtcggatagaaggactttctaacgaacaaatagcagagaaactggggatacagaaaaaaacggtggagaatcatttgaatatcgctttaaatgaactgagagacgctttggccctttctattttagtttatttaatactgccggtttaggtgtatcataagatagaactgtcttttttatataaaatgtgaaaatgaataattatatacataagataatagactttttctttcatcatgaagtttctgatgagataacggaacgtgtttataatcgtatggtttttcctgtggaagataaagcaagagaagaagctgtttcacaaatttgggataaactggacgatgcttcttgctctgacgaaaaaatagagaaggctttttataatttggagacctctttaggattaaaaaaagaagaacagactgtcgaattagtacatcgggaacatataagaaatacgaaaagaataaattggggaagagtagctgctatttggactattcctttcattatggtgtgtttttcggcttactattattattctgcaaaggattatgtgaaggagacgttgtccgaagtgacttatatgcagcgttatgcagctatgggtacacgtgaagaagtggttcttcctgatgggagtaaggtttggcttaatgccggtactttgttggtatatccctccagtttcatatctgaatctcgcaatgtttatattgcgggagaaggtttctttgaagtttcaaaagataaagagcatccttttattgtcactaccaaccatttagagttggaagtgcttggtacgacattcaatatttcggcgtatccggacaataatcagataatggctacattggaaaccggcaggttacaggtaaaggtaaataaacaaccggagaaatattttctggaacccaatgaccagttgatatatactccttccacagggatagtacagcagcataaagtgaatgctgtttcccactccgattggcgtatgggagggttgttctttggcaatgtgccgtttaatgatgttcttcatactttggaacgtgtgtatggtgtgaaattccatgtgcgtacatctatttaccagaatcaaagtttgagagttcattttaatagaaatgaatcgttggagcaagtacttcaaatcattaaaatattggttcccggtatagaatatgaaattgttggcaagaatatctatttaagatagcggtttagtatttattaacacaaaaccattgggtgtagtatttatttgaattgtctttctcatgtacgtacaccttatgtcgttaataaatctaatatgaaatgaacaagaaatttattcgagtgttggggcttggtgttggcttatttctggctggcagcctctctgttaatgcacagaaagtttccttcaatggggaacgtctttctttaaagcaagcgtttgagaaaattgaatctgtttcgaagtataagattgcttataacacttcacaactggatgtcaataagcaagttgtcttgaatcaaaagaatcaggatgtattgcaaattctgtcggatttgctaaaaggaactaattgtgtctatcaagtgaatgacaattatattgttatcactctgaaagatgatgagaaggttaagaaaattaagggtactataaaagattcggccggggaacctattattggtgccaatgtaattttaaaaggagatgccactgtaggaagtattacagatatagatggtaactttgatttgtccgttccaagcaatgctactttgcaagtttcttatataggttataatactcaggatgttccggtcggaaataaatctttccttaatattactctgaaagaagatacggaaacactggatgaagtggtggttgtaggttatggttcgcagaagaaagtcaatgtgattggctctattgcatcagtggacagtaaagcattggaatctcgtgcagtgcctgacgtttctaatatgttgaccggtcagatgtcgggtgttaccattacacaggaaagcggtaatccgggacaggatgccggtactattcgtatccgtggtgtcggttcgtttggagcaactcctagtcctttggttctagtagatggacttcccggttctttgagtgatttgactccggccgatattgataatatttcagttctgaaggatgcctcttcagcagctatttatggttctcgtgctgccaatggtgttattttggtaacaaccaagaaaggaa

SEQ ID NO: 6953 - DNA, 26348 bp, Unknown
  gut microbiota DNA sequence
gcgattggagcagaaacctatacgcctgagatgattcagaagtatcgtgatggttctgaccctgataactatgctgacgaaatgtatcttgatgatcttttgggcggtcatgcactgcaaaccaagcatgagttgagtgtaagcggtggtacggaaaaggtacaatatatggtatcattgggatatttgcgtcaaaatggtttgttggacaataactattataaccgttacaatgctcgtgtaaaccttggtgcggaattggctaagaacttgaaactacaagtgcgtctgagcggtatgacttccgatcgtcacgaaccttctactccgggttctttggatattggcggatttaaagggattatttctaatgccgttcgttttcccggtttaactccgacttacttgcagaatggtgaggtcggtttaggacctaaattgcaaggtacaccggtggcatgggtagactgtgcgtcttcatatcgtgaagactatgacaaatttaaaaataatattgaattgtcatatcagccgatagatggattgactttgaaaattttaggcggttataattatacattaagtcacgttcgccattatcgttgtgatatgattcttacgggtgacaagagtaccggtccttctacattgagcgatgaaatgaagcgaactgtttataagaccttccaagctgtagctgattataataagtcttttggtaaacataatcttgctgcattggtaggatatacttgggaagacgaaggtcagcgtactttatcgggtagtcgtaataactttccgtctgatgacgtacctttcttaggggccggaggggcagacggtcagacaaatggaggcggaggatatgattgggctatacagtctgtcttcggtcgtttgacatataactatgatcagcgctatttatttgaaacaacaatgcgttatgacggctcttctcgttttccgacagatagcaaatatggtttcttcccttctttggctgcaggttggcgtatctctgaagaacagttttggaaggaaaatgaaaatttgtctttcattaataatttaaaactgaaagcttcttacggtatattgggtaataataatatcggtaactatccttatcagtcggtatactctttagggcaagcacagaactatgtatttggcggagtgtacacacaaggagcagctgttactacttatgtggatccgggtttgaagtgggagcgtactcgtactaccgatgttggtattgagactgcattctttaataataagttgacatttaatgcttcttatttctatcgtaagactacagatgtattgtataagccggctgcaagttattcttcgattttcggattaagtgtatcgcaagtaaataccggtgagttggaaaataaaggttgggagtttgaaataggtcatcaaaatacaattggtaagttccattatcatattaatggtaatttctctattattgataataaggtattgacattgggtatgggaaatgtgacccagaacaatggtatggtaggtaacggtagcgatttgtttatcggttatccgatgcagatgttttatgggtataagacggacggagtatttctgaccgatgatgaagtaggtgattggtatgatcagactgcgatagccaaaggttctaaagccggagatattcgttatgttgatattacaggtgatggcaaagtaacaccggatgacaaaacgttcttaggctctcgtatacctaaatatacttttggattgaatttcggtggagaatataaaggatttgatttcagtgtattgcttcagggagttgctaaggtgaaaggtatgttgtctgtttatgcaggtcatgcattctatcaggagggtaatattcagaaatggcaaatggagaattgctggaatgtgcagcaggataaccgttatcctgaatatcctcgcttggagattatgtcaaatgcaggtagcaataatacactgacttctgatttctgggtattggatgcttcttttctgaaagtacgtaatgttcagttaggttatacattacccgaacatatagttaaaaagtttggttccaccggtatgcgtttctatgtttctttagacaatcctttaaccttcaaggggtatcgtaaaggctgggatcctgaaaacacaagtaataacggtcaatactatccaactatgtcaacttatactttgggcttaactttaaaattctaatgacttatgaaaagattaaaatatatagcttttactgttttattagcttcattttcattgcaatcatgtgatttggagcgttatccattgacagatttgtcggaagataatttttggactgatgataagaatgccgaattggctttaacttctttatatagaggtagtattacaaatggtttggaatatagtgtttcggacttttggtcttatcatggtatgttgtttatggaacatctgacagacaatgcttatgaccgtcgtggagaaaataatccattctttaatatttctagtggtaaactgttgaataataactcttttattaaaaactattggtcatcggcttataagcgtatcggtttgtgtaaccgtttcttggagggtattgccaatgctcccgaatcagaacagaaaaccagaatggttgccgaagcccgctttttgcgtgccactcagtatcactatctggccagttattttaaggatgtacctttagtgaccaaaactctgacaggtgaagaggccaatacagttgaaaaggaaactcaggctaatattttgtcatggtgtgtgacagagtttaaagagtcggcagctgatctgccccgttttaaagatattccgaatagtgagacaggacgcgcttgcaaacaggctgctttagcatttttgggcagaacttgtatgctgatgcaggattgggcaggtggagcagccgcttataaggaaatcatcgattatggtgataactcaattcatcctgtgtatcgggaactgttccatccttcaaccggtgtaggcaacaaggagaatatttattatatatcctatcttgaaaactattttggttgcggtcttccacagcatattttgtctgcaaaagacggtggatggagtctgtccaatccttcggccggattatttgaatcttatgagtttaaagacggaactccgttcagctatgacgattcacgttacaacccggataatttaggtgagaaccgtgatccgcgtcttgattataccatctattataatggagcgacttttatgggtactgaatatcgcatgagtccggattatgaagcatcaaagaaagaacgtttggattattcttcagaagtatctaagactggttttatgtggcggaaatattttgatgagaatccgatcaatgatttgaatagctatagtgctgtgactccggtaatcagatatgcagaagttttattgagctatttggaatgtttgattgaaagcgggcaggccattgatcaaacagtattgaatttgaccatcaatcaggtgcgtggacgtgctgatgttaagatgccacctgttacagaaactaattcagacaaattgcgcgaattactccgtaatgagcgtcgtgttgaattggcttttgaaggtatcagatattgggacttgttgcgctggaaacttgctgagacagtgcttgttggtgaggtatggggtgctccttatcctaaatctatcacttatgccggttctaccaagtttgtagatccgacaggacattgccgctggtatgtaggaagacgagattttcgtaatcctcaggattataaatggccgattcctttgtcagaacaaaatattaatcctaacttgcgtgagtaattctaacaataggaaaaagtgtgtcaaaaatgctacattaggtttttgacacaccttatctgactaaaatattaaaatatcatgaaaaaacagtatttggctttatctctcttgacaccggtgttgtgtcctgctctgactgcggaagccaggactcccaaagagaataaagtgaccaatcgtgagcagcccaatgtgattgttattttggctgatgacttgggttatggtgatttggaatgttatggtgcaaagaatgtgcagactcccaatgtcaatcgtttggcgggtgaaggtattcgctttaccaatgctcacaccgtagctgctaccagtaccccttcccgttactctttgttgaccggtgaatatgcatggcgtcgtcctgataccgatgtggcagcaggaaatgccggtatgattatccgcccggaacaatatactatggcagatatgtttaaaaatgcgggatatactacttgtgcaatcggtaaatggcatttggggctgggagataaaacgggccaacaagactggaatgctccgcttcctgctgctttaggggatttagggtttgattatcattatatcatggcagcaacagccgaccgtgttccgtgtgtattcatagaaaacggtaaagtggcaaattatgatccttctgctcctatagaggttagttataaacaaaattttccgggtgagcctaccggtgctgatcatcccgagttgctctataatcagaaaccgagtcacggacacgatatgtctattgtgaatggtatcagtcgtatcggtttcatgaaaggcggtggtaaagctctttggaaagatgaaaatattgccgattctattactacgcatgccattgacttcatcaaacagcataaagatgagcctttctttatgtattttgcaaccaatgacgttcatgttcctcgtttcccgcacgaccgcttccgtggaaagaacccgatgggtgtacgcggagatgctattgtacagtttgattggtcggtaggccagattatggaaacgctcgacaaactggggctggcggaaaatacattgattatcctgtccagtgacaatggtcctgtggtagatgatggttatgatgataaagcagaagaattgttgaacgggcatagtcctgccggtccgtggagagggaataaatacagtgcattcgaaggaggtaccgccgttcctgctatcgtgcgttggcccaagaagattaaggaaaatcgtgagtcggatgtcttgatgtcacaaattgactggatggcgtctttgggggcattggtcaatgccagacttccaaaaggtagtgctcctgatagttacaatcgtatcggtaatttgctgggaacagatgatgaagaccgtccttgggtaattgagcttgcttctaatcacgtgttgtctgttcgtaccaaagactggaaatatattgagccgaatgatggtcctgcaatgatacagtggggacctaaaattgaaaccggtaatttaagcactccccagctttatgatatgaggaaagaaataaatgaacgcgctaatgtggcatcacagcatcctgaggtagtatatgatatgcagaatatacttcgcagagtacgtaataaaaccataaagatggaataataaaaaaagagaggcggttcaacagtaagccgcctctctttgatatatagcaatttccttttatcctctatttgctcttttacgttccagttcatccaaaattactttacgcatacgcatactttttggagttacttctacatattcgtcttctttgatatattccagtgcttcttccaatgagaagattacgggtggaatgatacgagccttatcgtccgaacctgatgcacgcatattggtcagtttctttgatttggtcacattgatgaccaggtcattttcatgaacatgttcgcccactacctgacctgcatatacttcatcctgcggatagataaagaatttaccgcggtcttgcaacttgtcaatagcgtaagcaaaagccgtaccgctttccattgcaatcatagaaccgttgctacggcgttcgatatcacctttgtagggttgatattctttaaaacggtgtgccatgatcgcttctccctgagaagctgtcaatacattggtgcgcaagccgataataccacgtgaaggcatatcaaattcaatattgacacgatctccctgagattccatggaggtcatttcacctttacggcgagttaccatatcaatcattttgctggcaaactcttcgggaacactgatcgtgagttcttctatcggctcacatttcactccgtctatttctttgaaaataacctgcggctgtcctacctgaagctcgtaaccctcacgacgcattgtctcaatcaagacagagaggtgtaatacaccacgtcctgatactatccatttaccgtcttccaattcgcttttgcgaacgcgcaatgccaagtttttatccagttccttcatcaaacggtcgtggatgtggcgcgaggtcacaaatttaccttctttaccgaagaaaggagagtcattgatagtgaataacatactcatggtaggttcgtcgatggcaatgggtggcaagggttccggtttttcgtaatcgcagattgtatctccgatttcaaaaccgtccacaccgataatggcgcagatatcgcccgatgatacagcatcggtttttttacgtcccaatccttcgaatgtatgtacttctttaattttagacttcaccatcgaaccatcacgttttgccaaagtgatgttcataccttctttcaatgttccgcgatgaacgcggcccacagcgatacgtccggtatatgatgaatagtccagagaggtaatcaacatttgtggagtaccttccagttgttttggagcaggaatatgttcgatgatagcatccagcaatgctgtcaggttatcggtcggagttttccagtcggtgcccatccagttatttttggcagaaccgtagataaccgggaagtccagctgctcttctgtggcgttgaggctgaacatcaagtcgaacaccatttcatatacttcttccgggcggcaattgggtttatcgaccttgttgactaccactagcggtttcaaaccgagttgtaaagccttttggagcacaaagcgagtttgaggcatcgggccttcaaacgcatctaccaacaggatacatccatcggccatattgagtacacgttccacttcaccaccgaagtcggcgtgtcccggagtatcaataatattgatttttgttccattgtagttaattgaaacgtttttcgaaaggatggttatacctctttcacgttccaagtcattgttatccaataccagttccccattggtctggtcattgcggaacaaatgtcccgccaacatcatcttgtccacgagcgttgtttttccgtggtctacgtgggcgatgatggcaatgtttctaatgtcttgcatactatacctaatatttgactgcaaaggtacgatttttagttgaaaaaatatttggctgttaacgtttattttttatcttcggtctcttctttgctgttaaatgtagacggagtcgttccatagaaatcgacaaagtgctttctgaaagttggaatgtcgttatagcctaccatttcggctacctcctgcacactatattttttagttcgtagcagctctgccgagcgtttcaggcgcacgcctcttaccagctctataatggtaaagttggtgagctgcttcactctccgatagagggtaggctgactcatatttagcatttcggcgagtttcttcacattgaactcctggttttgcaggttgtcatttataattttcaggatttgtgtgacgaatgggtcttcaatttttatggctatgtcgttttcttcttgaatatctccgatagcgttgatagacggcatcagcagtttggtatagatttgtttcaactccactctgctcttgatgagccgttttacttttgtgcgcagaatctccggattgaacggtttcaagatataatcatcggcgcccagttcgatacctttcaccacgtcttcgtcacctaccaatgctgtcagcaggatgatagggatatggcaggttttcaaatcttcttttaagatgcggcaacattcaaatccgtccataacaggcatcatgacatcggtaataatcaggtcgggtatctctttgcgggcaacttttactccttcttcaccgttttctgccatgataatgttataggtcccaccgaataacactttcagataaagccggatatccgcatggtcctcgataacgagtattttatattttgtttcagggctttcaatcggtcgggggatgatactgtcttgcaactcttgtttctttttatcctccacagtgataatctttgcccggctgtcatctatctgtatatgttccggtttgacaaatacgacatattcttctcctttaaaatgctctttgcctagcggaatatataaggtgacggaagtacctatttctttgtcttgtttgatttgaatatctccatggtgatcgagtgccgttcttctcataatttcaatacccagttcaggatgcagatagttactcggcaagatatacctgtcttctcccagataggtgacagatgattcttctatcacttcttttccatcgtcttctatggtgaaaaggcagtactcttttcctttcaggcttgtgatgctgatgacaaagcggatggcaccggcataagaaatatggcggtatgcattcgacattatattcctgaggacaaacataattttttgccggtcaatccatatttccgtatttatcttgttgtctttgtcgtaatatagattgatggggctgacattcagcaattcatacgaagcccgcaccacttcatcggctattctgctcgccgtatatggagctacattcagggtaggaccgtagttttcttcctgatgaatattgagcaattggttacagatatcctgcatacagattgagttacgataggccacttttactttctgcaggaacgattccggtaaagccgagttgcttatcatttctttcagcggtgcagtgaccagtgacagaggggttctcaattcgcgtgccagcatatagctgatttggtcacgcatttgccggttctttttctcttctgctcttatttccgtagctttttccagacgttctttcattcgcacttctttttctttatacatctgtcgtttcagtgctttgctgttaaagtagagccaagtcaggaatatgcttcccataatgataagtatgtagccggtaattgcccatccggtggtggcccaatacttacctacagtgatggcaatatgggtgatttgttcatttccttccatcggataggagggctttatttcgagtatgtagtctcccggctcaatgttactcaacctcacttggtcataatcaccgaaatgccattttctatcattgggcagcaggcgatattccactttattggaggaagtgctgtaacgcaagtcgctcaaataaaacacgagattgttattgttgtagttcaaggtcagtcggtctattaaatgtgccggtttgtccaaaataacttgtccgtttattttttcgcctatttccaccttattataatttacattgatgtcagcgatataatatttatgcttgctggaagtttctttcagcatccggggatcaaagtaaagcagccccgtagagtttacccacaataattttccgttgttcagccggcaaacctgatagtagttttccggaaaagcatataagtagaaagagttatttttattgttgattgttataatgcccgagttggtgcccagccatgtattgccgtttctgtcgtctatcatgcaatcgatgtgtccgttgggtaggtcttggttaagaagcatggtagatacaacgtttttttcttttccgtctatttgtataatcttgttggcgtatgatacgaatagttggttgtagttattcatatagatagtcataactttacccggagtcagactgctcttttgttcgtatcctccgttcagtgtcacttttttgccttctcgggttgcctgaaacagtcctttttctgttcccagccacatggtgccgtctccatcctcacaaatggcggttattttctcaatttcttttgtataaggcatatatgccaaacagcttttgctctgatagtcgtatactatcaatgcattttccgttgcaatccataagtcgttgcgcgagttgaggaaaagtattttaatggcagaaacttggttttctgttgcttccggttggggatgaaaggagactgtttcattggtagtgggattcatcaggagaatatttcctttttcatctccaaaccacaggtgtccgtttttgtctttgaacaagcagtaattgccgttcttttccgcttttgcccatggtacgaactgtatatttggcgagaggttttttgtctgacttttatatatccccttgttgtcggtggccagccatataaatccgttgctgtcttctgctattccattgagagatcttatgtcgttatccagttggatgcggtttacattatctcccagcagatttaatttcagcagtcctcttccgaaggtgccgacccataacacttggttctgtttatcgagataaatgcgggtaattctgtttttgatgataggttcgtaataactgtcattttcaatcaggtcgatggttttaaagggagctttcagataatctttattttcaaattttatcaaagccaacgaggtgcctgatgccattacaaacgttgtgtcatctgcttgtataatatcgcggatacatgcatcctgcactatgggggtgcttttgttcagtttgcgtgtagcttttgtggttgtgtcatagcaggttactccgttgttgtggctgcaaatccataagtagttattatatatatgtatattgcaaatatcttctgcattagtaattcctagttcggcgcagtccaaagattcacttttcttttctgtcagattatagagtataagtttgttttcgcgggtaagtatatagaggttattgtcgcaaccatagaatttgaatggaatcccctttatattcggcagtagattaggtgtaatgcttacttcgtctgtctcatattcggttttcagttctgccactccttgtgaggtgatggcatatattttgtcttttgtcacacataagtccaaaatgtctgtcagcacttccggggtggacgataaaagtgacatgtagcatcctttcattttgttgaaacacgataacctgttcatgttcgctatccgtgaccaaagcattttgtcggaagtctcataaatgccggtaatggaatatggttctttgtctgccgaattgtagttgtggaagtgtattccatcgtatcggctcaggccgacatctgttcccaaccataaaaatccgtctttgtcctgatggatttcggtcaaggtattattgcttaatccctcttgtttagtcaataactggattcctgtctgtcggaaaaaactttgtgccttggttatttccatacccatcagcaggacaattataagtagtcccgtaaccggtgttgttaatgttccgcttcttttcatattccccttcattcatttaaatatagtgcacttaacaatgctatgtattcatatcatgtttcttagactattttaaggataactgcaaaaataggcttttattatgttataatcaacgttttaggttagaaactttttaaaaagtcggataagtcagagggtatacatctgtcttgatagggggtatatcattcattgttttatctatttgctgttaatcaatatattatgattgaatgaaataccattgaagtgccatacgttaaataataattcaaaagaaaggaagtgaagaacccatgtacacctattacatacacagcttcttccttcccttcataaagcttaatatcacctcacaatcttttcagccctgattgatttatagaatctgatacctatagtttataagtgaatgaagcgtcatggcttttcgggttataagtgccccggatgctgacaggaatctgcatatatttgattccgttgtctgccaccttcatataaatatagctttccgattggaatatgaagttgccttcactgttgtcgctggccaaactgaatcctttcacataccatttcatgagtgaagaactgcattcagcattatatccgttgtaatataagtcaccgtcggcatagccggtaaggttgagctgaattgtaaaggtgtacttaccattgattgtctggctggtaatcactttcagtaaagtctgattgcctttatcggcagccaatacattatgttcttctttcgcattggtatgtttgcgaaggttcgataagatttcatctgcctcctttaaactgatagcaggtaaatcgtttagatttaaattgtcagaattgttttcctcgtatgtaacacttctggcgccatacgttctttccaaaaaatacgttgaacttgagttgtcaacggggtcactactttctgctgtgcaggatgccaaactcatcatgatgagtgtagcaatcaataaatgaattgccttcatagaactattttttattatttttttatacgtttgaatgattgacccattatcattcgcctcaaaagtaggtattattttcaaataaacaaattatttcaaagattttttgaagaaaataccctcttcctgtgaataaaatgcctctgattgaatggaacgggggtgttttgagtgtgaaacggtgggttattcataatgaatgaaacacaggtgggtgatgaagaaaacaccatcggtgtttctttcgtcccaataaataattcttcgtgaacaattccccgatactttattccgatgaggggtaaattgattttcggactaccttgcattttgctgaaactacctcttaataaagactgattcgccaacttcctgttaaaaaaatagagtttatctttgcaacagtagaaaacaactttaggtgaaatgaatatggtaataagaagaactttatttgtattgatgtgtctgttggcttcttccttatatatgtatggacagatagccgttaagaccaatgtggcgatggatgcagttgctataccgaatttgggggtggaagtaggtttgagcaagaagctgactctggatgtgcccatgtactacaatccatggaaatatagtgatagcaaaatgctgaaactggcaatgcttcaacccgaactccgctattggctttgtgataaattcaacggtcacttctttggtgctcatttgatgggaggtgcttatcataccaccggcatcgatttgcctttttcaccttttgatgatttaaaagactttcgctataagggtcagttctatggcggcggtatcagttacggttaccagtttgtgttgggacgtcattggaacctgggagcaaccatcggcatcggttatgcttatgtgcgctataagaaatatgagtgtgaagaatgcggtgacatggtagagaaatcccataagaattatttcggccctaccaaggctgccctcaaccttatttatatattctaaaaacaaacggattatgaaactgatacgctatatccttttaacattgttgctgccggtatttccggcaggtgcgcagaatctgtgcggcagccgggttcaggttgcaaatccttctatcctgataggtgacaacggccgggtgatgataggaatggatgttacccttccggccgatatgcaactctcttccaaccgtgtggctacacttactccagtgttgaagactcgggacaacagttataacaaggtgctgcctgccatccgggtatatggtcgcacgcgtagtattgtgcagcagcgtgagcataaaactcctgtggatgccttctcggtgttgcgccgcaagaacggaacatcacagacggtgaattactcggtgcgtattccttacgaaaaatggatgaacggtgcagagcttgaactgcttgccgatgtgcgtggttgtgccgactgccaaaaagaagaaagcaatgctttcattatccgtgccgatttggaacgttacatcatgcagccgactgttgcttttgtttctccggctgtcgaagctgtcaagaaccgtgccgaagaaggtcgtgcctatcttgacttcccggtgaaccagacaaagatttatcccgaataccgccgcaatccttccgaactcgaaaagattaaggcaacggtagatgtggtgaagaacgatgccaatacgcagattaccgagatagacatcaccggctatgcatctcccgaaggtcgttacgcctccaacgctcgtttggctcaaggccgtgctgaagcattgaaaaaatatgtgatggactcttacggtttcaagtcagacctgttccgggtgaattctgtagccgaagactgggacggtctgcgtgactatgtggcaaagagcaatttgccgcgcaaagacgaaatactgttcataatagataaggatgaaaatgatttggatcttaaggaaggacgcatcaaggcgctggatggtggcaagatttatgcttcactgttgcaggactgctatccgggcttgcgtcattcggactacacggtgcgctatgtggtgcgcggattcaatgtagaagaagcgaaacaaatcataaagacacgtcctcaacagttgagcttgcaggaaatgtatctggtggctcagacttatgccaaaggcagtaaggaattcaacgaagtgttcgatgtggcagtgcgcatgttccctgatgacccaacagcgaatataaacgctgccgccatcgaactccaacgaggtgacttgcaacaggcagcccgttatctggataaggctgatgcacaagcgagtgcaacgctgaacaacagaggcgtgctgaatctgttgcagggagacctcgaccaagctgagattaatttcaagaaggcacagagcctgggttctgccgaagccggtgccaacctgaaagaagtctctaaaaaaagaaaagataatgctatatttggaaacagatgaacaacaagtgaacaaacagtacaataaaagatgttagaagaaacttgctctttgtgaaaagcgtaaggtaaaatccgggacagcagaggttgtaccggattttgaattttataagaaacagaagtagccctgcttattctgatattgagacaaaacttgcagattcatccccgtgtcagagccctctttttacacgtacgtctgcatgaggatatacatacgtaagcgtgaggctatgcggacgtacgtacagacctacgcatacgtatgtacaggcttacgcgtactaacgtgaaatgatgcacttcccaaaagacaaggacgtttttttaaaagaccaagagctttttaaaaaagataacgagctttttaaaaaagaccttagtcttttttacctctgcccggactttgtgcaccgttaccttccatgaaggtatacatgtacactttttgaggaaaaacgcttaaaacgtcctattttacatcaccccgggaaactcataaaatgaaaggtatgtagttgacaattagtatattatacggaggcgtatttcaaaatgtggtgagagtatgagagcataggtgagagcaaatgttttttactatcaccatataacacatttataattaacttgttacgcgtaaggtgagagtatgagagataaacggctcaaactttccggagagaaaggctgatgcgtacagcttttcgcttaatatgtatttattcttgaaaaaaaacaaggcttttcagggttccttttctatataaattgctatctttgtatgttgtagaaacacattaaaacataatgggaaagtttatcaatccgttcaccgattacggcttcaagaaaatattcggccaggaagtatccaaggagttgctaatcgagttcttaaatgatttgttggagggcgaacgggtgataaccgaccttacctttctgaacaatgagcagttgcctgagtatccgggagaccgtattgctatttacgacatttactgcactacggacactggtgagaaaataattgtggagatgcaaaaccgctcccaggtttatttcaaggaacgtgctctgtattacctttctcatgccattgttcgtcagggtgtgaagggagagagttggaagttcgatataaaagcggtgtatggagtatttttcattaattttctcttggatgagaaccagaagttgcgcaccgatgttatattgacagaccgtgataccggaaagttgttttcggacaaactgagacaaatctttattgcattacccctgtttaataagacagaagcagagtgcgaaacagattttgaacgttggatatttgtattaaataacatggaaacattgaaccgtatgccttttaaagctcagaaagccgtatttgagaagttggaagagattgtcgatgttcattctctctccgaagaagaccgcgtgcgctatgaaaacagtgtaaatgcttatcgtgactatttggctaccatcgactatgccgccaagaagggtgttgaggaagggtttgaagacggtctgcagaaaggcatccaagaaggcatccaagaaggcatccggaaagggcaacaagaaaaagctcttgaaatcgcccgcagtatgaaagccatgggaatgacttcagaacaaataatgaaggtcaccggcctttctcttgctgagattgaatctctcttataggaaggaatacataaagaatatattttcactaaagaggcacttcacttgagacagcctctttttttgtcttctccctctcccgaccctgatacttttcgcttagggcatcggcaaatcctgctccgggtgctgaacgttttacctggtggtaggtaattccctgaataatttaacaattgaaaaaagacgactcggcaaactttcttcccatagaaaataattagaaaaaagatagtgggtattttgtgcatcgcaatgtgcatatcattcaaaattgaattaaatgcccttgaaatcacactttaaatgcatttttccgaatttgccaatctattttgccgaaaacaccaattaagactaactttaaaatgcccttatctttgtaatatcgaaaatcgaggaatgaaatttacaaaataataatttatggatttaaaaattagagttatgaagattaagggtttattattcggactgtttgcatgcgctgcattggctgcatgtacaaacgatgatattgtggagaacaatggtaagggcgaacaagaaaaagtgaagggtaacttgactttggttattgctgcatccaataactcatcacgtgcggctgaagatggtgatgaaacagatggcggtacgacagctgaatcaaaagttaatagcgtgcttgttgttttggctccagttaatagcgagggagcatttaacggtgaccaaattgttgaatctgttgctggaacagcattgcaaaagacaacaatcggtggtaatgtcgcttatgtagcacctactttccaattgaatgcaaacggagagtataaagtattagtggtagcaaatccgaatcaaggaattattgatgctgttacaaacgcaaatccaacagaaaaatatgcagctgttgaaaactatgcatattcttacactggaacaggaactaatgaaatggtaggaacagatgaagtacctagtttcatgatggtgaatcaaaccgaatcaacagttaatgtagagtcgaataataaagataacccgacaacggtaacagttaatgtagaacgcattgcttcaaagataacttttgttcctgctacaatgacagccggagacaatacatacagcaatagatatgcagtaaaagttgtgaccggccaaaaagaagttgcagaaacaagagagggttatagaatggaaggcggtgtaggatatcacatgaccggactaaataaagcgaaattgttgtctgataactcaactatttggattcagaatggtgaaagagcatttacacaaactggaaataaatatcagggtactgaactttatatttatgaattaataacaatgccggcacaaaacgaatttgattatgtgtggaagacgaattcaaatactgaaaagaactggtatgttcagcttgatgactatgctttggtaaatctttctaagggtgtttatgctgtaagacatcttgctaattcagacttctcggcaacaaagacattcggattgttggatgcaacttatcgttgggttttggacccgaatacagttgctaagaatgacgagaatacgtcaagtattgcaggtgactatttctacaataaggtggctgatgtacaaaaagcagaaaaggactatgcagctgatcaaactccggaatcttatgcaaactatttctctgcgcttcctacgactgcaaaagaaggccaggatggaaaaataggaacacgtttggcatactgccttgaaaatgtggtgaaagttgataatcagctgcctgcaatggtaacaggtattattttccgtgctcagatttataatgaaaatcatcaagcaatgggaactatatataaatgtggtgatagctactatacaactcttgaacagatgtactcagagcatccgggaactacagaatttgaaacatataattcaggaaaatgctactattattccagcgatatcatgcatagcagtgatgacagttatatgaagaaggtaattatgcgtaacaatgtttatgtattgagcgttaaaagctttacagacatgggtagtgcagaagttacaatacctgatggaagtgaagaccatgatgagaacttctacctgaagttaacctcaacaattcttccttggcaagtacgtttcaacaacatcgaattttaatccgaacataaactctctaaataaaagtggaggagcctgcctcctccacttctttttcagaaatcacttttctaacattccattaaaacaaaaaaagcatgaaaacagtaaaaacattcgctcgacaattctcttttggcctgatgatggccgtgacattgggaagtgccgttgtgtcgtgcgacagcatactcgatgaagatgatgtagattgctctgtagagtatagagtgaaattcaaatatgactataacatgaagtatgccgatgctttttctcgcgaagtaagcagtgtagctctttatgcttttgatgacaacggcaaacttgtttatcagaaaacagaggcgggggatgtcttggcagtcgatggctactcgatggcggtcgacatggagccgggcgattaccacctcattacatgggcaggtttgagcgacgaggcttcattctctgttcctttgattacgcagggagtgtcttcactcgaagaacttcaatgtaaaatggaccgcatctactctcgcgcagccgacggaagcgctgtggtgagcagtaaactttcttcgctgtggcacggcgaagtgaccaagcagtcgttcactcgtgcggcaacccggcaagtggtgactgtgcctttggtgaaaaacaccaataccatccgcgttatcctccagcaaatggacggtgtgacggtggatgtagataaatttgaatttacgattacggacgacaacggtttgatgaactacgacaacaaactgatttcggacgaaactctgacatattatccttactatcgtgcacagggcggtacggtggcaggcaagtcggcacgtgccgaaggtgacgctgcggctgccgaagacgacaacatcagcgtggcgatagcccaaatcacagtaggccgattggtggaagaaaacaatcctaagctgactatcaccaacaccgagaccggcgaaacggttctctccatccccttggtgaaatacctgttgctcaccgaagccgaaggtcatgacatgaccaatcaggagtatctcgaccgccaggacgagtacaacatgactttcttcttggacgaaagcatgaaatggatcaatacccgcatcattatcaatgactgggtggttcgtttcaatgatatgaatatgtaatgtgcaacgcataacaaaaaacaacgaattatgaagaaatggtactcatatataatattagccctcgtttgtatcgggtttgcttcgtgtcaggatagcgacacggtgccccaactgcaaacagacggtcgggtgagcgtgcacttgcagattgcattgccggggggagactcggcacaacgaggggcaacggcacgaagctttgagaatggcggtacggatgatacaacttcggatcagaaggcattgagtgatgatgatgtattcgttttggtatttcagaacggggtgttgatagaccaagtgaaaggattgaggtttgatgcagtcaccggtggtacaaatccttccagcagaacattgaccggtacatttgttcagcctgagactgatggaagtctggaattggtggttcttaccaacttggttcagaatcaattagttgatgttgctaattcgacattatcaggcatacaggcattttttgatggaaagaaaggctcctcgccttcagcaatttatgaaagtctgatttatcaatatggttcttctaagtggaatatacagaaccgtcgcatcccgatgtggggaactacgggaactttttcattagacagagccaatgagttaaagaagagttgtaacttgcaccgtgcagtggcaaagttgggattcttgattaatgctgccgatgcagagagtgaaggacgaggctttgacggtttcatgattacaggcattcgcattagcggaataatggatagaggatattgtgcttcattgaatacactcggtccgagtgcttcgtattatgcaagtccttcggttcctactactgctaaagccttagcagacgacctaaactatacaggtcttgatgtgactacgagttataaagaccggatttatttgcctgagcaagttattggagagaatcctcttacgatagcagtgagctatacttataaaggtaaagctaaaacgaaggaaattacttttgatgaaaatgtgatacgtaatcattcatacctttataatatcaccgcggtgacaccggatgattttgacgtcaccatatcgtatgctgttgaggaatggaaatctgaaacaattaacgttccgacatttaaataattaaaagagactgaattatgaaaagatataaatcattattatcgctgaaatgggtagcagctttgctgttggtcgttggctttgtctcttgtgctgatgaagagattattgacagttcaaaccgtgtggtagagggagttatgactgatgttaatttctcctttacgtctcctacacctgccaaggtagaatcgagggcggctattcccactttagatgagtataaagtgcacaacttgtatgtttatgtatttgataaggctggaaaaaatggtgaattattcaaatttgactatgaccagttgaaggataaaaaagagaaggaatcggaatcagagggccaaactacatcaggaaaagtgtccttaagactttcttcaggagagaaaaggatttatgcagtagcaaatgtagatgatcaagctcctattactgaaccaacaatggcctgggataacataaagacagtaaaacaactgaaggaaaatattatttcgttgaagcaggaggctatttttagaacttcaggtaaattattgatgggaggagtttttgaaagcacttctcagaatgagcaaccggaaggttattgcaatattaatccacaggttaattcttatagtactattaagctggttcgtgttgacgcgcgaattacatttaatattagcttaagtaatagctcaggtactaaaatatttgctcctaggaagtggaaagtgatgaacattcccaaaaaggtttacttatttagaaatgaaggacaaagagcttctgataatgctgatgattattgggatatgcctcatacttataattttgaatctactagtgggggagtttctacttttacattctatgcgatggaaaatagttacacaacaaatggtttaggcaattattctgaccgtgaaaaagaaaataagcaggcagatggctctaactatgagaatccttcctttaagaatgcgccagaaaatagtacctacgtaatcttaaccggagactattatgaaaagtataccgagaatggtcatacgaaagaaagacgtgctgatgtgacttacgctattcatttaggatatgtagacagtgatcctaataactttgaatgtaatagaaatacaacttatacatataatgtttatgtagaaggggttgataagatacgcttggaagtaacatcttataatgagggtggtgaaacgaaggaagaccagccgggagctgaaggtaatattgtagaaactgataaattctatttatttgattctcattatgaccgtgcgcgtattatatttaataagaatcagatttcgggaaaggccggttttgttcttaatactccatttgataataatttctattatatagaaaatatagagaatcctgatgatgccggaatgattaatgcattgccttcaaatcaggcaaaagattataagtgggtttctttcagaagaaatgaaaaggccaagtggggtaattcttatattaaagacgagtttcaaccttatgatagtgaggagactttaaatgttattgaacttttaaaagaattgcatcatgggaaggtaacaggcagtaatacagatctctttgataggaatgatgaagtggtatatactgtgttcattaatgaaaattattatgatgaagacccaaggaatgaatctaatactaattttagctggaaagactttgtaaatcaagaaaatagagaaatgcatatattatgtaatactcagcgtagtgaggatagggaaagtagtttgacaacatcctctattatgataagtcagcgttctattaagactttttataacgaaaaagcaggaagtgatttaaaaacagcttgggggatagagtcggtgaatgaaacaggttggcttattcctcctaagagtaatccatggaattctagtgaacgtacagctgacaatggcagatggaatttctttaagcagatgccgacgataagggaagcatccagtggaaaccctttatggagcaattatatttctaatgcttatgttgaagatgataatggtgtccataattatttatcttcaaattcatctagagataaacttgtgtatgcatgcttacagcgcaatcgggatgaaaatggaaatggtcgtatagatgcagcagaagtaaaatggtatcccgccgctatcaatcagttgacagatatttggatgggtaaagatgctttgccatcagaagcacatttatatcaaaatggcgatgtgaaatatcggcgttatttgagtagtgatggtcaggagctttatgctgaggaagggtcctctataggtggatataaatttacttatgcaaattcattgcctggctctatatctgctcctacgcggtatgattatcgttgtgtacgaaatttgggtatgtctgaaggggtacctgcaaagactacaatcccacaaccttatgtgcaacatgacgagcgtggaaagatgttcacattaacatatatggcatcggtttctgttcgtggtgtgggagattttgccactgatgaacttgctaatcataccgagttagacttaactaacaggccgtatttaaaatttgaatataaggatgctgaaaatataagcttaacttgggagcaggtaaatcggttagtggatcagcataaatctccgtgtgccaaatataatacaggggggcaaattggttggcgtttgcctaatcaaagagagttgtcaataatggctgcatggtgtgataataccggttggggaggtagtactcattgccaaacaagaacgggagcttcaccttttatgacaggaaagggttctactagcggacatagtggcgggtatcattttatgactttgccttcaggtggctttaagggtcctgtacgctgtgtgcgtgatgtgaaataatgtttcgcttaaaaaattgatactatggatatttttgaaatcatggatagagaatcatcaagtcgctcggaagtgtacttgtatgaagagaatggaaaatggtatgcatacgaccgttcggcaagcctgctcaagaagttggctgccgggactgtcaagctcaggaaccatgtatgctccttctatggtgttatgctggagaaggtggaagtagaccttaatctgctgcttagcaagagttggtttgttgctctatgctctgattcggaaatgctgttacttaaaaacgattaaaaagggaattgcttatgtgtgaggtcgtaaaagtattggaaagagagttggaaaactccggtttgatatatgtttatcaggaaggaggggaagggaaatggtatgtttacgagcggtctgcatatttcctcagccggatgatggaaggagttgtattggaacgatatgtcatggataatactttatggcttgttcgtgcggaagtggatgttgactgcatacctcatgatacgattctcagttacagcaataaagagtatgtgctgaagtatacacctcaaaacgggtttcaggaatggctatcggaaattgaaggagtgatgatgcctcactaaatttagttaggataaatagaatcaggtttgcaggtgttataaaatagtatgaatattgtatttaacaaatcaataatggagatatatcgatttgcattcataatcttgttgtcgtctcttcttgtttcatgtggagagaagaagcaggaaaccggaaatgctgataaagccgctgaaaagaaaactccggcttttacattacccgaagtacctgttatgttacaatctgtcgaagacagactgcattttgtggtaaaccactattgggataaatttgattttaaagatacagcctatattcatgcgcccgacattacggagcaagcaatggcaaattatattgatttgctgacacgtgtgccgcaagttatggcggattcttgcgtaacccgcactttggagaacgtatctttagaaccaaagatgctgaattattttgttgaaacactgcgtaagtatcttttcgaccctaattctcccatgaggaatgaagagatatttgaaccggtgtgccgttttgttgcttcttatgcatcggcagatgaggcggcacagagccgtgcacggtatgacttgaaactgattgacatgaatcgggtgggcagtgtggctgctgattttgtttatacattggcttcgggagcccaacggcgtatgcatgatttacgcagtccctatactttgctgttgttctataaccctgattgccatgggtgtgcagaggtattggcgcatatgaaatcgtctcctgtacttactgatgcgggtattatgaagcaagtcagtattctggctttctatcctgatgaagagtatgaggtgtgggagaatcatcgggacgtgattccctccgggtggataaatggttatgataaggagctgactgttttggacagggaactgtatgacctgaaagctatgccaaccctttatttgcttgataaagataaaaaggtattgctgaaggatgcgccggtggaacaagtggagcaatatttggcccacttgtttggcaggtaattattccgatttttccatcagcattttattgcagaaagtggatggagtggtaccatagaaatcaacaaaatgttttcggaaagtggcaaggtcattgtaacccaccatttcagctatatcttgaactgtgtagcgtcggctgcgcaacagttcggctgcacgtttcagacgtacgccccggataaattcgctgatggtgaaattagtgagtgtctttacccggcggtagagggtgggctgactgatgaccataatgtctgccagctttttcacgttgaaatcggggtttttcatgttttcattgataattctcacgatttctatgatgaacggatcttcgggaaaatgaagccctgcttctcctgttttttcttccggtgatgcttccggctcggaggtgggagtgagaagtcgggtatatatttcttttaattcttcgcggcttttgatgaggcgctttactttagggatattcagtaaatgtctctaaaaaata

SEQ ID NO: 6954 - DNA, 221 bp, Unknown
  gut microbiota DNA sequence
gttagtaactatcggcaagggttgcgctcgttatggcacttaagccgacacctcacggcacgagctgacgacaaccatgcagcaccttcacaaccgctattgctagctatagcgtttccgccatattcggttgcaatttaagcccgggtaaggttcctcgcgtatcatcgaattaaaccacatgttcctccgcttgtgcgggcccccgtcaattcctttga

SEQ ID NO: 6955 - DNA, 78620 bp, Unknown
  gut microbiota DNA sequence
cgtttaccccatcatcgattctaacctaaagaatttgtccattatttccattcgtgactgagaattcgcatcataataaaatcgctgtattcattgttgtagtaatatgcctcttccagaataccttcctgcttgaatccgatttttttgtagaattccagtgcatctgtattcaatcctacgactccgattgagacacgatgcatttcatacctattgaaggccatatcaagcatgatacgaattgcttctgtcccgtatcctttatgctgcatctttggatcgggaatgataatcgtaagatcggtttggtgccatgcaggaaacatccggagcagaccagtctcacctattatattgccgtcgaggtctgtaatcgtgaaccaaaccgagttttccgatttatggtccacattaatacaagtttttacctcttcttcatcggtaggcttctcaaagccgcattgaaacatgacttgcggctgattgaaccaataggcaaaaaatggcgcatcttcttctctttgttcacgcaaaataatccttttccctttcatttctttattcatatgttttcactaacctttcttttattctggtaaaatctcgatttatttataatcatattttaccatacagattttaagctgtcatgtataatttcaatttttatatgcctgccaaagtactctttggtcctggtaaactatagcaaaccaaaataatactgcatacacttgacaacgggtttatgataaagttaaaaggtgattattatgttatacgagcacgtaaattactcatcgaagccgggataagacatacaatgcaaaggaaatcgcagaatgcttttcggtcaatacaagtattgtttaccgtctggaaaagggaatgcgggaaatcagccctgagtcagaatgacatccgaaacttcagattgtgatatgatatcattgtttagggtggtttcgttcgtgtaattatgtgcagtaattgcttggattgctatagttaaagtaggaatataagttgtagagccgtatacgagacccgtacgtacggttcaatgagaggggcaggaaatttattcttcctctctcctattgagaggataagaaaatggagtatttatatacgaagatcagtattatgacaaatataaaaatttttgaatgggattgtgaaacggatgaaatcagttgttatggggtattagcagagcaaagcaatccactgatattatcagaagaacttcgcgaacttctgaaaaatcggatcatgaaccagaaaacaccggtgatttatcaggatgagaataaagtgattttttgtgggatgagagaaaaaatgacgaagatgcttctgctgggaccaatctgtattgaggatatgtcttatgtagagatacaccgatactgtaaagcttatcagatagaaaatgaacagtgtccgcccaaactaaaactgcagaatctgttagctttattggagcttttatcttatataaaaattgaggagaaatacgaagatgaagaaattttggatgcgaatggtctgatcgagaaacaggagattggacttgaagcggatgtaagaatagatatagaggatatatatcatcatacttatcaggaagaagtaaaaacgatggattatattcgtgagggaaatctggaggaggtagtaggggcagtagaattattggcaagtactgcgggaaagctctcggaaaatgagattcgaaacgaaagaaatctggggatttgttcgattacgttggcaacaagagcagcaatcgaaggtggggcagttcctgccaaagcgtataagctcagtgatctttatatcaataagatagaccagtgcaaaagaatgacagaaatttttgaatataggaaaaggagtttgtatgattttgcaaaattggttgtagaagaaagagcgaaaagagcaaactccagatatacggagcagtgtaaggaatatatacggaaatactatcaccagaagatttatatatcggatattgcgaaggcattggggatcagtgaaagccacttatccagaatatttaaaaaagaaacaggggagagtattcaggaatatagtatgcacatgcggattgaaagagctgaaaatctattgaaatattcagaagcatctttaacagagatcagcgagtatctgtgcttttcctctcagagccactttggaaaggtatttaaggtgcataagaatatgacgccgaagcagtacagggattactataaaagtccggaatttgtttcaagagaagaaatttaataaaaatgatggaaatataataaataaagcagaaatatgatatagaaaaaagacgaaagcagatatgatagcatcatcaaatgaaccggccggtcatctaggaaagtacagaggaaaggattgaaatatagtgatgatgaaaggaataggaacaaacagcaaaaaatttatctggcgtcagagaatagggtttggaatttcagattatgcctgcaatctggcatatttaatggtaaacacatatctgcttattttttataccgatgtggcaggaataccagcggcaagcgctgcgtttatgtttttgattacaaaatttattgatgcatttacggattatatggttggagcactggttgaccggaccaacaccaaaatgggacgaaacagaccgtggatgctggcaggtgctccggtacttgcgattggaatggtactagtatttacgacacctgatttttcaacaggtggaaaactggcatgggcgtatattacatatattattttctcttttggatatacgctggtaaatattccgatgggatccattttgccgactttgagtgcagatgccacagaacgtactaaaattgccactacaagaacaattttttcgaaccttggatctttgacatctgcatctatggcattgtggctgattgaaaaactgggacatggaaatcaggcgctgggatatagaaatacaaatattgtgtttgggatcatggtgtttttgatcatgctgatctgtgtggcaagtattcgtgaaatcaatctgccgccaagaacaaatgaaaaaacaagtattatcaaagacattggatatctgataaaaaacaaaccatatatgttaatgattacctatacgttctttttatttttgggatatcttggcatgtttgcagcgattgcatattacttcaagtatattgtgggaaatgagatgatgacttctgtggcagtgacgatcacaacgattgttccgattttttcaatgttgattgcagcacgtctcaatgcaaaatacagtaaaagaaatatctcgattgtgggaactttgattcagattttggggtctttgatcatctggataggcggcagcaatgtagtgattgtattcctgggagtgggaatgatgggattcggaatgggatttcgttccaacatgtatttttctatgctggcagatgtggcagattatggagaatggcagagcggaagaaatcttgcaggaacacagatggcagtcaatggattttccaataaagtttccagtgcatgtgcgagtgcgattgtagcaggtttgcttgcatggggagcttatgacggaacggcggcagtgcagtcatcaaaagcgaatatggcaattctatttgcatttgttattcttccgattattgcaaatatcgcaagtattgttgtgatgtatttctatgatctggataaacagtacgaccagatggaacgtgaattgaaagagcggagaaaaaaactggcagaataaaggatagaaaatctgttttgaaagcggaaaagataaggaggagaagcgtatgtggaagtatgcatatcaagtaccggaaaataaaaaaataagagtgattgttcatacggattgtaaaaatgaggcggatgatcagtttgcgcttgcacaccatctgatgactcccaagtttgatgtgcggggaatcgtagcgggacatttttgtaaaaatccccaggaatacggagaggagaatactgcaaaagcaagctatgatgaagtaatcaggatgatggagctgatggggatagaaggagaatatccggtagctctgggcgcttcaaagggaatggaagacgagcagactccggtagaatcagagggcgccagatttattatcgaagaagctttgaaagtggatgaaagaccattgtatattgcttgtcagggagctgttacggatgtggcatctgctttgctgatctgtccggaaattgcagaaaggattacgattatctggatcggaggagccgcctatccgaatggaggatttgaatttaatctgatgatggatattcatgcggcaaatgtaatttttgcttcaaaagcggaactatggcaaattccaatggatgtatataaacagtttggtgtttcactggcagaattgcagttgaaagtgcatccatgtggaaaagtaggcaaatatttgtttgagcagttagaagaatttaatcataaggcggcagtttacaatatggcatggcctcatggagaagtatgggggctgggagatcaggcgactgtggcagttcttatggaggaactggaaaaagtaagctatgagatgataccggcaccgagagtggctgatgacatgacctatattcacgggcaggattatcgaaagatcaggctttataaaacagcggaagtcagattgacgttagaagacttttttgcaaaactggcgatcaattttggatagtaagggtgagggtaagatgaagaaatatctggtgattgatgcaggcggtacagctgtaaaatatgcgcttatgaatgaaagtgccaagatattggaaagaggcaaatttccgacgccgggatatgtggatcatacgctggaagactttttgcagagactggatgttgttgtagaaaagtatcagaaacaaatagaaggaattgctgtcagtatgccgggaatgttggacagccggaaaggctactgtgtgaccggaggaatgttggcatattttagtgaagttccggtcgtgcaattactggaacaaagatataaacttccggtgacgattgaaaatgacggaaagtgtgcggcacttgcagaaaaatggaaaggtagtctgaaggactgcagaaacggagcggttgtagtgctgggtactggtgtgggcggtgggataatcatagaccacaaattgtacaggggagggcattttacagccggtgaatacagttatatattgacagatcagaaacgatcagaggaagcgaaaggatactggggcatggcaaacggcgcagagacccttgcccaaaaagcagctttttatacaggagaagatccggaaaaattggatgggattcagatctttgatcgtgcaaacaagggagaagaagcggtattgaaagcactgaaagaatttacagatacgctggcagttcaaatttataatttaaatgtgatactggatttggatgtggtggcaattggcggaggaatcagtaaacagccgctgctgctggaatatttgaacagaagcatgaatgaattaatggaacatcatccgattcgtaaaattacaccgtatgttccgaaacctgagataacaaactgtaagttttacaatgatgcaaatttaattggagccttgtatcattatggtgtattaaaagaagggaaagtggaagaataatgtttccgaaaaattttttgtggggaggcgcaacagcagccaatcaatgtgagggtgcatatctggaagatggaaaagggctggatatccaggatgtgacaccaaaaggaattgtgggaccaagaacagaggttccgacagaagataacatgaagctggtggcaatagatttttaccaccgatataaagaagacattaaattgtttgcagagatggggtttaaggtttttcggctgtcaattgcctggagccgcatttttccaatgggagatgaagagcagccaaatgaaaaagggcttgcgttttatgatgcggtatttgacgaatgccacaaatatggaatagagccgttggttacgatttctcactatgagacaccattgcatttatcgaaagaatatgatggatgggtaaaccggaaaatgatcggtttctatgaaaaatatgtcagaacgatttttggcagatataaagagaaagtgaaatactggctgacatttaatgaaattaattcggttttgcatgaaccgtttttgagcggcgggatttatacggaaaaagaaaagttatcgcgccaggatctgtatcaggcagttcatcatgaactggtggcaagtgcactggcaactaaaattgctcatgagatgatgccggaggcaaagattggatgtatggtacttaatattccgatttatcctttgacaccgcatccggatgacatgatagaagtgatggaaagacggcatatgaatgattttttcctggatgtacatgtaagaggtcggtatccgggctatatgaagcgctattttaaagaacataagattcaggtgcagtttgccccggaagatgaggaaattttgaagcataccgtagattttatttcattcagttactatatgagtatctgtgcttctgcagatccggatcagggagaagcaggacggggaaatctgatgggtggtgttatgaatccatatctggaagcttcagaatggggatggcagatcgatccaaaaggtcttcgatatgcactcaatgagatgtatgaccgttatcagaagcctctttttatcgtggaaaacggtcttggtgcggttgatgaactggtagaaggaaaagatggaaaactgacagtggaggatgattaccggattgcctatttgaaagaacatctgttacaggttgaagaagcaatagaggacggagttgaaatcatgggatatacatcatggggatgtattgatctggtaagtgcttctacagcagagttgagaaagcggtacggatatatttatgttgaccgcaatgatgatggaacaggaactttgaaccggtataagaaaaaatcgttctactggtaccagaaagtgattgagagcaatggagaaattcttcatcaggaattaaaataaatagattgcatcccgggcggccgcatgataagatagttctgtaagttatagaaaacagaactttatcatgcagccgcctgtgctgtatcatactcggttataacccagacgttcaaggagttcttccaggtctgttcaagagagtttcccctgtgatggataaaaagaggatattctatggttttatcatctctgttttctgtagaaaaacagtaacgaaaggaggggggcggagtaggatggaaaaaattacttgacaattcaaggagcatataatagtataataaacagaagcgaacaactgttcgggtaaaaaggagaagattcggtatggcaagtgatgaaaagaaaaaagcgctggatgcggcgattgcaaagttagagaaggattttggaaaaggtactgtgatgaagctgggagagggcagtcatgttgctgtagagacggttcctacagggtgtctgagtctcgatctggcactgggacttggcggtgttccaaagggacgtgtgattgaggtttatggtccggagtccagtggtaagacgacagtgacactccacatgatcgcagaagtacaaaagagaggcgggattgcaggatttattgatgcagagcatgcgctggatcctgtttatgcgaagaagatcggagtagatattgatgaattatatatttcacagcccgacagcggagatcaggctctggagattgctgagacgatggtgcgctccggagcagtggatattattgtgattgactctgttgcggccctggtgccaaagcaggagattgaaggagatatgggagacagccatgtcggcctgcaggcgagactgatgtcgcaggcactgcgtaagctgacaccggtcatcagcaaatccaactgtgtggttatctttatcaaccagctccgtgaaaaggtaggcgtaatgtttggaaatccagagacaacgacaggtggacgcgcattgaagttctacgcttctgtccgtatggatgtccgcaggatcgagacgctgaagcagagcggagagatggtcggcaacagaacccgcatcaagatcgtgaagaataagattgcgcctccgtttaaagaggcagagttcgatatcatgtttggaaaaggaatctccaaagaaggagatgttctggatctggcagttggtattgatcttgtcaagaagagtggtgcgtggtatgcatatgaaggagagaagatcggacagggacgtgaaaatgcaaaagcatatctgaccagtcatccggaggtgatggaggagctggacagaaaagtacgccagcactatcatttgatcgaaggagaggaagaggtaaaagagagtgatctgaagctgactccaaaagaagaacagatggaactgtcgatcgagggagaagaataaaaaatggtcgtcacgaaagtagagatgctgaccaagatcaaatataaagtgtatttagatgaggagttcgcctttgtgttatacaagggcgaactgtcgcattaccggattgttgaggggactcttttggaggaggatactgtacaggagattctgcagaaggtgatctgtaaaagagcaaagcttcgtgccatgcatcttctggaggatatggaccgcagcgaatcggcactgcgggagaagctgcgtcagggattgtacccgccggaagcagtggaggcagcgatttcttatgtgaagtctttcggatatctggatgacgcgcggtatgcggaaaattttgtacagagcagaaaggcatccaagagcagacgagagattttatatcagctctgccagaaaggtgtatcaagggaaattgcgcagcaggtcgtagaagagtgctttgacggacaggatgagactgaggcaatccttaagattatcgagaaaaagcgtgtggatctaaggacggctacaccggagcagatgcaaaaattatacggtcatctggcacgaaaaggattccgatatgaagacatccgtcaagtgatacaaaattatgatgagaatgcttgacagggttggtaaaacagtataaaatttaagtgttgtatttatgtatgcagatacataaacatgtacaatgaaaattaaataaggaggtgctcctgtgccggtaattttatgtgtaattattgcggcggccctcgcgttgatagtcggtgtcgtaactcgctatctgaccattaccaatctgaagaacaatgcggaatccaagattggaaatgcggaagcgaaagcaagagaaatcattgacgatgccgtgaaaactgctgaaacgacaaaaaaggaagctcttttggaagtgaaggaagagtccatccggacgaagaatgatcttgaaaaagagacgaaagaaagaaggtcggaactgcagcgctatgaaaagcgtgtgctggcaaaagaagaagcagtagacaaacgttccgaagctattgagcagcgtgaagcaaaatttacagcaaaagaggaacatttaagacagcgtgaagccaaagtggaagaactcagtcagaaacgagtgcaggaactggaaagaatctcaggtcttacctccgagcaggcaaaagaatatctgttgaaaactgttgaagaagatgtgaaacatgaaacagcaaagatggtcagggagctggagtctcaggcaaaagagaacgcagacaagaaagcaaaagagtatgttgtcaatgcgattcagagatgtgcagctgaccatgtagcggagactacgatttcagtcgtgcagcttccaagtgatgagatgaaaggaaggatcatcggacgagagggacgaaacatcagaactcttgagactctgacaggtgtagagcttatcattgatgatacaccggaggcagttgtgttatccggatttgatccgatccgaagagaagttgcccgtattgctcttgaacgcttgatcgtggatggacgtatccatccggcaagaattgaagagatggtggaaaaagcacagaaagaagtagattctatgattcgcgaagaaggagaggcagcagccatcgaggttggtgtaccgggtatccatccggaattgctgcgtctgcttggacgtatgaaattcagaacaagctacggacagaatgcgctgaagcattccatcgaggttgctcagttgtcaggacttctggcaggagagatcgggctggatgtgcgtatggcgaaaagagccggacttctgcacgacatcggtaaatcgatcgatcacgatgtggaaggatctcacattcagattggtgtggatctttgcagaaagtacaaagaatcagcgactgtgatcaatgcagtcgaagcacatcatggcgatgtagagcctcagactttgatcgcctgtgttgtacaggctgcagatacgatctcagcagcaagaccaggtgcaagaagagagacattagagacatatacaaacagattgaaacaattagaagagattgcaaaccagttcaaaggtgttgacaaatcttttgctattcaggcaggtagagagattcgagtaatggtagttccagatcaggtaactgatgatgatatggtacttatggccagagagattgctaatcagattgaatttgaattagagtatcctggtcagatcaaggtaaatgtgatccgcgaatcacgcgtcacggattacgcaaaatagaaaactgaatatgaaatgaaaagcggaatttctgaaacatcgtaagatgggaaaggaagttccgctttttcgtggatgaaaggaagaattgtgtaatgagcgaaaagatcaaacgtctgaagagagaattaaagtataagggagcaatcgtagatttttatcaggatacgatggagatagacggcactcatacggccacatgggattttatcagtcataaaggggctgcagcggttgttcctgtaacagaagatggaaaaattctgatggtgcgccaatatcgaaatgcactggaacgttatacactggaggttccggcaggcgcgctggatgcggcagatgagccgggaattgtatgtgcaggcagagagttggaggaagagactggatttcgcagtgagaatctggaatggctgatcacattgcggacaacagtggctttttgcaatgaacgaattgaggtttttgtagcaagagatctgattccctccagacagcatctggatgaagatgagtttatagatttaaaggcatacacactggaggagttaaaagaaaagattttttccggtgagatagaagattccaagaccattgccgctcttctggcatatgagacgaagtatcgaaaaactgaataaataaaaagtcccggcatataatgaaatatcgaaaggaaaaggagaaaaaccattgaagatgtttcatgtaaagaggcagctactggctctttttatgccgggatttttattgggaattttatatgtcaatctggaagcggagcagtttgcagcgggggcagggattttcagcgaatattttttgaaacaataccgggcggcagatattctgacgggagagtatatctggtatttgctgcaggtccgtcttttgccgtttttagtgctgctgggatctgcttttacaaaattcagaaaagcggcagttattctgttcttgatttggacgggcttttctgccggacttctgttttctatggcagttctcgggatgggagtaaaagggagcatcctgtgcattgcaggaatgctcccccagtttttatgttatattccagcgtatctgattgtggtgtggtatgcgtactgctacccgcgtatgcagtggaatatacagaaaagtctggtttccggaggtcttcttttagttggtatcgtgttagaactgtatgtaaatccggttttggtcggcgcatttttgaaaaccctttaagcagagatgagatgttttaagacaacactgcagcagatgctgactgcaagctggctgatcaataagccccataaatatccctggataccgaaaacgggaattgcgaaaaacacacttccgatgcggatggcaagcccgaccatgttgatcgtaaaagaggttgttgttttgccaaatccgttcaggacactcagcagagaaccatttacatacagaaaaggacagatccacgccagtgtgatgataaaattgccggccagatcactggcaaacaaaaattgaccgatcaactgtccgaagaacaggaaaaacagacagcagaacaatcccatgagaaaacaggagccaagtactttttgcagcagttttctgatgccggatgcctggtctttgacctgaagctcggcaactgtcggcatcagcatgatagaaacagaattggtgatggcggacgggaatagaatacagggaagtgccattccagtcagaacgccataggtactcaatgcttcggaagtgctgtgattataaagtttcagacagccggggatcgaaacagcttcaattccctggagcaggccaagcagtacccggttggcagtaagcggcagggacaaggggacaagttcccggaagcggagtcttatagaagagaaagaaaatcccgggcggaaaatatcagatcggctcttttgaagtcctctgacagaataaaaggtagaaaacagttctccgaatgcaattcccgcagctgcgatggaaatgtccgcatgaagtccgtttcgtatcgcgaagcggtacaggcagaaaacagataagatcctggcagtctgctcgatcaactgtgaaacggcaggtatctgtgtctgttttaaaccatagcagtaccccatgatacaaccatgaatagaagaaagcggcaaagcgtaagataagagaatcaggatctcttcacaacgtggatcgccgagcagcgcagtcgagagatcggctgcgtttttttgcaggatgatcatcgtgatcacagagagcaggcatgaaataaaaagtccgagacaaagtgtctcagaggcttccctgggttgatggagggattgttttctggctacggttctggaaatggcggtctctaatcctgcggatgtaaatgagatgcagagagcaaataccggaaaagtaagctggtataggccgacattttcttctccgaatgtgtggcttaaaaagatacggtaaaaaaatcccatgaaccgacacagaaatcccacggcagtcaggatcagggttccttgtaaaattgtttttctggcagacataaattcacctggaaagaagtgtttttaataacatattcggtattttgccttgacagaacaaaacggcaatggtattctacaagaggaaatcctagtaaaacaatagggattggaaaataagcgaatcagcaagaaggtgagagcgtgaaattatctacaaaaggaagatacggactgcgcgcactgattgatcttgcacagcacggcggggaaggacctgtatcgatcacaagtattgcggaaagacaggaaatttcggagcggtatctggagcagctgatgtcaaaattaaaaaaggcaggtatcatccagagcatccgcggagcacaggggggatatgtccttgcaaaggaactggaagaagtttcggtgggggaggtactccgtgcgctggaaggagatctcaatccggtagaatgttccgggtttctcttagagggcggctgccaggcagcagataactgtgtgacaaagtatgtgtggcagcgaatcaatgacagtatcaatcagaccgtagatgagatgaatttaaaagcactcgtagaagtgggcgagaatctcaaggagagcaaggccgaccagacgtgtgtttccaatagagactgcagaaaataaacaaaaggagaaagaacatgagcagactgatttatttagacaatgcggcaacaacgaaaactgcaccggaagtagtagatgcaatgattccgtactttacagagcactatggcaatccatccagtgtgtatagttttgcttccggaaataaggaagtggtgagcagacaaagagagattattgcgcaggcacttggcgcacaggctaacgaaatctattttacggcaggggggtccgagtctgacaactgggcactgaaagcgactgccgaagcgtatgagaagaaaggaaaacatatcatcacgacaaaaatcgagcaccatgcaatcctgcatacatgtgagtatctggaaaaacagcgtggatttgagatcacatatctagatgtggacgagaacggtgtcgtaaagcttgatgaactgaaaaaagcaattcgtccggatacgatccttatttctgtgatgtttgcaaataatgagatcggaacgatccagccgatccgagaaattggagagattgcacaggaacacaagattttgttccatacagatgcagtacaggcatttggccagataccgattgatgtggatgcctgtcatattgatatgctcagcgcaagcggacataagctcaacggaccgaaaggaatcggatttttatatatccgcaaaggagtcaagatccgatcctttgtacacggaggtgcacaggagagaaagcgccgtgccggaacagaaaacgtgcctggtattgttggaatgggggcagctgtggagcgtgcgatgcggacaatggaaacaagaaccgcaaaagagcgaaaactcagagattacctgatcgagcggattgagacagaaattccatactgccgcttaaacggagaccgcacgaaccggcttccgaataatgtaaacttcagtttccggtttatcgagggagaatctcttttgatcatgctggatatgaagggaatctgtgcatccagtggttctgcctgcacatcagggtctctggatccgtcgcatgtattgctggcgatcggactgccgcacgaaatcgcacatggttctctgcgcatgacactgggagaagagacgaccagagaagatctggattataccgtagatacactcaaagagatcgtggcaaacttaagaagtatgtcaccattatatgaagactttatcaaaaaacagaatgcataataaaaaggagtattgatatgtatacagaaaaagtaatggatcacttccaaaatccaagaaacgtaggagaaattgagaatgcaagcggtgtgggaaccgttggaaatgccaaatgtggggatattatgagaatttatctggacatcgatgagaatcagatcattcgggatgtaaaatttaaaacatttggatgtggagctgcggttgctacaagcagtatggcaacagaactggtcaaaggaaaaagtatttatgaggcgctgcaggtgacgaacaaggcggttatggaggctctggacggacttccgccggtaaaggtacactgttctcttcttgcagaagaggcaattcatgcggcgctctgggattacgcggagaagcatcatattaagatcgaggggctggaaaagccgaaatctgatatccacgaaggcgaggaagaggaagaagaggaatactaaaatgagtaaagttgttgttggaatgtccggaggggtggattcttccgtagcggcataccttttaaaagagcaggggtatgacgtgatcggagtgaccatgcagatctggcaggacgaagaacaggccgctcaggaggaaaacggaggctgctgcggactcagtgcggtagatgatgcaagaagagtggcagctgcactggaaatcccatactatgtgatgaattttaaaaaagagttcaaggaaaatgtgatcgactattttgtggaagaatatcagaatggaagaacgcccaatccctgtattgcctgtaaccggtatgtaaagtgggaatctcttttacaaagaagtctctcgatcggtgcagagtatattgcgacgggacattatgcaagagtggtacagctggaaaacggaagatatactcttcggcgctctgctacgcttgcaaaagatcagacttatgcattgtataatctgacacaggaacagctgaaaaggactttgatgccggtggggaaatacacaaaagacgaggtacgtgccattgcagaaaagatcaatctcaggattgccaacaaaccggacagccaggatatctgctttgtgccggatggcgactatgccgcttatattgaagaagaggcaggggtgaaagttccggaaggaaatttcgtgctcacagacggtacggtgcttggacggcataaagggattacccattatacggtagggcagagaaaaggtctgggtctggcacttggatatcccgcatttgttttggagatccgtccggaaaccaatgaagttgtgatcgggacaaaagaagaatccatgactacacagcttcgagccagaaatctgaattttatggcagtggaagatttaaccgagcctttacatgtatttaccaaaatacgctataaccacaaaggcgcctggtgtacaatagagaagacgggagaggatgaagtactgtgtacctttgatgaaccacaaagagcggtcactcccggacaggctgttgtattttatgatggagagtatgtgctcggcggaggaacgattcaatgataacaagtgattctcatatgcatacaagattttccacggacagtgatgcagatatccgggatatgatcgagagtgcgctcaaaaaaggattgcagtccatttgtattaccgatcatattgacaaagattatccgtttcatgaagataccggtgtagaggcatttctggtggatctggatgagtattttccgaagctggcagagtggaaagaggcatatgcggagaaaattcagatccggagagggattgagctggggctgcagcctcatcttgcgggattttatgaagaactgacgaatcagtatccgtttgattttgtgatcggttcagttcatgtggtgcatgggatggatccctattacggagagatttttgagggacggtctgatgaagaagtttacaaagagacttttctggctaccctggaaaatctggatgcagtcagcagttttgatgtgctgggtcatctggattatgtggtacgttatggaaagtgtcaggccaggcagtattcttacaaaaaatatgcacaggagattgatgaaatcctgaaaaaagtgattgcaatgggaaaaggaatcgagctgaatacggccggatggaaatacggccttgcattctgccacccccatccggaaattctctgccggtataaagaactgggcggggaaatcatcacagtaggatctgatgcgcataagcccgagcatgtggcttatgattttcagaaagcagcagacgttttgaaggcgtgcggctttaaatattatacagaatttcaggacagaaaacctatttttaaacaacttctataaaaatatattttagggttgaatttttgttttcattttagtacaataaccgtagttgatgaatctttaacaaagtaattacttggttggagatttacaataaacagctgcaaagcagcaacaatttttttaaactttaggaggaattaatcatggcagtaaaagtagcgattaatggatttggacgtattggacgtctcgcattcagacagatgttcggagcagaaggatatgaagtagttgcaatcaacgacttaacatctccaaaaatgttagcacacctgttgaaatatgactctacacagggaaaatatgaactggctgacaaagtagaagctggtgaagattctatcacagtagacggaaaagaaatcaaaatctatgcaaaagctgacgctaaagaacttccatggggagaaatcggcgtagacgtagttctggagtgtacaggattctacacatctaaagcaaaagctcaggcacacatcgatgcaggtgctaagaaagtagttatctctgctccagcaggaaacgatcttccaacaatcgtatacaatgtaaaccacgagcagctgacaaaagatgatcacatcatttctgcagcttcttgtacaacaaactgcttggctccaatggcaaaagctctgaacgaccttgcagcagttaaatctggtatcatgtgcacaatccacgcttacacaggagatcagatgacacttgacggaccacagagaaaaggtgacttaagaagatctcgtgcagcagcttgcaacatcgttccaaacagcacaggtgcagcaaaagcaatcggtctggttatcccagaactgaacggaaaactcatcggatctgctcagcgtgttccaacaccaacaggatctacaacaatccttacagcagtagttgaaggaaacgtaacagttgatcagatcaacgaagctatgaaagcagcatctaacgaatctttcggatacaacacagatgagatcgtatccagcgatatcgtaggaatgagatttggatctttattcgatgctacacagacaatggctcttccattagacaatggaacaacagaagtacaggttgtttcttggtatgacaacgaaaactcttacacaagccagatggtaagaacaatcaaacacttcggaacattactgtaagtcgaaatatagaaaaatttaatcagttagattatatttttgaaaaataggctcacaaagggtccggtcttatttggaccggacctttttgtctgacagaaaataaacacagggaggcaatcaaaatgcttaacaaaaaatcagtagatgatatcaatgtaaaaggaaaaagagtgcttgtaagatgtgactttaacgtgccgttgatcgatggtaagatcacagacgaaaaccgtctggtagcagctcttccaacaattaaaaaattagttgcagacggaggaaaagtaatcctttgctcacaccttggaaaaccgaagggagagccaaaaccggaattatctcttgcaccggtagcagtaagattgtcagaacttctcggacaggaagtaaaatttgcagcagatgctgaagtagtaggcgagaatgcaaaagcagcagtggcagcaatgaacgatggagatatcgtacttcttgagaatacacgttacagagcagaagagacaaagaacggagaagcattctccaaagaactggcttctttatgtgatgtgttcgtaaacgatgcattcggaacagctcacagagcacactgctctaacgttggtgtgacacagttcgtagacacagcagttgtcggatacttaatgcagaaagaaatcgacttccttggaaacgcagtagaaaatccggagagaccattcgttgcaatccttggaggatctaaagtttccagcaagatttctgtaatcaacaacctgcttgaaaaagtagatacactgatcatcggtggtggaatgtgcttcacatttacaaaagctcagggtggaaatgtcggaaaatctcttctggaagaagattacttacagtacgcactggatatgattgaaaaagcaaaagaaaaaggtgtaaaattactccttcctgtagatgctgttgcagcagatgaattctctaatgatgcaaacatcaaggttgttcctcagaatgaaatcccagaaggatggatggggctggatatcggacctgagacagcaaaattatatgctgaagcagtaaaatctgcaaaaacagttgtatggaacggaccaatgggatgtttcgaaatgccaaactttgcaaacggaacagaaacagttgcaaaagcactttctgagacagatgctgtgacaatcatcggtggtggagattccgcagcagctgtaaaccagttaggatacggagacaagatgacacacatctctacaggtggtggagcatctctggaattccttgaaggaaaagaactcccgggagtagcagcagctaacgataagtaaaaagcttagcgtttacttagttctccgcacttggcgaggtattttcgagcctagtaaggagaacatcccgtaaaggaagcttagcgaaaacaagcaaagcttagtgaaaacaagccgcaggcgcagtttggaataaacagtgtacataacagtacaggaaagagtgaagagtatgtcaagaaagaaaattatcgcaggaaactggaaaatgaacaaaactccaagcgaagcagttgcattagtagaagagttaaaaccactggtagcaaatgaagaagtagatgttgtattctgtgtaccggctatcgatatcgtaccggttgtagaagccgtaaaaggaacaaacatccaggttggagcagaaaacatgtacttcgaagagagcggagcttacacaggagagatctctccggctatgctcgtagatgcaggagtaaaatacgttgtacttggacattctgagagaagagattacttcggtgagacaaacgaagatgtcaacaaaaaagtcctgaaagcatttgagcacggtattacaccgatcatgtgctgtggagagactctggagcagagagaacagggcgtaacaatggatttcattcgccagcaggtaaaagttggattccagaatgtaacagctgatcaggcaaaaactgcagtgatcgcttatgagccaatctgggcaatcggaacaggaaaaacagctacaacagagcaggctcaggaagtttgcaaaggaatccgtgagtgcatcgctgaagtttatgatgaagctacagcagaagcaattcgcattcagtacggcggatctgtaaacgctgcaacagctcctgaattatttgcacagccggatattgatggaggactcgtaggtggagcttctcttaaagctgatttcggacagattgtcaactacaaatagaaatcgcatttgccgatcatttacaaattaaggtgtgggcatgaccttttggttgcgcctgcacctctttcatttcccgttcgagagagtaaattttgaggaggtacaaatttcatgaatcagaaagaagcggttcacgaacgattaaaagaatatgcgtgtgtcgcacctgatcagatgatgcagaagcttcagatcaatgcagaggggattacgcaggaagaggcaatcatccggcgacagaaatatggaaataatgcgccgtctgcaaagaataaggatacgatgttttattgtattcgaagagcttttgtgaatccattttctacgatcctgtttttccttggtttaatctctttggtaacagatgtatttttgtccagtgattatcagaagaatctgacagcggtcctgatcattttttccatgctgattctcagtggaattgtccggctgactcaggagctgcattctaaacgagttgcagatgaactgtttcagttggtgcatacaacggttcaggtactcagagatggacaatgggtggagttatcttcttctgaattggtagttggcgatcagatccgcttagaggcaggcgacagggttccggcagatttgcggttaacaggcgcgacggatttgtttgtttcgcaatcagtgatcaccggtgaaagtgccatactcgaaaaatttccggaggctttgcccaaagaaccgcagaaactgacagattacagcaatatactgttcggaggcacgacagttgcaggaggaacgggaactgggattgtcctgacagttggtcaggagacagtttacggtggtctgactccgtctgtggaggcacgcaagcagagatttgaccgtggtgccaattcgatcgcatgggtgttgatccgatttatgacagttttagtcccggttgtgtttcttgcaagcggactgacgaagggagactggttagaagcgtttttatttgcactttctgttgcagtcggaatcacaccggagctgcttccgatggtggtcaacgcctgtctggcaaaaggcagtcattcgatgggaaagaaacagacaatcgtaaaaaatatcaatgcgatgcagagttttggaagcatggatgtcctgtgtgtggataaaacaggaacattgacccaggatacagtcctgctggagtattacatggatattctcgggaatgagagtcagaaggtgctggattatgcatatctggcaagtcattattctaccggagtgggaaatcatctggacgaggcgatctgcaaggcggagaaaatgcagggaaaagcagattactacaggcagctgacagaaaaatatcaaaagacagatgaacttcctttcgactataaccgacgtttttccagtgtattattgaatacgggagaagaaaatatctggatcatcaagggaagtattgaggaagttgcgaggcagtgcagcatgatagaataccgtggagagaaaacagcggcaggtgcggatatcctgcaaaatgttcacgctgtggttgatgaaatgctggaagacgggatgaaggtaattgcagttgcctataaaacaatgagcagagcagcccttgttcccgaggaagagcatgactttattctgttggggtatctggcattttttgatgcgccaaagaagagtgccgcaagtgcaattcagaagcttcacagtcttcatgtgaatgtaaaggtgctgacaggagatcaaaaacaagtggcacgatccatttgcaggcgtatcggaattccaacagagagttgtctgacaggagcacagctggatgctctttctgaaaatgaattgcccatagcggttgagaaaacaaatatttttgcagaactctcgccaaaacagaaagccatgctggtggaaacgctgcagacaaacgggcatacagttggatttctgggagacggtctgaatgatctgccggctgttatccgggcagatgtggggatttccgttgaaaatgcaacagaagcggtgcgggagagtgcgaatgtcatcctgctgaaaaaggatctgaatgtgctggaagaaggtgttttagagggaagagaagcatttgccaatatgctcaaatacattaagattacggcatcttctaattttggcaatatttgtgcgattgttgcagccagcgtgttactgccgtttttcccgatgacttccatacagctgctgcttctgaacctgctgtatgatatcctttgtctgattttaccgtgggatcatgtagatgcagatctgttgacaaaaccgttggagtggtctggcaggacactgggaaaattcatgaccttttttggaccggtcagttcgctgtttgatctgctgacctttgtgtttttgtattttgttctttgtccgggagtgtgcgacggctcttttggaagtctttcggcggagaagcagagcttgtttatttccatgtttcagacagggtggtttttagaatccatgtggacacaggtattgattctgcagcttctgcgtacaaaacagcttccgctgatacaaagcagaccggggcgtatggtcacgggagttacgattctggggattgtattatttacactgctgccggttactccggtagggaagatgcttggaatgactgcgatgtctcctgtctattttctgtttttggtcgcagatgtgattgcgtatcttctgttggtcacactggcaaaagcattctatatcaaaaagaatcaggatctgatctgagaaaggaggagccggaatatgaaaaaaaatattggttatgtgaatctggattcctccattgctctgtggcttatggagcatctgccacccggtgaattgaaaaacggaatcgaagatttgctgaataaagaatgcagttctcttatattggaatcagatacggatgaattatctgtgtgggatcattcggtcatccgctgcggtacgctggaaatttatccgaaatctcgcaaggtggagcaaaacggaacagagatttctctcacgccgaaggaatttgatatccttttgtttcttgcgcgcaatcgtggggaagtctttacaaaggaacagatctatcaggctgtgtgggatggagaatatttgatggatgacagcaatattatggcttttattcgtaagatccgtaaaaagatcgaacccaatccggatgctccggagtatatagtaacgatatggggaatcggatacaaattcagtgacaggctgtaacagtaacaattcttgctaaatcgcaagaaaatcgcaaggttttgactatgtgattttctatgcgatttttttatactttaattaaacccgtatttgcgggttcttatcgatatattacatgaatggatggaggtgagaaaaatggattctgacggtagtacgcagatttacaggcagatgtttatagaaagagagagggcagaatctgtttttctccctgaaatataaggatcttgcctcaaaaagaaggaggtatagaccgatgaataagaaaataaatcgtatagaagttcgtcagacagcacagaaagctgccattcgagatgagcagaatcgccgcattcagtttgcggcaacacatcctacacaggaaacgttaggatatctgaacacaacactctgtggactggaaccgggaaaagtagaggaaaaccgttcagaatatggttccaataaagtgactcgtgaaaaaaagaaaactctgccgcagagactggctggtgcatttatcaacccgttcactgcgattttgttttgtctggcgctggtttcatcctttacggatatgatttttccacatttctctctgtttggctgtgtgccaaaggattttgactgtctgacggtcgtcattattttgacgatggtatttttatccggaacgcttcgttttgtacaggaaagcagaagcggcaatgcggctgaaaaactgcttgcaatgatcacaacgacttgtactgtaacccgcaaaggtcaggaaatggcagaaattccgctggatgaggtggtagtgggggatattgttcacctgtctgcaggggacatgctgcctgcagatgtgcggattctggatgcaaaggatttatttgtcagccaggcaagcctgacaggagagagcgagcccattgaaaagataccgatggtcaatgagaccagggatgcaattacggattacactaatattgcgtttatgggcagcaatgtcatttccggaagtgcgtcagcagtcgttgttacagtcggggatcatacactgtttggttccatggcctcagaagtggcgcatgaagcagtggaaacaagcttcagcaaaggagtcaacgcggtatcgtgggtgctgatccggtttatgctggttatggttccgctggtatttgtggcaaatggtattacaaaaggcgactggctctctgcctttttatttggaatttccattgcagtgggactgacgccggaaatgctgccgatgatcgtaactacttgtcttgcgaaaggtgctgtgtccatgagcaagaagcagacgatcgtcaaaaatctgaattctattcaaaattttggtgcgatcgacattctgtgtacagacaaaacaggaacactgacacaggataaagttgttctcgaatatcatttaaatgtaaatggagaggatgaccttcgtgtgctcaggcatgcgtatctgaacagttacttccagacaggatataagaatctgatggatgtggcgatcatccagaaaacagaagaggaagaagcggatgatccacagcttgttgatctgtccgagcactatgtaaaagtggatgagattccctttgatttcgctcgccgcagactgacgacggttgtacagaatcgggatggaaagacgcagatggtgacaaagggagcggtagaagagatgctttctatctgctcttttgcggagtgtgacggaaaagtgcggccaatgacaaaggaattaaaaagccgtatccttgcaacagtagatgatctcaatgagaaaggatttcgtgtgctggcaatcgcacagaaaagcaatccgtctccggcaggtgcattcggtgtaacggatgagtgtgatatggtgcttatgggatatcttgcatttcttgatccgccgaaagagtctactgcggatgcgatcaaggctttaaaagcccatggtgtgacaacgaagattttgaccggggacaacgataaagtcactcgtacaatctgtaagcaggtagggcttaaggtaagaaatatgctgcttggttccgatctggagaacatgagtgatcaggaattggcaaaagcagcagaaactacagatgtttttgcaaagctgacaccggatcagaaagcgagagtggtgtctgtatttcgtgaaaatggccatacagtcggctttatgggagatggtattaacgatgcttcggcaatgaaatccgcagacattggaatttctgttgatacagcagtagatgtggcgaaagaatccgcagatattgtgctgctggaaaaagatctgatggttctggaagaaggaattattgaaggacgcaagacatatgcaaatatgatcaagtacatcaagatgacggcaagctctaactttggaaacatgttttccgtattggcggcatcggcactgcttccgtttttgccgatggaaagcctgcagctgatctttttgaatctgatctatgacctttcctgtactgcaattccatgggataatgtggacgaagagtttatttctgtaccccgcaaatgggatgcgtccagtgtgggcagctttatgatgtggatcggaccgacaagttcggtttttgactggatgacttatatttttatgtactttgtattttgtccgctctttgtttccaggggagtgctgtacaatgatcttgccagtcattttgccggcgcagatttggtacggatgcagacggcttatgttgcaatgtttcagacgggatggtttatcgaatctatgtggagccagactctggtcatccatatgatccgcacaccaaaacttccgtttattcaaagccatgcatctgcaccactgacgctgatgacatttacaggaatcggagtgctgacgatcattccatttactacatttggcagaatgttgggatttgtggcactgccgacggcatattttgcgtatctgattccgtgcatcctgctttatatggtgctggcaacaagtttgaaaaaagcatatgtgcgtcattatggagaattgctgtaaaaggaggaatgaaggatgaactggacaaatctttggataaaattatttggaacaacgaagtttatgggactcgatatgggattctgggtatcgattgcagttgtgatcgtggttgtgatccttatgaatgtaatattctggaatatggagctgacagaaaaataaaggataaaatatttccctcaaaaatcagaaaataaatgacggtacagctttcaaatggtataatcaaatcatatgatccaaaggaagcgtgagtgaaaagagagggtggttatccatgcgtatgaaagagaaaaaggtacttctgtttctggctctgatgtttctgtgcatatgcagtcccatgagagcagaggcaagagcaggaggagccagcggcggttcttccggaggcggaggaggctttagttccggaggcggcagttattacagttcgcattccaaccgtaccggcagaagttccagtccggtaagcagtgttgtcatgtttgggggatttttcctgatggcgaatgcgggagtcgtactgttttttgtcaaatccagaagggcatcttccaaaagctaccgggagatgaggcagtatcagcagtttggggacaactgggatatcaatgagatccaggagcaggtgaagaatgcatattttgtgatccaggaatgctggaagcgtcaggatccggattatgcaaaggactatatgagtcagaaatgttacgatgattttgtaatgaagctggggtggatgcaggttcgaaatgaagttccggtgcagaaaaatgaacggcttttaagtgcggtgccggtacatacatttgacgatctggggaaagatcaggattatatctggtatttgatccacggaaaaatgatcgattatgtggtggatgaaaagacgggaaggatgatacgcggaagcaggaaaaatgaagcgttctatgaatactggaaatttattcacctgaacggacactgggttctggatgaaatcaggcagaaggatgaaatggatatcgatgagtttgcaaattcataagaaagatatttgcaaaatcagggaaaaacggttacaatagtctacggaatgaaagaggtaaattccatacaggaattacaaattcacagataaagtaaaaggagatatggacatgagtaaaaaaccaaccgtattgatgatcttagatggatatggactgaatgatacaacaaaaggaaatgctgtggcagaaggaaagactccggtcatggataaactgatggcagagtatccgtttgtaaaaggaaatgcaagtggaatggcagtcggacttccggaaggtcagatgggaaactctgaggtaggacatctgaacatgggagcaggacgcatcatttaccaggaactgacaaagatcacaaaagcgatcgaagatggagatttctttgagaatcaggcgctgcttgcagcatgcaaaaatgcaaaagagaacaatacagctcttcatatgatgggactggtttctgacggtggtgtacacagccataacggacatatttacggactcctggagcttgcaaagagacagggtgtagaaaaagtgtatgtacactgtttcctggacggacgtgacactccgccggcatccggaaaagaatatgtagaagctctggaagcaaaaatgaaagaaatcggtatcggagaagtggcatctgtcagcggacgttactatgcaatggacagagataaccgctgggatcgtgtggagagagcttacaatgcactggtaaaaggagaaggcgtacaggcagaatctgcgacagcagggattcaggcttcttacgatgcagataagacagatgagttcgtagaaccaatggtgatcgtaaaagacggtgcaccggtggcaactgtaaaagatggagattctgtgatcttcttcaacttccgcccagaccgtgcaagagagatcacaagaacattctgtgatgataactttgaaggatttgacagaggagagagagtcaagacaacatttgtatgctttacagagtatgatgtgacgatccagaataagcaggtagcatttgtaaaagaagagatcacaaatacattcggtgaatttctggcagcacacaacatgacacaggctcgtattgcagagactgaaaaatatgcacatgtaacattcttcttcaacggtggagtagaagaaccaaacaagggagaagacagaatccttgtaaaatctccaaaagtggcaacttacgatctgaaaccggagatgagtgcatatgaagtatgcgataagctggtagatgcgatcaaatctgacaaatatgatgtgatcattatcaattttgcaaatccggatatggtcggacatactggagtagaagatgcagcgatcaaagcgatcgaagcagtggatgagtgtgtaggaaaagcagtggatgcactgaaagaagtggacggacagatgttcatctgtgcagatcatggaaatgcagaacagctgatcgatgagacaacaggtgagccgtttacggcacatacaacaaatccggtaccgtttattcttgtgaatgctgatccggcttacaaactgagagaaggcggatgcctggcagacatcgctcctacactgatcgagctgatgggaatggagcagccaaaagaaatgacaggaaaatctctgcttgtaaaataatcgcagagaacaggttgtttcaacaggaatagaaatacagggaagatacagcaggcagaggtttggaattttttcgggcttctgcctgctttgtaagaaaggcatattatgagagagaaactgacccaaagtgatgtcaaaaagattcagcaggagattgaacacagaaagctggtagagcgcaaagaactcattgaagcggtcaaagaggcacgctctcacggggatctgagcgaaaattttgaataccatgcggcgaaaaaagagaagaacagaaatgaaagccggatccgttatctggagagaatgttaaagactgcagttattgtagaggaccattccggtgcagatgaagttggattaaacaataccgttcaggtatactgtgaggatgatgacgagctggagacgtaccggatcgtaacttcagtgagaggaagctccctaaacggactgatcagcattgaatcaccgatcggtaaagcccttttgggacacaaagtaggcgatcgggtatttgtcaaagtaaatgatgagttcggttattatgtagtgatcaaaaaaatagagaatacacaggatgaagatgcagacaagatccgcagcttttagaaggaggagaacatggcatatcagtatgaacttgtcctgtttgatctggacggaacgttgacagattccggtctcggaatcatgaacagtgtccagtatgcattgaaaaaaatcggcaggggcgtagaaaatctggaagagcttaaatgcttcgtgggaccgccgcttgcacagcagtttgcaaaattctgcgggttttcagatgaaaaagggcatcagatggtagaattttaccgggaatattacgaaggaaaagggatgcttgaaaatgctgtttatgatggcatcccggaagtactggaacagttaaaaaatgcgggaatccgtctggcagttgcgacatccaagccggagaaatatgcaaggaagattgcagagcattttaagatcgcgccatattttgagtttatcggaggggcaaatatggacggaagccgtacgaaaaaggcagaagtcattgagtatgtgctgaaaaactgtaaagtagaagacaggcagtcggtgctgatggtcggtgacagagaacatgatatcttgggagcaaaggcatgcaaagtgtctgcattgggagtcttatatggctatggtgacagagcggagcttgaagatgcaggcgctgactggatcgtgagtacgccggcaaagattacggaaaaaatactgggaagggaatgaactggtcagtttaacaaaaaattttgtcagaacccggtatagatttaacataacatccttacaataaatgttggataagaacatgagaaaaagattgtgaggaatcaatatgtatacaagattatggaaactgatcacaaaacacatggaagaaaattccagaatggcagtgtttctgacttctgcaatgctgatctggacaattggaattacgatggcaggaattttggtctgtatcatcaagcatatgaatgtgatatgcaggctgagtgatctgatctgtgccggaatctatgcaggactggtctttgggctttttggcggcggatgctttttatggaatcacagaaatcatttatataaacaataagagcgaggcttatagatgagaagaatggactttacaacggagcatgtagaatcatttcagccgggagagacatatgaggtgacggagtgcgtacttccgtcctcctattattatgtgctggaacatgctctgggtatcagtaaaaattttaagaatgcggagcgtttaaagacaacgacaggaacagttgtggatacgagaaaaacgtcacgttttgattttgtaatcttggaatttgacgagtaatgcagtataataacagaagaaaaatccaaacgaggtgataagaatgaacccagaaagaattgaagcaatgtgcggtggaaagggacatgtgctgatcaagcatattctcggagaaaaagagatgaatggaaagtgcgggctttacgcggaagtgactctggagccggggtgttcccttggttaccatgaacatcatggagaaagtgagacgtattacatcctgaccggagagggcaattatgacgacaatggaagaatccgcccggtaaaagccggtgatgtgacatttacaccggatggatgcggacatgcactgaccaataccggtgatacagatcttgtgttcatggcactgatcattaaagactgatgaaaaagacagtcattcccaaaagaacaggaatgactgtctttttttatgctttctgatcaagaagacatcgccggttatatacaagatgcagatacatggcatctttggcgcgcagcgtatcgtgtgctgcgattgcatcggtgatctcccggtgtgtttcaatcgtttcatgtaaaagccgattgtttgtcagttggataaaaagcgggatcgagctgttgattacgggaatcagccgcggaacgaccagatttttactgctcatggcaatggcagtgtgaaactcaatgtcctttccagtgtgatcttccccacgaaggaggagtgcttcgacttcatcacacagcgtagagatcttgcggatatcggtctcttcggcatgcagggctgccatttcggcaatggcaggctccagcagaaaacgaacatccagaagatccagtgtcagctttttcttgtcatcaataaaggtaaatccaagcggatcgtcaacaactccgggggaggcggcaacatatgttccggaaccctgacggattgttacaatatttctggatgcgagcagtttcatggcttcccggatggagcttcgtccggctcccattttttcagagagaacggattcgttgggaagtttgtcgttgggctggagctgctcttctaaaatataggcaatgatatcgtcagataacttctcaggtaaactcttttcagttgaattcatcatatgacttttcctcttttctacaaatataacgcaataaatataggataaaataagaaaaaacaaatgtcaaacaataaaaacacacaaaaaacaagtaaataaattgtgaaatattacgggttgattttctggtttaaagattttagaataaagtcatcagatgaattcaaagcatttgaaagaaaatctttggaaaaaggagaaaaagtaacaaaatggtcagatgtattaaacaaggaaaacatatgatgaatgtaagggggaagggaagatgacagaaccagtattttatgcagatccgatgcgcttattgatcgcatccgtagcaggaattcttttattgttatttttgatcatcaagctgaagcttcatccggtaatttctatgatgatttccgctgtactgatcggaattggtgcaggcatgccgttacatatgatcggggagacggtagaaaagggcgtaggaaagacattgcagggaattgcacttttgatcggattgggatccatgtttggcggaattcttgaagtcagcggaggagcccagcagatggcacagacgctgatccgcagattcggtcagaaaaaagcaggatgggcattggggcttacggggcttgtgctcggtacaaccgtattttttgaagccggagtcgtgatcctgattccgctggcgttcaatgtggcaaagcagacaaaaaaatcaacgttatattacgcgatccctcttttggcagggctggcatccggatatgcgtttgttccgccgtcagcaggttctgttctggttgcaaacgcactgggtgtgaatctggggacgatgatggcggtcggaattccggttgcactgatttccacagtagttgcaggaattatctggggaaaaatcataggaaataaaatctataccaaactccctgcgaatgtagaggaaattgcagatatagataaaaatcttccatccttcgggattgtattcacgatcattttaattccgcttattctgatcttgttcagcacgatctccggatatcttccgattccggaaagtgcgcagtcagttcttcagtttttaggagaaccgtttgtggcattgacgatcgcaactctgacagcaatgtacatgctgggaacaagaatgggatataacagagaccagctgaaaaagattctggatcactccttaagaccggttggaatgattctgcttgtaatcgcaagtggcggagtgattcgctggatgctgcaggattcgggacttggaaatatcattggaccgatcctggaaaagagcgggatgccgctgatcgtgatcgcatttctcattgcgtttctggtacgtgcttctgtgggaagttcaatcgtagcaatgacgatggcttccgggatcatggcgtcaatgccggctatggcagacagctctacactgtacagagcagcgatgtgctgtgcgatctgtggcggagcgacggcactgagtcatgtaaatgatgccggattctggctggtaagtacatttttggagattgatgagaagacaacattaaaatcatggacgatcatggaaacattgatcggaatcacaggtctgattctgggactggtgatctcgatcttcgcataataaaggaggagcgtatatgaagatcatacccgtgtatttgagagacatgcaggatgcaaaacatcttgtgcaggcggcagaagcctgcaaaaaagaagtagatctgctctgcggacgttatgtggtggatgcaaaatcaatgctgggtgtgtttagccttccttgctttgacgatgtaaaaatgcgggtggaggacgaagatgcaaaaattttgattcaatatttggaacagggaaatgttatcagaatggaggaaaattaagatggaactgacaagtcagaaattaagaaaaatcgcaccggagctggatcctttgagattgggaacaggatggaagctggaggatctctccaaaccacagatcatgattgaaagtacattcggagacagtcatccgggaagcggacatcttctggatctggtcgaagaggcaagacagggtgttgcagaggcaggtggtttcggagctcgttatttctgtacggatatctgtgatggagaagcacagggacatgatggaatcaactattcactgccgtccagagatatgatggcaaatatgattgaaattcatgcaaatgcaactccgtttgatggtggagtatttattgcaagctgtgataaaggaatgccggcacatttgatggcggtaggaagaatcaatattccgtctattatcgtgacaggcggtgtgatggatgcaggtccggatcttcttacactggagcagattggaaagtacaatgcaatgtgtgaacgtggagagatcacaaaagaaaagatggaattttacaaacataatgcatgtccatcctgcggagcctgctcgttcatgggaacagcatccacaatgcaggtaatggcagaagcgctgggactgatgctcccgggaagtgcactgatgccggcaaccagcaaggatttaagagagtttgcaaaaaaagccggaaaacaggcagtctggctggcagagcataacctgactccggacaagatcgtaacgatgaagtccttcgaaaatgcaatcatggtacatgcggcaatttccggttctaccaattctctgttacatattccggcaattgccaaggaatttggaattgagattgacggagatacatttgaccgtctgcacagaggcgcacactatctgctcaacatccgtccggcaggagaatggccggcacagttcttctattatgcaggaggggttccgacgatcatggaagagatcaaggatatgctgcatctggatgttatgacagtgacaggaaaaacactgggagaaaacctggaagagctgaagaaaaatggattctacgataaatgccagagttacctggatcagtggaatttaaagagggaagatgtgatccggccgtttgacagaccattcggaacagatggaagcattgcgatcctcaaaggaaatctggcaccggatggagcagttgtaaaacacacggtagtgccaaaagagatgtttgaagcagttcttcgggcgagaccgtttgactgtgaggaagatgcgatccatgcagtactgacacatgagattcagccgggcgatgcggtgatcatccgttatgaaggtccaaaaggaagcggaatgccggaaatgttttacacgacagaagcaattgcatcagatgcaacgcttggtgcaagtattgcacttctgacagacggtagattttccggagcatccaaaggtcctgcaatcggacatatctctccggaagcagcacagggcggaccgattgccctggtggaagaaaatgatctgatcgagatcagcatttcaaacagggttcttcgaatcgtgggagtaaatggtgagagaaaatcagaggaagaaatggaagcaatcttaaaagaaagaaaaagccgctggcagccaagagaaaacaaatatacaaaaggtgttttaaagcagtttgcggaaaaggctgtgtctccgatgaagggcggttatatggaataggagctgctggaaacagtgacgaataggatccggatagggataccagagatgaatttctgtgcaaaagagttcatctctggtatttttgtgatataatgatgaaatccggcatgatcacaagtcggaaatgacagcaaaggagaacattggtgagatgttgaattatattcgtttttcgaccagaaaaggcgaaaacaagacattgatagagattcgtactgcgaaagactgcaggctggatgcagtgatagagagtgtgtcctatccattttttgaatgcgcgtattcactgaccgcagagcatggagaagagtggcttctgaggattgcagatttacatatggaaaactggaaagaggtctatatgccgtcagatgctatgcctgatgaagatgatgagaactgggaagtggcatattgtgaacagggcgagaaggagaaaaaatctgtgggacgcggcgtttatccggataactggaaagaatttttgaagatcatggatgagatcgtgccaacttccattcccggacagattaataaaatcactttggaatatcagagaaatgtccggttcacgcagaaaaatgaagagggaactcaaaatgagactgtcaactgggattataaagaagaaatgatcctggaccggtatgaggaaactctgacgatccgtcaggtgatcgctccggggcgggaattgaccaaagaatatcatatgcgggatgagattccggagctgatggataagtgcatggaatatcttggaaaactgaaaagtacctccggtcagcaggagccggacagtgcagcatttaagctttccctggaatgcggtgcaagtaccagccgcgtggtgacaggaacatataaccggagaggacttccggaaggatgggatgcatttatccgggagatcgcgggatacatccggttttatgaaagctatgaagatattctgaatccttatatttatcgtcgtggaagacgtcagggagaacagattatctgcagcgtggtctttcatgaaaaaggagagaagcatccgtatctgacagaggatgaacatctggaagtgggagataaagtgctggttcaggcagggccgtacaaacaggagcttcccggcaagatcgtgtcaattgattattatcgaaaagaagatctgccggaagaaatgggagatattggtgagattttgaaaaaaatcgaagagtaaatgtagtaataaaatacgaaagataagtggagaaacatagatgaactattcaatgatggagttggtatggctgcttttgatctactcttttctgggatgggtggtcgaaacgattgtcggcacagtgaaaaagaaaaagtttgtaaaccgtggattttcgacaggtccgttctgtctggtgtatggaaccgcagcagtatttatggcagtcacgatggaagaactgatggcagagcctgtctttcagctgatcggctgtggagtgcttgcaacgatcatagagtggatggcaggaaaaatcctggagcgcttaaatcagcacaaatggtgggactattcgaacaagaaatggaattttgacggatacatctgcctacagtattctgtattatgggcagtgctcggatttgtggctgtacggtatggagatgctttttttctgatagtatatcacatgattccgacgctgatccgggagattctgctctggattttgctagcaggaatggctctggatatttctgcatcgctggcagcagtatttcatatccggaaagagatgccgactgcaatccggtggaataagaaagtagcagtatggacgcagaaatttgcattaatgatcgtgggtcatgtagaaaaacgaatggcgaaggcatatcctgtgatcatggaaaagacagagcagatagaaaaagaagggaactttgcagaagggtgcgggttttataaactattctggctgtttttgatcggagcagtgcttggagactttacagagacgatcttctgtcgtctgacagccggagtatggatgagcaggagcagccttgtatggggaccgttcagtattgtatgggggctggcgattgccattgcaacggcacttttatacaaggacagagaaaagccggaccggcatatttttattgtaggtacatttttaggcggagcatatgaatatgtctgcagtgtatttacagagattgtgtttggaaaagtattctgggactacagtaagattccgtttaacctgggtgggcgtatcaatctgttgtactgctttttctgggggatcgcagcggtgatctggatcaaggtattgtatccgaaatttgcaggatggattgaaaagattccgatgctctggggatatgtgctgacctggattctggttgtgtttatggcagtgaatattctggtatctatggcggcactggtgcgctatgatatgcgtgccaatggaagaccggcagagagtggctgggaaaaagtgatcgatgaacattttgatgatgaaagaatggatcggatttatccgaatgcgaagccaagatagaaaacgggcgggaaaagtaatgctgtgacttttcccgcctgtgttatttatggactcgtaccagcccgattccaagtgcaccgggaccggtgtgacatccgatactcattgtaagtggaagctgaaacaattccagatccgggtatcgttttttcatttcttctttaaaaaattccaatgtatcaggatccatctgtgtatatgcaataccggctttgagcagtccctgagtatggagtgcagagagtcttccggagagatctttatcaagtgctttgcacatggctttaaaagcagatttcattccccgggttttggtataggcatccagcttgtctccctgaatggtaaggaccggctttaaattcaatacggttccgatggcagcagctgctgctgtgatacgaccgcctttttttaaatattccaaagtgtctaccgcaatgtagatggtggcatccatggcttccgtttccagaatttctttgatctgcgccccggtgaatctctggcgggtaagttcgactgcatccagaacggattgtgcctgtgtaacagaaatccggtgattgtccacaacatgcacccgccctttgaaatattcctcctgcgcaaggagcagggcagtctggcaggaattgctcagtccgctggacatcggaacatgaacgacttcgtcatgttctttcagcagctgatcccacatcttcatgacatccgcaggcgatggctgagaagttgtaacaggttctccggaagaaagtttccggtaaaactcttctgatgtgatattgcatccttcataaaaagtgtcttccccaacaaggacaggcattggaagtatgtgaatgtgatacttctgcgcattatcaggcatgatcccacaattactgtctgtcataattgctatctttggcataaaatcctcccttaatccgtaacccgccgtttctatggtgaaaggcgaaaatagcttacatattgaccgttattttaacaagtgttaagattatagcaaatccgaaatctaaagacaatgaacaatatttgtaaaatgttagttaattatacagaaagaggaaaatgtaaatcatggaagacagaagagtgatcaaaaccaagaaaaatttgaaggcaaccttgatcgaaatgatgggagagatctcatttgagcagatttctattacagaattgtgcaagcgggcagaaatcagcagaattactttttacgcacactatagtgataaatacgcactggcagatgatattttcagtgatatgcttcagatcggaacggatatctatcgtacaaaacaggaaaaagaaaatccgggaaatgatcttgtaatgggatattgcaatatgttaaacagtattctggaagtgtattatgactgttttgcatttttccagtataccagcccgcagaaaaacccgtatcttgcatctgcattttacactattgtactggaaacaattgaaaatcataccaataaaatccgacagaatgtagaagtgaaatattccccgaagaaaattgcaggtttcttgtgttttgggatgcttggatttatcaatgaggcacatggtgagaaaacatcgattgaagagatcaaaagagaggcaaatcagttgcttagggatatactgcagtccggagtgctggtaaaataatggtaaatagtaaaacaaaaaacgctgccaaagataaacgttgtacctccggcggcgttttgtcgttctcaatctattttgcatacttacggaccagacaggaaatgactcccgccagacagagcccaagcagggcattgtgcatggaaccgaatacatccagagcaccgcggattccttttaacacatccggagactgtggaatgatctggttgatccaaaaggatgcataagagcacacatagataaaaataaatgagaaaagtccacgtccggtatcttctttataagtctttctgccgtcacggacacgaacccgtgtcatagcccataaaaaggagatgcattcaaataaaagaaaaaatccggcgactccggcataagcggccagacaataattcttttcttctactgcagttacaggatctccgtaaggagcactgccgcgccagaaattataagccaggaaagcggctgttcctgcgatcagcaaaagagaaacgaaacggatgataatgctggctgttttataaatggcttttcccccatattttgcagtggtttttacaggagaaagcaggtcacttttccttttggaagaagacttttctctgcgggggcgttcatcctcgtaatcatcagaatcagaggtcgggcgttttgaacgtgatggattttttcttctgtcaggttcttcttcccattgatggttttttcggccggactgtggagaaacggatccatttgtgatcggatccattaaaatggtctcgtctccctgcagcggcatttgaatattctttttctttttaccggaagcccggggctttggctgtgattttaaatctacggtttgaaattcacgctttgtcagtggttcttcttcataatgaaagatcggatcgtcttcataagtgacttcaaaatcctgattaaaaaaatgttcgttgttgttcttggaactcatggaaatcctccttccgaatgttcctattctatcctgtttttgaaaaatcctcaagagaagacggggaaaatttagaaagatttaaaaatttctgatgcgttgacgctaacctccattttgcgtataataaaaccaattgaaacaaaatggaggcagattatgaaagcaaagaaagttctctcaggcgcattggcagcgattcttttgactcttacaccgggtgtggctgtgtgtgcagaggagatggccgggcaggagcagacggaaaatacacaagtactgtctgcacaggagcaggaaaaccaggaaaaagcagcatcttatgcggagaaaatagatacaaacgagatttcgaactggccacagggacccgcgatctatgcggcttccggcattgtgatggacatgaacagcggggcagtgctttatgcaaaaaaggccgaagaaaaaagatatcctgcgagtattacgaaagtgttgagtgttttgactgcattacagtatgcgaaaatgtccgataccgttgtgttttcagaggacagtatttcttttttgcagtgggatgatgcgcagatcgggatgaagcccggggaagaaatcagcatggagtcagcactttatgggatgcttctggcttcggcaaatgaagtatcctatgcggtggcggaaaatgtaggaaagcagtacttaaatggcggatatgcggagtttatagaagagatgaaccggatatctcaggaattgggatgtaccagttcaaactgggtcaatgcaaatgggcttcatgatgacaaccactatacaacagcgcatgatatggcgagaattgcagcggcagcttatcagaatgaagagtttcgaagactggagacaacgctggaatacaaagttccaccgacgaatctgactgcggaagaaagaattctggatcagaatcataaaatgctctggccggaaaactattattactatgcgaatgcgaaagcgggaaagaccggatatacagatcagtcaaagacaacgcttgtgacgatggcggaaggaaatgatatgcagctggcagcggtggtgcttcatacatatggagtagatgcttatacggatacgaggtttatgtatgattatgcatttacaaattttgaaaggctgaatctgagggaatgtgaaacttcatcagatattgaaagttttgacaaggaagatgcctatgttgtggttccaaagggcgtttcgttttcagaattggaaaaagagtatgttccaaatgaaaaggaaggagtaagacaggctgcggtagagtatttttatcacggacagccagtggggagtgcgaaagcaacattgacagaagaagcgttttccgcattgacaggatctgataaaaaaataaagatcgagtcggtaaaacaggaaaagaaggctgaaaaatcagagcaaacagagcagaaaaagctgtcaaaactgacagttgtgcttgcactggcagtaattttgccattaggatatattattctggtcgttattttgtataaactaaatatgaggtggagaaaccggaaaaagtagatcgatacggatgggacgcataaacacgcccatccgtatttttaatgatgatgtttcaggcagtaaagatcgtggaacagatatccggcaaaaatcagaatcgctgcaaaaaacaaaaagcagcaggtgagaatcagttccggaagtgagcgcttccacagggaaagaggcagcctgtatccaagaaaggaaatatgaaacattgcgaccagtgtcagaagcagcactccgaatttttcaaaaaagatccgtgctttgatcttataataatcctgtcgcctgagcggaagtgtcagatatctggtaacacgggatgaaatcactccgttttctgcgatgagaaaaagctcataacagagatagcagcagagtccgaaaataccgaaaataaaccagacagggagaaaggtggcaggatccgggatcaatccttttgaaagagcatgataggcgttctgcatctcaaactgggaggtcggaagataaaggaaaaacaaggttcctgttaacagccagtatcctccaaaatgaaaggtttgcttctctatgtggtaaacattgtggttcatataagtcacctcctaagaattacgggacagcaggtctcgtatatgtgtatgagagcgttttaatttgtcggcaagaaaggcatccatttgttccggacagtggaacgtaataattccattatcggcaaacagcaggtaatcggcaagttttttcaatgtttctgtaatgtgggaggaaataaaaattcctacatcttcatttaaaatatcctgcataatcgatagaaagtttttgcgaaagacaggatcaaagccttccaacggttcatccaagatcagaaaacgtggatgatgtgccagtgcaaaacaggtctgcattttcatgtattcgcctttggagagctgccagagctgtttggagggagaaaaattcatccggtccatcagcgtataatagcgttccatggaccagttggaaaaataagggcccagaagctctccgttttccagagcggatttttccataaaataagtgagttcctctgatacataaccaatttgatctttgtagctgtcaggctctttttttaaagaaattccatccagcgtcacatcaccggtgcaggccggatcaatcccggcaaggcagcgtaaaagagttgattttccggagccgtttttcccggcaagtactgtcagatatccgctttccagttgaaaagaagtcggatataactgaaagtgactgtaagattttgcgagttcattacaaattagttcagacatatcctaatccctgcctttccataaaagttgtatcaagtcctgtacctcatctaaagaaagagacagtttttttgcatcttcgatacaggaagagagcgcatgttccagttgaacaagctgttcttcctgcagagtacgaaaatctacctgctttacaaaaaatccttttcccggatgagagtagatgaggttttcggattccagttcttcgtaagcgcgctttgtggtgatcacgctgatttccagatcttttgccagacttcggatggaaggaagcatatcacctggagaaagctccccgtttaacatggattccttaaatgcctgtacaagctgttcgtaaatcggcagtgaggaatccggttttaaaagaatgttcaatgtgtaccaggcctcctttctgtcaagtcctgcagttcgaagcaagtttcataagaaaggatgctgtttagaaaactgtgaatgcagtaagcggttacaagtatatttatgctcatgatcagaaaccagagaatattttttggggaagcatatttaaaaagtgcaaattcggccacaagcagcaggatccagataaaattcagaaagtcaaaattgagaatcctattgaaaattttctgctgatgcccctcttcggttaactgaattggagaaggcatggcatgatttaagcaagctgcgatgatcaggaggagaaggagcagcaagtaggttattgtttcacgaggtgtgacagttattatccaataatggaaacccccgcccagaatttgaaacaatgagaatatcagcagacagatcaaaattttaaccaacaggtacatcaaaagcaaccgacgctttatctttgtgtcagcaggacaaaaagagagtgctttcaaagagcgtatcggcaattttactgaaagaagaagtacaaaagcaagtcctaagcctatggaggcagaaggagtagaaaatccaaatgtgaaatagcaaatggtccacaatgcaaataaaatggagaagttcagccagtgttttttaaaatcagaccacagactttgtaagatcagcgtcaacatacagttacctcctgttttgggaaatataagttttcataagaaatcatattgtttaaaaaagtacggatgcagtaaactgctgcaaaaacatttccgatcatagcaatgatccaaagtgcaatgatccagctattccatgaggtctgcagatagctctggcaaaataaagcaacatattccaaagcaagcagacagaaccagtagacattgacgatgctcattccttttccttccagtgcttcatcaagcttacgatttggaatccggttgccgggatctgctttcatggaaaaatcaatcaggataaagcaggacaaaaaaagtagcaatgtaagctcgggagtctggaaaaatatcagcagatttccggtaaagctcagacagagtaatacaaataaaatcagacaaaaagaaaccttgctccaaaaataagagcgcaaagattttctttttaatctcatatctgccggacaaaaatagattggtttcaacagccggacgggaaattttctggaaatcaggatgacagacaacaaaatgccggcagtgccaataaagtataaaagtgtataggtctccgatccgttcagtatcattttcctcagttcagcctctgaaagcaagtaagcttctgaatccaccatgaaaaaccagaatccaaaggtaaacacaaaaatggtagcaatataacacaataccaatgtcacaagaatcccgagccagtgttttttaaaatcagaccacaggtgttggataatcaattttgtcattggattacacctcctttgtgaaaacagtacatcagatcttccagagaaggcctggtgacggtcagagcgccaagatggagtgattctgctttggcagagtcgatcagtgtggaattccgatattcaccgaaattttgacaaacgaccatttgagaatctaactgctccagttgttcttttgtaccatgtaaaaggagatagcgatctgcaagttcttcccgcgttaaatccagtatcagacgtccgtaatccatcagaagaatgtaatctccgatctgatccagatcttcggtgatatgggtggaaaaaagaatgcttctcgtgccgtcctccacgatttcctgcatatatcccatcagttctttgcgaaacagaggatccagtccggccgcaggttcatccataagaaacacttttgcgtcatgggaaaatgcaaaggcaagctgaaaacgtgctttttgtcctttggagagtttgccgatttttttctttgggtccacatcaaaacgtctgcagaattccagaaataagcggtgatcatatcgactatagagagcaccgaagcagcgggcgttcgtctcaacccgggtgtctgcatcaaagagacattcatccagaacaacgccaagctgatcttttgcagcaatttcttcgttttccatggaatgaccagttacaaagactgctccggaatctttttcatacaaattcagaatagttttgatcagagaggtctttccgcagccattttgtccgatcagacctgtgataaatccaggttttagtgtaaagctgatatcatgcagagcaaaggtgttaagatttttgttgagatgttgtacttccaacaggtattccatagtatccctccttgtatcagttgactgtttatcaactgtatatgtttgtataaacagtatatgaacagttggaagaaaagtcaatagtatgtagaaaaaagtattaaaaatcttgatgtaaactccgaatttttgttggaaattttcttgacaaatcttggctttatcacgtatgcttttgtaaaagccctttcatgaaggtatggaatgttggaaagagggaagttatgaatatatatgatattgcaaaagaagcaggggtttcgatttcaaccgtttcgcgggttatgaatcataagggaaatgtaaatccggaaacccgaaaaaaagtagaagaaattctggaaaaaaataattatacgccaagtgcgatcgcacgcggaatggtgagcaaatcgatgaagaccgtctctgttttaacagtggatatccgtgttccgcattatgccagaacggcctataccatagagagagagttcagccgtcgtggatacgaggtttctctgtgcaacacgggcggggagctggaagagacgatcaagtatctgcggacagcacgggagaaaaagacggatggaatcgtactggtaggttctgtgtttaatacgctttgtaaaaatgcggaaatcagcgggttgctgcagaatataccggttgtgcttgccaatggaaagctggaactgccaaattcatattcggttctggtcgatgacaggtatggagtatcgcttgctgtggaacatctgattcaaaagggacaccgcgagatttattatctgagagatatggatacagtcagtgcacagcttaaatgtgagggatttattgcggagatggagaaatgtggtctcaaaaatgcaagacagcaggtgctggagaccgcatcaagtattgaaggtggtataaaagcggtcgaacagctgatccggagaaagcaaaaatttacgggaattgtttgcggagaggatattacggcagcaggagttgtgaaagcgcttttacattatggaatcaaggtgccggaggaagtagcagtaaccggttataataattcggaatatgcaaaaatttgtgaaccgcaattgacaacaattgataataagccggaattagtggcaatgatgagtgttcagctgttgactagtctgattgaaaagacagaggtatattcatcctgcacaattcagccggagttagtggaaggacagacaacttaggctggcggaagcataagagaaagatttttggaaaaatatctgaaagtctttctcttattttttttgaaatataagaaaacgcttgcataatgttaaaaaaatatcagcgatttgcacgaaaatcagattaaaaaattatactatatgctgaaagtagtgtgtagttgatatcttatattgacaaaaacagacagataactataatgaaagctagagaaagcgcttttatgagttttcaaaatattttcacaaactgaaaggagattatcatgagagttcaatatgatgttatggtacaggagtttacaagagttttggagaaaaggggattcaatcatgaggatgcagaaaatgcagcagttatttttgcacagaatagccttgcaggtgtgttctcacatggcttgaaccgttttccgcgtgttgtcagctatctggaaaaaggggagatcgatccgaatgcgaaagcaacctgtgaaatgcagatgggagccatcgagagatgggacgggcatcgtggattcgggcctttgaatgcaaagaaagcaatggatcgtgcctgtgaactggcaaaagagtacggagtcggatgcgttgcattaggaaacaataaccactggatgagaggcggtacatatggatggctcgcagcagatcatggatgtatcggtatctgctggtccaacacaatgccgaacatgccggcatggggcggcttgaaccgtaaaataggaaacaacccgctgatcatggcagtgcctcgttccaatggtgaacatgcgatgattgactgtgcagtttctcagttttcttatggaaagattgaagattgccgtctcagaggtgtacagcttccggtgccgggtggatatgatacaaaaggagagctgacaacagatcctacggaaatcgaaaaaacatggagagtccttccaatgggatactggaaaggaagcggactgtctatcgtgcttgatctgatcgcaaccgttctgacaaatggaaattctgtacagaagatcggaacatttggagatgagatcggactgactcagatcatgatcgctgttgatccgacaaaattcaatacagtagaagagacagatgcgatagtagaagagattcttgcagatgtcaaatcttcggaaccgatcaaagaaggcggagaggtttattatccgggagaactggagctgaaaaatatcaaagagaacaaagaacagggaatcccggtaattgaagaagtttgggaatccatcctgaaaatgtaagaaaagagagagaactagggaggaaatatcatggaatatgtaataggaatcctgctgctcgtctcatttgtaggtcttgccgtttacgcagttcgcggcggcaacctgatgatgggtatgctgatcatgggtattatctggacagtgcttccactgattggaaatacttttgcaacaaatccggaatttatcgctgcatatccgggaattacggacattagttttgtagatgcgatcacgaaagtgttccagtccggtccggaaggatggggaagtgttcttgtcaatgttgtgtttggtgcatggtttggtcgtgtactgcttcagacaggaattgcagatgcattgattcgaaaggctgttgagcttggaggagataaaccagtcattatctgcgtcctgctttctacagtaacaacggcaattttctctacattatttggtgcaggggcagttgttgcgattggagtgatcattcttccgatcttgatgagtcttggtattccgaagacactttctatcggttcttttatgttaagtgtaggagccggaatgtacttgaacccggtacttaccggacagtttctggcattcttcctgggagaagacggaaaacagctgatcacctatgatgatccggcacgtcttcgctgggcagggatcggacttgctgtacagctgatcatggtgatcgtgatgtgcatgttttctctgagaaagaagaaaactgttcatgcatggagtgcatccgccgcaagaaaagcacgtccgggatatgttccgacagttgcgctgatcgcaccgatccttccggttttactgctggttgtattgaatgttccgatcattctcggatttatcattggaagtttttatgcactggcagtttgtggaaaactgaaatctttccggggtgcctgccgtgtgctgaataaagatttttatgatggtgtagttgatacagcaccgttggttggatttctgcttatgattccgatgttcaataaagcagcagaactttgtgttccttattttaatgcgttgcttggaaatgtaattccgcacaatacactggtgatcagtattgcgtttgcacttttagcaccacttggattgttccgtggaccgctgacacttttcggttgtggagcagcaacactgggaatcctgaaaggaatcggattctcaactccatatctgtttgcgctgatggtcattccttctattacaatgaatgtttccatctgtatgacacagagctggatcgcatggggagtcagctacgcaaaagtatcaacaagagaacatctgaaaaagacattgccggttgcatggattgtttgtatcatcatgcaggccatcacttacattatgtttggttaaggaggagtttcaaatgagtgatagaaaagtacgtatgggtatcgatgtcggcggaacacatacaaaagccgttgccatcgacaatgcgacccatgaaattatcggaaagtcttctgtgaaaacaacacatgatgacaaggcaggggttgcgaccggagttgtacaggcatttcagaattgcctgagagaaaatggaatcgatccgaaagatgtgatctttgttgcacattctacgacacaggcgaccaacgctctgatcgaaggagatgtggcaaatgtaggagtgatcggtgtcggtccgaaaggtgtgggcggctggatcgcaaaagcgcagacgaatatgaaggatatcaaccttggatccgggcgttttatccggcttaagaaccgcttcatctgtgatgaaaatctgtctgaccagcttgtgacagatacgattaaatctctggtgggtgatggtgcacaggttatcgtggccagtgaatcttacggtgtggatgacatggaaaatgagaccggcatctgcaagattgcaaaagatatgggtctggaagcgacagcagccagtgagatcaccaagctttatggactgaccagacgtacacgtacagctgcaatcaatgcgtccattttgccgaaaatgctcaatacagcaaattctacagaacagagtgtaaaaagcgccggggtagaagttcctctgatgatcatgagaggtgacggcggtgttatggagatcagtgaaatgaaaaaacgtccggtccttacgatgttgtccggtcctgcagcttctgtgatgggaagtctgatgtatctgcgtgcctcaaatggtgtatattttgaagttggaggaacaacgacgaatatcggtgtaatcaaagacggacgtcctgccattgattattcgaatgtaggcggacatcgtacatatatcagcagtctggatgtgcgtgtcctcggtgttgccggaggaagtatggtgcgggcagataagagcggtgtcaaagatgtgggaccacgttccgcacatattgcaggtatggactatgcggtatttactccggaagaagaaatcgtggatccgaaagtcgtattcttcagcccgaaagagggagatcctgcggactatgtagcgatcgaactgaaaagcggaaagcggatcacgatcacaaatacctgtgcagcgaatgtgctgggactgattaaaccagaatattttgcctatggaaatgccaatgcggcgcgcaaggcaatgcagcctctggcagattacatgggaaaaacagtggaagaggttgcagaacagattctgacaagagcctatgagaaaattgaaccgatcatcatggaactggcagaaaaatatcgcctggagaaagatcagatcagtctggtaggagtcggcggaggagccgcttccctgattggattctgttcggataaaatgggacttcgctattccattccggataatgcagaggtcatttcttccatcggtgttgcacttgcaatggtacgtgatgtagtggaacgagtggttccaaacccgacaccggaagatatccgctcgatcaaagcagaagcaattgacaaagcagtggaaagtggtgccgcagcggacagtgtggatgttcatatcgagatcgatcctcagacttcaaagctgacagcgatcgcgctgggctccacagaagtaaagacaaccgatcttttgaaggaatgtacagcagaagaagcacgtcagctggcagcagaggatttaaaagaagaaccttctgcaatcaaggaagaatgtgcaacaaagaatttctatgtatttggtacagacagaaaaggaaaacatccggttcgtattctggataaaaaaggatttatcaaagtgcagagaaatgatggaaaagctcttctttgtaaagcgggaagctaccggaatgtggtctctcagatgtgggaagaactggcgatttatcagcaggatgccatcctgcgcccggattactatatttgcgccggagcccgggtgatggatttttcaggatctgttgatctggataagattatgatgctgatggaagttgagatgcagatgatcaatccatctgatgatgtgatcattgtgggagcgaaaaacagtctgtaataatagaagggaatatgcagcaatatggacaagagtggtaaaagaaaccggtttttggatgcgctggcaggcagaaatgtacaggaagaaccagaaaagtttccggaaattccattgaaagatatggtgcagacactggagggtgtgacagaagaagcgtggggacgctatgcatttgcaagagaacccctggagcgaaagtttacgtcacaggaaaaagatgcgtacactgtgaaagcaaatgcctgcggacgggaatgggcgaagcgcatcagtgaaaaatatgggactgaagatccgaagattctggccgggaaaatgggcatgaaagtaaagatgccgaaagttccgaccggaggaggggtggttttgtttgcacagtatgtacagccagatgagatcacaatctttacagactgcgtagataaggcggctgcgcttgaaaaacagtgcggctgcccgcttcttaaaaaggagcgcctgttggaaattttgctggcacacgaattgtttcatgcagtggaggaacaatatgcaggagaaatttttaccagaacagagaaaattgagctgtggagaaaaccattctccaaccgttctgtgatctcatgcctgtcagaaattgcggcaatggcatttgccagacaactttcagggctgagtgtttctccgtatatgctggacgtactgcttgtatattcctatgataaaaatacttcttatggtctgtatgatgaaatctggaaatggaacagggaagtattgtccgataaaaatcaggaggaaaaaagatgctgacgacaaatattttactggctgagaaatacgattatctcagtgagaaatttaaaaaagcgtttacgtttttaagagataccgatcttgccgctctgccggttggaaatgtaccgattgacgggaacgaagtgtatgcgaatgtgcagagttattctacaatggatgctgcagattgtccgtttgaaagtcataaagaatacttcgatgtacaatatgtagtggaaggagaagaatgtttcggttacgagccggtagaaaatctgattccgtccgtggagtatgatgcagagaaggatctgattttttatcaggaacctgcggattttggaagtgtcattttaaaagccggggattttgcaatcgtgccgccggaagacggacatgctccgagacgaatgacagcaaatggttcctgtcacgtaaagaaaattgtggtgaaagtaagagtataggaggtagttcaagtgaagagttcatttcgttggtatggagacagtgatccggtcacactcgataaaatccgtcagattccgggaatgcgttcgattgtttctgctgtgtatgatgtgaagccgggagaagtatggccggaagagagcatcaaacatctggttgatgaatgtgcggcaaatggtctggtatttgatgtggtagagtctattcctgtcacagaagagattaaacttggaagaccggaacgcgaccgtcatattgaaaattactgtgagtcgatccagcgctgtgcgaagtacggaatcaaatgtattacttataattttatgccggtttttgactggacgcgaacccagttggataaagaagctgaggatggatctaccagtcttgtgatgtactgggatcagctgaaagggctggatccactgaaagatgatatccatctgcctggctgggatgccagctacacacaggatgaggtgcgtgaattgatccgggcatatggagagcttggagaagaagggctgtgggcgaatattgaatattttctgaaacgggtgatccctgtggcagaagaatgcgatgtcgtgatggcattacatccggatgatcctccgtatccgatttttggattgccgagggtgattacatgtgagaaaaatattgatcgttatctgtcgatcgtggacagcccggcaaacagtctgtgtctttgcacaggttcgcttggaagctcccctgacaatgatatccctgcaatggtgcgtaaatattccgcaatggggcgtatcggctttatgcatatcaggaatgtgaagattcttccggacacatcgtttgaagagtcaggtcacttgacgcaaaaaggttctctggatatgaatgcgatcgtgaaggcgctagttgaaacgggatttgaaggatatttccgtccggatcatggacgcatgatctggggagagagcggaaagccgggatatggtctttttgaccgggcgctgggaagtgcgtatatcaatggtctgatcgaagcaaatggcggagttatcgaagaataggaaaagggacagcacaatatttttttctgtcataatatagtatacagcggtcatgttatattcggcatgaccgtttttttatttttatctgtcataatgtgttgatattgtcttcatatttaaatatactagtgtagcagagaaagaatctttataagattttaatggaaccaaaaaagttttcatgcagtttttagatatgaagtgttaaatttgacaggaagtgaaaaatatgggagcgaagatatgaaacaggaacagatgaaaatctgggaaagatttttaaaagggctgctggtaatgacagggatcctttttatagcaactggaattggatatttattccggtatcttggattttcagaagaaaatatcattattgtatacattttaggggttctgatcattgcaatcattacggtcaacagaggatggagcgtatgctattcgctgctcagtgtgttgttgtttaattttttgtttacagagccacgatttacgttttcttcgtatgattacgggtatccagtgacatttgtaacggtgtttattgcagccatgatcgtcagtaacctgaccatacaaatccgtaagcaggggtatcgggctgagcagatggctttacgtacccgcatcctgttggagacgaatcagatgctccagaaggcgaagaatgcggatgagatgattgaagagactgcaaggcatctgatgcgcatgatgggaaaaaatgtgatatattatcgggcagaggatggaatactttctgagcccaggttttgtatggcagaacctggtgcagccaagatgttatacttgcagcagcgggaacggcaggctgcgcagtgggtgttcgagaatcgaaaacgcgcaggaacaggaatggatcagtatccggatgcacattgcctgtatctggcaatccgaaacgaagacatggtctatggcgtgatcggaattgctctggaagggatgatgatggatgtctatgaacagaacctgattttatccattttaggggaatgtgcactggcattggaaaaagagggctataacagaaaacgggaagaagcgcttgcacaggcaaagaatgagcagttaagagcaaatctcctgcgttcgatttctcatgatcttcggacgcctctgacgagtatttcgggaagtgcagggattcttctgaacagtgcgtcagcgcttggtgaagagaagcaaaaacagctttataaaggaatttatgatgattccatgtggctgatcaatctggtggaaaatcttctgtctgtgacgcggctggaagacgggactatgaatctgaatctgcagatcgaattggtggatgaggtgattgagggggcgctgaaacacatcagccgggatcattcggactatgaattgaaatttattcattcggaagagctgcttctggcaaaaatggattcccgtctcatcatccaggttattattaatattgtggacaatgcattgaaatatacgccgaaaggctctaaaatagagatctatgcaagaaaagaaaatcagatgatcgcgatttccattgcagataatggaaaaggaattgcggattgtgcaaaagaaaagatttttgatatgttttatactgcagacagtaaagttgcagacagcagaagaggtcttggactggggctgttcctctgtaagtcgatcatacaggcgcatgggggaacgattcaggtagcagataatgttccacatggtacgatttttacatttacactgcaggcagaggaggttactttgaatgaataaaccattgattttagcggtagaagatgatacagcagtaagaaacttgattacaactacattagagacacaggattaccgtttccatacggcggccaacggtgctcaggcaattttggaagcagcgtctcagaaaccggatatcatgcttctggatctggggcttccggacatggatggagtggaagtgatcaaaaaaatccgttcctggtcaaatctgccgattatagtgatcagtgcgcggagtgaagacagggataagattgaggcgttggatgcaggtgcggatgactatctgaccaagccgttttctgtagaggagcttctggcaagactgcgtgtgatcctgcgaagacttcagtatatggaatccagctcatatcaggaagaaaaagaatttgtcaatggagacctgcggattgattatgtgtccggctgtgtgtatttaaaggggcaggaactgcatatgacatccacggaatataaacttctgattttgctttcaaaaaatgttggaaaggtattgactcatacatatattacgaaagaaatctggggaagtgcctgggacaatgatgtagcttctttgcgggtgtttatggcaacgctcagaaagaagattgaagaaaatccatctcagccgaaatatatccagacacatgtggggattggatatcgtatgttgcgggtggcgcagtgacaaagtgaggttttacggggctgtgatggcagccccgctttgttttcatctctatgaaacatagaaacgagtattactctctaaattctaatattgtaaatatgggagttaaaaatccagacggtagcatttgttatattattggaatccgaaaagaaattagaaacaagattggaaaacagcctggagatcaggtaactgtaacagtgaaagaggtatagcgatccggacattccgcaactcgtactttcagaggtggacttcatctcatctgatcaggtataggtttacagatgggaagtagtctgagagaacagactactccggcagctggtgaagaacgaattgattcttgcggaattccagaattccttcgtcgcgcatttttccaagttctttcgagagggcactgcgatccaggttgagataatctgccagttcctgtcggttaaaagaaatttgaaagaccgtgctttcggctttggacgcctgagaggacagatagatcagcagacgtccccggatggtctttggggttgtgcagaaaatccggttggacaggatgagatttttgtaaatggaaattcgaaggagattctgcatgatcttgtccgtccagagagtatctttatagcggggctgcatcaaagtctccagattcaggaaaagaagatttgtatattcagcggctactgcattcaccatcaaaggctcctgacaaaaagcgtaggtttctgcaaatacttgtcctgccgagatgttgctcagcagacttttatttccccagagatctacattttcgatattaacacttcccgtcagaacaattccgatttctcggacggattctcccattcgaaaaataagttcatttttttcaaaagactgctgacgcatgcaactgcagttttgcatttcgttccattcattttctgtaattccctgaaacagaggggtctgaacttttttcataaaatcttcctttctgtggttataacaaccgaaatattgccttgattgtactatacttgaactacaaaaacaagggaggaatcaagatgatcagaagaattattcagatagatgaagaaaaatgcaacggatgcggagtctgtgcagctgcatgtcatgaaggtgcaatcgggatggtcgatggaaaggcaaaactgttaagggatgattattgtgacggtctgggtgactgtctgccgcagtgtccgacaggagcaatccgttttgtggagcgggaggctgccccatacgatgagcaggcagtgctggaaaaccagagaaaaaaagcagagcagtcaacgacagaattttccggctgtccgggacagcgaatgagacagcttcatccagaaagcggtcataataccgagcaaaagtgtgccgcacagtcgtcacagctggcacagtggccatgccagatcaaactggttccggtacatgcaccgtattttaatggggcgaaactgttgattgctgcagattgtacagcttatgcatacgcaaatgtacatcaggagtttatgcgtggaaaagtaacacttattggatgtcctaagctggatgaaggagattacagtgagaagctgacacagatcattgcggaaaatgagattcagagtgtaacaattcttcgtatggaagtgccatgctgcggaggcctggaaatggcggcaaagaaagcactgcaaaacagcggaaaatttattccatggcaggtcgtgacagtttcgattggcggaaagattttagattaggattttatagaatgaaaaatatcagtaaatcagaagtggttgtgttcggaaaatgtaatacttaaggtttcaaagtgggggtatcatgtattgtgatacgcccctctttctcaattattttcctgattcagagtccatccataatcattgtggtatatcatctgcttcgtcatgccgccgtcaatacatatattttccccagtgataaaacctgctttatcggaacaaaggtatagtaccatattggcaatatccagggaattcccaacgcggccggcagggtgttgaatcacatctgcaccgtcatattttgtgtaagcggtatcgatccaaccgggagatattgaatttacacgaactttcccggcaagactgacagcaagggagtgcgtaagagctgctataccgcctttagcagcagtgtagctttcagtctgtggctgactcatacggtcccgggaggaagagatatttacaattgccgcatcaggagcaaagtacggaagaaaaagctttgtaagatagaatggcgctgttatgcctacttttaaagcgtagttaaattcttcataggaacattcctcgatccctttcattagcggcagtgcgttattgatcagatagtctaccttgccatagtcagcaattactgtttccacaaagcggtgcagaacttctttttcagccaaatcgccgacaaagtaatcatttggctgtttgtcgatgatacagacaaaagcgttgttctttttaaattcttcggcaatacattttccaataccttgtgcgccgcctgtgatgacaactactttgttgtgaaacattgtgcaaaactcctttttgtttttagcatactatagaatgttataaaaagccactgagtttcttaagatttcgggggaatctgcaaatgtaacaaggtatacttttgggacgaagaggtcaatgccagaatattaaccgcgataaaaaatgcaggaagcaattcgacggttcttccagaaggcggaacgtccgtatctactgagttcaaaacttatttataattgtttatcaaaatatattattgcagaaagttcaagaagattacgggctccaatgtaaaatagacaaaaaatggttagtcgttgtatggtgattgtagattggctgtctacgaaaatgggcaaaattaaaagtactattattaaaagccaagtggagatactggcaattctgtatgattttagttgtatcatttcccaccgttcatcccccatataattcatctgtttcttagctttaaaaatatataggctgagtgttacacctaatgaaacaataagaaaaaataaaattatagtttgttcattcatattagttctccttcctatattcaaaaattttgtcgatcgaaacctcaaatacttctgcaattttaaatgctaattcaagagaaggtgtttcacaatcccccttttttcacccgaatctttataccatctttatacgaatccatttcagcttaatacagattttatttgcaatgtcctacaatagggaacagcaaggaggaaaaaaatatgatggatttaattgcactaggaattttaattatttgttttggatgtgtaaaattatttgcgaatttttgtgaatcgctgatcaatccaaaagaaaaataggaggatataaagatgatcgttcttggaattttagttttattacttgccggatatcttgtgtatgcgctgatacatccggagaaattgtgagaaaagagaaaggacagcaacaggaggaagagagatgttacagattatactcacactggcaattttcttgatactggtcattccgatgggaaaatatatgtatcacattgccacaaagcaaaaaacatttgcggataagatgttcaatccgatcgacaattttttatataaaatttgcggaatcaaacgagaagacatgggctggaaaaagtacgcgatgtctttagtactggcaaatgcagtaatggtatttatcggttatttgattttacgattacagaatttgctgtttttaaatccgaacggagctgatggaatggaggcaagtctttccttcaatacgatcatcagttttatgacaaatacaaacctgcagcattatgaaggagaaagcggtctttcttacggaagtcagttgtgtgtgatcatttttatgatgtttacctcagctgccagcggttatgcagcatgtatggcattttgccgcggagtttccggaagaaagatgggaaacttttatgaagatgtgatccgcgtaacgaccagaatcctgattccgttttcgtttgtaatcggtcttcttctggtaagtcagggagtgccgcagacattacaggcaaatgaaacgatacagacaatcgaaggaaagatgcaggatctggcacttggaccggtagccgcactggaagcaatcaagcatctgggaacaaacggaggtggattcttcggtgcaaactcagcgacaccgtttgagaacccgactgttatttctaatataatagaaacgatttccatgatgatacttccgggctcttgcgttgtagcatttggccatatgatccatgacaacagaaaagaaaatgcagcgagaaaagcagttgcaccaaaacagtttggtaagccaatgctgatgggaagacaggcagcagtgattttcggagcaatgtccatcctttttgtagtaggacttgtaatctgctattctgctgagatggcaggaaatccggtgactcattcactgggacttgcacaggcaggaaatatggaaggaaaagaaactcgctttggaatcgcgcagtctgcaatatttacaacggtgacaacatcctttacaacaggaactgttaacaacatgcatgattcactgacaccgcttggcggtcttgttccaatgctccacatgatgcttaactgtgtgttcggcggaaaaggtgtgggtctgatgaatatggttatgtatgtgatcctggcagttttcatctgtggcctgatggtaggacgtacaccggaatatctgaataaaaaaattgaaggcagagagatgaagctggtggcgcttgtgattttgattcatccacttttaattcttggattttctgcattgggtgtggcaacacaggcaggaacaagcggcattacgaacccgggatatcacggactgagtcaggttctgtacgagtttgcctcttctgcggcgaacaatggttccggatttgagggactggccgacaacagtgtattctggaatatcacgaccgggctggcaatgttctttggaagatatttttccattgtagcacagcttgcaatcgcaggatctctgctggcgaaaaagaaagtgaacgaatcaatcggttcgctaaagacagataatgtaacttttatgatcattcttgtatttattgtatacatttttgccgctctgacctttttcccggcgctggcacttggaccggtagctgagcatctgtccttatggcagtagaaaatgagcggaaaggagaatccaacatggctaagaaagataagacaaaatttattacaaaggatattttaagatcctccattctgggcgcatttcagaaactggatctgcgctacatgataaaaaatccggtcatgtttgtcgtagaaatcggatttctgttcactctaatcctgacagtgtttccaacactgtttggcggaagtgaagaatatcgcgtgtacaacggagttgtaacagtcgtactgtttgtgaccgtgttatttgcaaactttgcagagtccgttgcagaaggaagaggaaaggcacaggcagcttctttgaaaaagacaaagcaggatacaaaagcaagactgcttctggcaaatggagaagagaaagtgatcaatgcttctgaactgaaaaaaggagatatcgtgcttgtaaagaccggagaggtgattccgaacgatggagagatcatcgaaggtgttgcatctgtagatgaatctgcaattacgggagaatccgcccctgttacaagagaggcgggaggagatttttcctctgtgacaggaggtacgacagttgtttctgactggttaaagattaaaatcgtggcagaacccggacagtctttcctggataaaatgattgcactggtagagggcgcatccagacagaaatctccgaatgagatcgcgctgaacacactgctgatcgtgctgactttgatttttctgatcgtgattgtatctctgtacccgtttgcacagtatcttggagtacagatgccgatttcctggctgattgctctgatggtatgtctcatcccgacaacgatcggcggtctgctttcagctattggaatcgcgggaatggaccgtgtgaccagattcaatgtaattgccatgtccggaaaagcagttgaggcatgcggagatgtggacacgatgattcttgacaaaacaggaaccattacatacggaaaccgcctggcagcagaattttatccggtcaagggtgttgcaaaagaagatctgacagattattgtgtgatgtgttctttgatggatgccaccccggaaggaaaatctacagtagaactgggaagaaattttgggtgtgcgatcgacgatggcgcagcagaccagatggaatttgtagagtttactgcacagtctaagatgagcggtgtgaatttaaaagacggaaccagagtcagaaaaggagcttccgaagcaatcaagacttttgtgaaagaagcaggcggaatcatcccgtcggatctggaagggattgtaacagaagtttcaaatcttggaggaactccgcttgttgtatgtgtaaacaacaagattttaggtgtgatctatttgaaggatacagtaaaaccaggactggtggagcgttttgaaagacttcgcgaaatcggaatcaagacaatcatgtgtaccggtgataatccgctgacagcagcaacgattgcgaaggaagcaggagttgacggttttattgcagaatgtaaaccggaagataaaattgaggcgatcaaaaaagagcaggcagaaggaaaagtggttgccatgacaggtgacggtacaaacgatgctccggcgctggcacaggcagatgttggtctggcaatgaattccggaacacaggcggccaaagaagcagcaaatatggtggatctggattcagacccgacaaagattctggaagtggtggaaatcggaaaacagcttttgatcaccagaggatctttgaccacatttagtattgcgaatgatattgcaaaatattttgccattatcccggccatgtttacgatggtacttccacagatgcagatcttgaatatcatgcatctttctacgccggcaagtgcgatcctttctgctttgatcttcaatgcgatcattataccgggactgatcccgattgcgatgaaaggtgtcaagtacagaccgatgaaagcagagaaaatgctgcttcgtaatatgggaatctacggacttggcggaattgttgtaccgtttgtaggaattaaactgatcgacctgctggtagcaccgctgcttgcaatgatcggaatgtaggaggaagcagactatgaaagcatttggaaaaacagtaggaaaaacagttgttttctgtcttgttatgatgctgatgtgttcatttgtgtatccgctggcattgacaggggtcagccagcttacaatgaaggcaaaggcagatggaagtaaagttgacaaagatgggaacctcacaacagataccaaagaggcggtaggttctgcgctgatcggacaggattttacagaggactgttattttcagggaagagtttccgctgtaaattacaatacttatacagaagagcagaaagaaagcggagaatatgcaggtgttgcttccggttcttataactacgcaaattccaatccggaattaaaagagcggatggagaaagatctggagcagttcttaaaagagcatccgggagtgaaagcagaggatgttccggcagagcttctgacagcttccggttccggtctggatccacatatcagtccggaatctgcagaggttcagatcccgacagtggcaaagaattccggactctctgaggaggaagtaaaaaagatcgtagaagaaaatacagaaaagaaaacactgggtgtatttggagaagaacgggtaaatgtacttggatgtaatctggatattgcagcggcaatgggaaaataggaggttgctttgacagaggaaaacagacctgatccggggctgctgttgaaaaaactacagtacgaggagaaggaaaaagagaaacagacaaagggaaaactgaaaatttttcttggatatgcggcaggatccggtaagacatacgccatgctgggagctgcccatgaggcaaaaaagcatcaggtggatgtagtggcaggttatatcgaaccgcacgcacgtccggatacacaggcaatggcagaggggctggaagaaattccgccccttatggtcgattataaaggaatccagcttcgtgagtttaatctggatgcggcgctggagcgaaaaccaaagctgatcctggtggatgagctcgcccataccaatgtccgaggaagccggaatgaaaagcgctatcaggatgtacgggagctgcttcgcgcagggatcaatgtatataccacgatgaatatccagcatctggaaagcctcaatgatctggtagggaatattacgaatatagaagtaaaagagcgtgttcctgacagtgtgtttgatcaggcagatcaggtagaggtgatagatattgagccggaagacctgatcgagcgtatgaaagaaggaaagatctacggtccggtgcaggcagaacgggcgctggagaattttttccgaagagaaaagctggtggcactgcgagaaattgcacttcgaagaagtgcggaccgggtgaaccggattgcggaggaagagagaaatattctgggaaataccggctatcataccggagaacatatactggcatgtatttccgctgcgccatccagcgccaaggtgatccgtacagcagccagactttcctatgcttttcatgcccagtttacggcactttatgtggaaacacctgccatgcaggaagcgggagagaagacgaaacaaaccttaaaaagccatctggaactggcaaaggcgctgggagcaaaaatcgtaacggtgtatggtgaggatgcagcgtatcagattgcggaatacgcgatcgtgagcaatgtctctaaagtggtcatgggaagaacaaaccacaggggaatctggcgcaggcctaggatcgaagtgatggagaagctgacccatatggcgcccaatattgatgtctatattattccggatatccggaaggcaacgcataaaagagaggtgcagatccaaaggcgcagaaaaacgagctggaaaaacgtgtttctggatctggctgaaattacaggagtgatggcagttgcaacacttgcagcttacgtgctgtggcttttcagactgccggaatccaacattatcatgatttatattctggggattctgctgtcctcttatattgcaaataagaaaatttatgcgctgtattcttctttgatcagtgtgtttgcatttaattttttctttacggaaccatatttcagtctgaaggcatatgacaaaggatatccgactacgtttgtgatgttgtttctggtgggattgttcacagcgacactgacaaggagactgaaacagcagagcagagaaagtgccaaaaaggcataccggacggagattctgctcgagaacagtcagaagcttcgaagatgtaaatcgaaacaggaagtgtggactcaggtggccgggcaggcaggaaagcttttaaatctgtctctgatcatttatccgatggaaggatctcagatgtcagatacgccgcttttgtttccaagaaaagggatggatatgctgcatctgaaaacctgtatcaaccggcaggagctggcagtggcacagtgggtggcggcgaatcatcatcgtgcgggagcatgtacgcacacactgcctgacgccaaagccatgtatcttccgatccaggatgcaagagacgtcaaaggtgtgatgggaatccttctggaggaaaggcggccgatccaggagtttgaatacggacttttaatcgcgatgctcaatgaaacaggagtaaagctgcaggatacatttctggaatgaaaagagtgacttacctccataaatgtgataaagttagagtgttgtcaaaaagacagcagaatctaatgaaagacaatggagttagcatatgaacctgttaaatattgaacatatcagtaaaatatatggagaaaaaataatttttgatgacgcgtcttttggagtgcaggagggagacaagattgggatcgttgggatcaacgggaccggcaagacgactcttctgcggatgatcgcgggaacagaggtgccggatgatggacagatcatccggcagaatggcatgaagattgcccatctgactcagaatcccgtatttccggaaggcgcgactattttatcttatgtgcagagtgtggcagaagatatggagtggagagtacagagcaatctgaatacactcggaatcacagatcatacaatgaagattgagcatctttccggcggacagaagagaagagtggcaatggcaaaggttctggcagaggactttgatctgcttcttctggacgagcccaccaatcatctggatggagaaatgatctcctggctggaagggtatctgcgggcataccgtggaacggtcattatggtcacacatgaccgctattttctggatcaggtcacaaaccggattctggagatcagccatggaaagatgtacagctatgatgccaattacacaacgttcctggaactgaaagcccagagggaggagatggaactggcatccgagcgaaaacggcagagcatcctgcgtatggagctggaatgggcaaaacgaggatgccgggcaagaacaacgaagcagaaagcacgtctggagcgtctggaaagtctgaaaaacggcagtgctccggtgacagatgatacgatcacgctggattcggtagaaacccgcatgggaaagaagacgatggagcttcaccatgtcagtaaatcatatggggaaaaggtactggtcagagatttttcttatacagtactcaaaaatcaaaagcttggaatcatcggaccaaacggctgtggaaaatcgaccctgatcaaaatgatggcggggctggttcagccggattccgggacgattgaagtgggagagactgtcaagatcggatattttgcacaggaagaacaggagatggatgacagccagagagtcattgactatgtcaaagagatcggcgaatatattgtcaccagagatggcagaatcagcgcatcgcagcttctggagcggtttttgtttactccggatatgcaatatgcgccgatcgggaaattgtcgggaggagagaaaagaagactgtatcttctggggattctggcacagaatatcaatctgcttctgatcgatgaagcgggaaactatctggatattccgacactgacgattctggaagattatctgaattcctttcaggggattgtgatcacgatttcccatgaccgctactttttggataatgtggtagatcggatttttgagtttgacggaaacggacatctgcagcagtatgagggcggatatacggattatctggaagcgaaaaagaaaagagcatcgcatgcagtgcagccggaagaaaagccagagatgacaaagtccaaaaatactgcaaaaacatggaaacagaacagtccggtaaaattaaaattctcatttaaagaagcacgggaatacgagacaatcgatgatgatattgcatctctggaggaacagttggagaaactggagcaggatattctgaaaaatgcaacaaactcggtaaaactttccgaactggtacagcaaaaagaggaaacacaggcagcgttagatgaaaaaatggaacgctgggtttatcttagcgacctggcagaaaagatcgagagccagaaaaacggacagcctgtttgaaaaaagtaaagaaaaatggaaaattgttgttttttgaaaaacaggacaatgataagctaatatacgaacagaaaaaggtacatgtatttatgttgtattttattgacgtaaaccaaggaaaggaatatactaatccttgcagaagggaaattgaaaaatatggaggtaaacgatatgaaaaagcctgttttagtgattatggcagcaggaatgggaagcagatatggagggttgaaacagattgacccggtagatgaagatggacatattatcattgatttttcaatttatgatgcaaaaagagcaggatttgaaaaagttgtcttcattatcagaagagagcacgaagaagactttagaaagagtatcggggacagagtcagcaagttcatggaagtagaatatgtataccaggaactggagaacctgccggaaggattttctgtaccggaaggaagaacgaagccttttggaacaggacatgcgattttgagttgtaaagatgtagtggatggtccgtttgccgtgatcaatgcagatgattactatggagtcaatgcatataagatgatctatgactatctttcatcaggagaagacaatgagaagtaccgttatgcaatggttggatatatgctgagtaatacgctgacagagaacggatatgtttcccgtggaatctgtgacacagatgagaatcagtgcctgacaggtattacagagcgtacacacatcgagaagacaaaagacggagcagcatttacagaggatgatggcaagacatgggttcctgtagcattggatacgacagtttccatgaacctgtttggatttactgcgagtatgttaaaggaactggagagcagattttccgcatttttgacagagaatctggagaagaatccgatgaaatgcgaatactttcttccggcagtcgtaggcgatctgatcggagaaggaaaagccgaagtaaaagtgctcaaatcagcagacagatggtatggagttacatataaagaagataaagaaacagttgtgaatgcaatccgcagtatgaaagaggaaggaatctatccgaaaaatctgtggaaataaataattgcaggaaaagcagaatcagaaaggagtcagatcatggcaattttagtagcaggcggagcaggatatatcggcagccacacatgtgtggaacttttggaacgtggatatgaggtagtagtagtagacaatctttacaattccagtgaagttgcgctggaaagagtgcaggagatcactggaaaaactttgaaattttacaaaggagatattttaaacagagaagatctggagccgatctttgaaaatgaagagatcgaggcagtgatcaactttgcaggactcaaagcagtcggagaatctgtagaaaagccttgggaatactatcacaacaacattacaggaacattgattctttgtgatgtgatgagaaaacacggatgcaagaacatgatcttcagttcttccgcaacagtatacggagatccggcagagatcccgatcacagaaaagtgtccgaaaggagaaatcaccaacccatacggacgtacaaaaggaatgttggagcagattctgacagatcttcacacaggagatccggagtggaatattatgctgcttcgttactttaacccgatcggggcacacaaatccggaaagatcggagaagatccgaaaggaatcccgaacaatctggtgccatatattgcacaggttgcagttggaaaactggatcgtctgggagtgtttggcgatgactacaatacaccggatggaacaggtgtcagagattatatccatgtagtcgatctggcgatcggtcatgtaaaagcgatcgagagaatgaagaaagcgaaaggtgttcacatttacaacctgggaacaggcgttggatacagcgtactggatgtcgtgaaagcatacgaaaaagcatgcggcaaggagattccgtatgaaatcaaacctcgccgtgccggtgatattgcaacatgctactgtgatgctgcaaaagcgaaggaagagcttggatgggtggcagaacgcggaattgaagagatgtgtgaagattcctggagatggcagtctgcaaatccggatggatacagatcataaagcaagataagagaaggaagatgtactgtgtgtggtgcatcttcctttttcgattactttttgttggcccggtagtcagatgccagaattccatatacacaggcatctacaattcctttgttattccagtcggcttgtcttaaagtgccctcataaatcaggccgcatttttgcatgacttttccggaatttggattttggggatcgtgccaggtttcaattcggtttacttttacttcttcaaaaagaaaggcaatgactgctgtaaaggcttcgcttgtaaatccgcagtgccaccagcggctgccaaggcagtatccgatatgaactttttctgttttttcatttagttcaattacagaaatggtaccgataggttcgccgatttcttttggaataatggcccattggtaaaagtctggtttttcgtactccaaaagccaactttccagaactcgtttggtgatgtcaatgcttttgtgcgttggccatcttaaaaattcggttactttttcgtcactggtccagttatgaaagatcgcagaaagatcatccgcagtaaactttcttaaaatcagtcgttctgtctcaatggtttttgttccttgatgctccatatataagtcctccttcgcgtatcaattctgctgtttttgtttcgagcagtataccataaaaggtgctgattttaaagggaaatattttggatatagttgcctggatatagaagaaacaagtataataaaagaatggaagtgttgccggaatggtttgggcttcctgaatccagatatgtgatgaatatttgaaggaggaatcagggtgaaggactggtttacggtagaaaaaattgatgaagatacatatgcaattagtgaatatcagcactgggaagaaacacattgttatctgttgtgtggcacgaaaagagcacttctgattgatacaggtttgggagtggctaatatcaaagaagttgttgataaactgacaatgcttccaatctttgttgtaacgactcatgttcactgggatcatataggaggacatcaatattttgaaaatattggcgtccacattttggagaaagattggatatcagagaaatttccgatatcgctgcagcaggtgaaaaggaatctgacctgccgggagtgtcagtttccagaagaatttgatttggaaaagtatcagttatttcaaggagatgtgcagagtacgttttctgatggggaaattttcaatctgggagaacgaacggtgcaagttgttcataccccgggacattcaccgggacatcacagcttttcgatttcaacagatttggcagacaggattgaaagtgcatgcagaaaattagacaaagaaaagaagtggaaacagggaagcggaatctttgattttggagattttaaaattcatctttaataaaatacaaaaaggagaagcgtagatgatcattgaaggaaatgaaaaagaaaaggcagccatggcagaatttcataagggcaaccgaaaggaagggcttcgattacaggaggagtttgctgcagcctttcgagaagaatataaagagaaagatcactgtccgtgtaaaaaggcctgccgttatcatggaaactgtaaagagtgcgtggcaattcacagggcacaccaggagcatgttcccaattgcatgagagaattgatcaacaagaaactcaaaggattgtcagaactgacggagcatacgatcgcatatgaaattgaacctccgaaagagatattgaggaaggaagctcaataaaacaaattgatagaggcacttttacactttatcgaaaaaaagcttgacaacggaagtgcgctttgctaatataataaaaaacagaacgcactcggtttttaaaagaaggtgggaaacaaagtatgagaaaacaggtttattctcttttggtcgataacaatccgggtgttctgagcagaattgcaggtctgttcagccgaagaggatacagtatcgacagtattacagccggaacgacggcagatccgagatttaccagaattacagtggtggcatccggagacgagctgattttatcgcagattgaaaatcaggtcagaaaactggaagatgtcattgagatcaagctgttaaaggatggagaatctgtatttcgcgaactgattatgataaaggttcgcgtgacagcagcacagagaggtgagatcaattccattgcggatattttccgtgcgaagatcgtggatgtacaggaggagtccatgatcatcgaactgacagggacacagtccaaactggaaggctttatgaaccttctgaaagggtatgagattctggaactggcaagaaccggtatcacaggattgtccagaggctgtgaagatgttacatatattggctagatgaaaacagtatgctaaaggcaggagcctttaactataaaaacagaaaactgcggcagtgcagaaaatttaggaggaatgaaaaatggcagcaaaactttattatcaggaagattgtaacctttccgtattagagggacagacaattgcgattatcggatatggaagtcagggacacgcacatgcattgaatttaaaggaatccggatgcaacgtcatcatcggactttacgaaggcagcaaatcctgggcaaaagcagaagcacagggatttgaagtatttacagcagcagaggcagcgaaaaaagcagatgtgatcatgattctgatcaatgatgaaaaacaggctgcaatgtataaaaatgatattgagccgaacctggaagaaggaaacatgctgatgtttgcacatggttttgcgatccatttcggacagatcgtacctcctgcaaatgtagatgttacgatgatcgcgccaaaagcaccgggacatacagtaagaagtgaatatcaggctggtaagggaactccttgtctggtagcagtagagcaggattacacaggaaaagcactggatcgtgcacttgcatatggtcttgcgatcggtggagcaagagcaggacttctggagacagatttcagaacagagacagagacagaccttttcggagagcaggcagtactttgcggtggtgtatgcgcattgatgcaggcaggattcgagacactgtgtgaagcgggatacgatccaagaaatgcatactttgagtgtatccatgagatgaaactgatcgtagatctgatctatcagtccggatttgcaggaatgagatactctatttccaatacagcagaatatggtgattacattacaggaccaaagatcatcacagaagatacaaagaaagcaatgaaaaaaattctttccgatattcaggatggaacatttgcaaaagacttcctgcttgatatgtcaccagccggtggtcaggcacacttcagagcaatgagaaaactggcatctgaacatccatcagaaaaagtaggagcagaaatcagaaaactctacagctggagtgatgaagataaactgatcaacaactaaggacagtgaaaggcggaaagctgctcaccccaataagaacagccagatattgtgcttgcacaagtatctggctgttcttgttgagcagtcggcgtgaggaggcgtgcaaaaggaaatactatggaaagagaaaatgatttcagtcagggaagcattgcaaagaatattttaaatcttgcagttcccatgacgctggcacaactgatcaatgtcctgtacagtgtggtagacagagtctatatcggacacttacagggcgtatctgcgaatgcactgacgggaattggtctggcacttccgattattacaatcatcacggcatttgctaatttatttggaatgggaggagcacccctttgttccattgcaagaggcagccatgaagaagaaaaggcagagaaggtgatgggaaattcgtgttcgatgcttcttttcacagggggacttctgatgggaatccgtcttatattccgaaaaccgctgttgtatctgtttggagcgagcagtgcgacatttccgtatgcaaacgcatacatcagtatctatctgtgcggaaccgtgtttgtcatgatcagtctggggatgaatcagttcatcaattctcagggatttgggaaaatcggaatgctcacggtaatgcttggcgcatttaccaatattgtgctggatccgatcctgattttcggactggatatgggagtacagggagcagcccttgcaacggtgatctcccagggcttatctgcagcctgggtgatgaagtttctgacagggaagaaggcgattcttcgactctccaaaagagcaatgcatctggagtggaagcttgtaaaagaaatcatctttctgggaacatcgggatttgtgatgtctgttacaaacgggcttgtgcagattgtgtgtaatgcaacgctccagaggtacgggggtgatatttacgttgggattatgacagtgatcaactcggtgcgggaaattgtgacaatgccggtgacaggactgacggcggcatcgcagcctgtgattggatataattacggggcagggtgttatcagagagtaaaatctgcaatccgttttactgcggtcggatgtattgtttttacaacggttgtctgggcagtgttatttttagaacctcgtttctttcttcagatgtttaccaaagaaccgggaattttgcagtacggtgtttctgccatgcggatctatttttgtggaatctttatgatggcgctgcagtttgcgggacagtctacagcggttgcgttaaaccgtgcgaaacaggccgtctttttttctctgtttcgaaaggtcatcattgtcattccgttgaccatgctgcttccaatgatcggaaatctggggacagatggagtgttttgggcagaaccgatttccaatgttattggcggtacggcatgttttgtaaccatgttgcttacaatctggccaaagctgagagaaggaagttgctgttcgcagtaacagaaaaaatcggtggattcggaaaacaacttgaactaaaaaagttcaagttgttttttttgtgcataatgcacaaagaggaaggagaggaaaatgacaaaccgagagttgttcagagtaagcaaaaagagattatgtgaattaaccagtcagtattacgagccggtaacattgaaagaggtagcatatgaaaaagtttccaagcactttggatattttctattttttatgaatcaaaatcagcatgaggtaaaagtgtattttgacaggtatcgagatacaaatatccttcggattgagtgtaggcaagaagcttttgaaaaaatgtatcatccatctgatcaagaacttttaacactcggattgatcagaaaagaaaagtatgagcaactctgcgatgtgcataagggggaaagaaaatgtacgactggggaaaagaacaagaaaaagaaattgcaacaataaaggagagaaccatatacctgaatctttcagatgcagattgcaagagaatctcaacgtatgcagccaaagcaaatatcacagtatcacaattactggaaagttttattggagatcttgtaaatggaacttatacaaatggaagtgatgaaagagattgtgcccaaagatggtttgaacgctgtggttatggcatgtattctgagaaaacatttttaaggtatatattggaagaaggagatgatgtggagtttttgctgaatgatttagaaggtataaagaagagtaaagaactgatacaaacgctaaaagagaatttgcaaaaagaaattgaccgtcagcgagaaaatcctgaatatcaatacgaatgggaagaagaggataaagaatgtattcaaacggagcaggaagaattggatgcaacaattcagtctgtgaaagaatggtgggaagagtaccaggagtggaaaaagcaaaagaactggtgggatgttgaagaagatactgcggaacgaacatttgatgaagagctgataatcatccagaaatggtggaatacataccaaaattttttaggaaatgaaatggaataaatcaagatgttccgaaattcggaacgcaaaatagaaggagaaagcacatgataaaaattttatacgaacatagaaaaattattgaagaaatgtataacagccaggtgccgctcagcaggattgcagccagaattaatgttgccagaaatacactttacaaagaactgaaaagaggaggtgtaacgaaaccatctgatctgtattctgctgatttagcacaggagaatactgttattcggcaaattaaacgctgccgtttccatcagattaaaacgggtctttcagagcacctaacgatgggatgaagcatatatttttggacgcttcaggcacgttattttatgagaaaaaaccatcatgcagattatcttacatgatggtttctaaagctatccgag

SEQ ID NO: 6956 - DNA, 73454 bp, Unknown
  gut microbiota DNA sequence
gatcggaatatcataaacaaccgcgattcgaagcagtgcttttacatctggatcgtgaggctgtgcttccagaggatcccataaaaaaatcataaaatcgatctgtccttccacaatctttgctccgatctgctggtctcctccgagaggaccgctgcagtatcctttcacaggaagtcccgtacgctctgagatcagttttgccgttgttcctgttccgcacaggaaatgtcctttcaaaatctctttatttctgtcacaccagtctacaagttctttcttttttccatcatgagcaaccagcgcaatgtgctttgccttgccgatttccatggtcacaaaattatcattcagcatcttttttcctcctgtcttttaccttcactgtgcagcttcatccgtctacgccatctgttccatggaatcaaaacggatggctgcgatcagaccgattatcacagttactatcatactataaatcagagcgattggaaagactaaatccatacttataaagattcctgccagcgctgcggccatcaccccgattcccagcacgaacatctggaaaaacgctctcaccacatcctgtccggtacgtccaagcacatctcccaccacgcactgtgccagcaccttactgtacatccggttcgcctgaagtatcgtgtagatcaagatccccaggattacttcccacacatttacctgccacaagattccgatgggcacacagagtaaaactccatctacaaatgctttcacatgttccatcagtgtcgagtaccacagctttttcaccggactgtccggaatcagataaagatagggggttttaatctcagtctcccactttccaagatatccgctgaagatcagagtcatatatgccagaattccaagcagaaaaatctgagggatcccgctttcctgtgctgtctctcgcatcgcaaatgccataacgatgcctatcacgagattcaaaagtgtcatcttcgagaaaataaacgttctttcttttcgatattccaaaagctggcggtaaaagattgcctttgctccgactgcctgataacggactgtcatatggcggaattttttcttcttctcctccagccccatgaccatttcgccgtttttcttccgcctgatcatttctgcataggtatctgcaaattttgccgcgtcctcataataatctccattacacggcatccggtatgccaggatcacaaacaggatcgtcgtcagaatgtacagaaccatccctgcagcattgagcagatccggacttaaaagaatcagatgaaatgcggaaatctcccatccgataattggaatcatccgcaggatcggccagtcaaaaaatgcagaaactgttgcaaaagatacaccttttttccagaaatacagaacgatcagtcctgtaaccataagcagaaacaccttgatcccaaggccgatccattctcttgccttctccgaaatccgttcactggaatacaggcagaccatcaggctgatctccagtgccagattacagatacagattcccgcaaacagcagaattctccacagactgacatcaaaaactgtaattcctgcgataataaatatcagaaagaacaccacactgctcagataattcatccaggctccatggatcagcacgacctttgggtccacaggcgcattgaaaataaaatgtgcatgtgccgggcggaaaagaattccttttctggatgcatatgacataaaattcagcaaaaacaaatacaatgaccagactgtcagaatgatcaccattccttttgcactgtcaaacttcatctgcactgctaattctgccagcatcacagccagaaaaacagcatatgccgcacaggctaacacaaccagaagtgtgagcggctttttcactgcttttttcaaattgttgatcatacttcgttttgtcagatacaatagcgctctcacgatttttcaccacctgtcatttcaaagaacagcgcatccagatccttgtctcccacctcatccttccggtaagaaccaatgatcttactcttttccatcacaaacatcatatcccacagctcttctaccatctccagcatatgcgtgctgatcagtactgtaactccgagagctttttgttccagcacgacctccttaagctctttaatcgcttttggatccagccccaccatcggttcatccagaagcagcactttcggcctgatggcaagcgcacagcagatactcaccttctgcatcattcctttggacagctcatttcccagtttatcctgcttgtcatccaggtcaaaccgggcaagcagcgcttccacctcttcatccgtaatcccgctgttgtaagcttttctcatgtattcaatgtgttctctgacgctgagtgcatcaaacatggcaggcatctccggaacataggcaaactgtctctttgcctccacacttctggcaggaagtccctgaattccgatccgcccctgataccgaagcagacctgcgatacttttgatgatcgtcgattttccggctccgtttggtcccagaaggatcccgactgtaccatccggtacaaaaaaactgacctcatccaccgccagagactttccataggatttacttaatttctgaacttccagcatatcatttcctccatcgtgttttacacagctcacagcctgtctgtgcaggcacagcagctgtctgacgggcttatcattactggtcacaccaattacggcttatcacgcaaaaaagattcccgttcattgtactgttgatttgatacaataatacgagaatcttttctgtttgtcaactctttattcgtctgctttttcctgtgtatacaatttgaacaatgcctgtgttccctcatctccaaggccttctgcctgcagctcttcatactctgccagcacctgacttaagacattgagatccagaccgcttatattggattcgatcagcgccagtttcatatctttgataaaatgcttcataaagaagcccgggcggtaatctccttccagaatcttcggtccgaacagatccagctgacggcttcctgccgcacctgtagacacagaatgaagcactgtctgcagatccaaacctttcgcctgtgcataagcaagtgcttcacatactccggagagcgcgcctgcgatcatgatctggttcgccagcttacagtgctgtccgcatcctgctgctccctggtagttaatattggttcccattgcttcaaacagaggcatacatgcttcaaaatcttctttgtctccacctacaaggatagaaagtgttcctgcttttgcgccggtatctcctccggttaccggggcatccagaacatgaaatccccgcttattcccctcttcataaatcttttgggcaatctgcggactggtggttgtcatatcgatcagatacgcgccttcttttgcgctgtccagaatattcccctgatcgaaatacacttcttccacgtcctgcggaaatcccacaatggtgatcactgcctcacagtctttcacgcagtctgcaatgctgtcatgaaaggtcacaccctctgcgatcacatcttctacctttgcttttgttcttgcataaatgtgcagatcaaatcctgcctttttcaaattccgcaccatggattttcccatgatcccgactccgataaacccgatctttttcattttattttccctcactattgtttttctacaacttcaccctgttttttataaatgcttttcgccggtacaaatcctctcacagaagaaagcggataaatgttcgtatggcttcccacaacggttcccggatttaagacacttccgcatcccacttctacttcatcgccaagcatcgctccgaattttttcaatccggtctcgatttcaccttccggtgtttttacaattaccagcttcttgtctgacttcacattggatgtaatagatgcagcacccatatgcgatttgtatccgagaattgagtctcccacataattgtaatgcggaacctgcactttattgaacaggatcacattcttcagttctgtcgaatttccgactactgccccctctcccacgattgcatttccacggataaacgcgcaatgtctgacctctgcttcttttccgatgatcgccggtcccgtaatggatgcgctttttgctactttcgctgttttggcgatccagatattctctccctgtttttcatattcctcttcgctgagtgtatttcccagttccacaataaaccgggagattttcggaagcacttcccacggataggtcactccctcaaaaatatcttttgcaattgtctcatccaatgtataaagttcttttactgtcagttctttcataaattaactctctcctttttgattctcttttttgcgcgatgtccggtttgacgataccggttttttataatattttgcagctgcatcgtaaaatcctttcagctgatattgattgttcagccgctttacgccttctgtcctgctgataataaaatgatccagcttctgcatatactcatccggagtgatctctccgtctgccacatacgtcagtcctttctcccagctggccgtcagttccggattcaaaagcgaacgaatggactggttcaccacatcatacaccatctctccctgaagagtcggagtgatgatctgggtcttcttattcaggctcagatatttgatatggatcagctttttcagaatttccgctctggtggcactggttccgataccgcttcccttgatctgggcacgcagctcttcatcctcgatcaactgccccgcgttttccattgcaaggatcatggatcctgaattgtagcgcttcggcggagaagtctctccttccttcacatccagcgcacaaaccggcaggactgctccctttttcagattctgcaccacctggaaaaattgtggatccatgctctgttctcctccattttgcggaattcccactactttcagatacccttcttctgccagaaccttaaaattcgagaaaaagctctcctcccgtatctttacagtcaccgctactttctgatatacagcgggcggataaaaaatactcaaaaaccgttttacaacacagtcatacacattccttgccgcctgggagaccgacgaaagtgccgaaagtccctgtccggtcggaatgatcgcataatgatcggtaatctgtttatcattgacataacgggtctttaccaggttcttatacgtttccatagccgcgatttcttttaaatatactgccacgggcccgtattttgacagcccgttcagatttttactgatttcctttgcaacagcagtagacaacactctggcatctgttctcggataggtcaccagcttcttttcgtataattcctgcacgatccgcagtgtctcatccggactgatcttaaaccgcttggaacaatcattctgcagttccgcaagattataaagaagcggtgggttcttcttctctttcttcttttcgatcgccgctatctgtcctgtgacaggctctttctccttcagatatgcgatcagctcctgcgccttttctttttgtttgaatccattctctttgtacaggtcaaaggattcgaaatagcgggagcctttgaccgctttccattctccctcaaatgtttttccctcagcttccagagtcgcaagcacacgataaaatggtgtttttacaaattcacggatttcccgctctcttcgcactaccatccccagcacgcaggtcatcacccgtcccactgagactaccgcatactttgtcttcaaatatccggaaatactgtttccgtattttaatgtcagaagtctggaaaaattaatccccatcagatagtcctcttttgcgcggagataggccgaagcgctcagattatcatactctgataagtcctttgcctgccggatcccgcgaagaatctcctcctccgtctgcgaatcgatccagacccgttttctttgttttcctgtcacatgtgcttcctgctccaccagccggtagatatactctccttcccgtccggagtcggtacacacgtagatcgtgtccacatcctgtctgtttaaaagggagctgacgatctggaactgctttgccactcccgggatcacttcatactgaaactcctgcggaagaaacggcagtgtgttcaaactccattttttcagtgccggatcatacacttccggataactcatggtcactaaatgtcccacacaccaggttacgatggcttcttctgattccagatacccgtcctttcgctttgcatttaattttaaagcctttgcaaactcctgcgccacacttggcttttctgcgatatatactgctttccccattcttatttatacaatcatctttctgtttattctattctttctgaaacaaccgtctcatcttctgaagaaacgtctgtttctgtggtttcttctccactcgttttgccatcagtgcttctttcatgaagatttcctgtgaattgatggcttttccttctaccttctttttgcggtaggttccgtcacttgtcatcgctcttgctttgacattatctgcaagcattacatgcaggtttctcaccagccgttttttgatctcctcgttgagaatcggacatgccacttccacccgtttctccgtgtttctggtcatcatatccgcagaaccgatgtacactttctgctctgctcccgtgccgaacacaaacactctcgggtgttccagatagcggcctacaatactggtcacagtcagattctctgtctcttctgcaattcccggcagaatacagcagattccacgcacgatcagatccaccttcacacctgctctggaagcctctgccaccttccggataaaatccatatccgtcacagaattcatcttcatcacaatccgtccctgttcgcccctttgaatctcttcatccatcaacgccagaaccttctgcttcaaactggtcggagatacgatcagattcttataggttccatccagattcccaatggacatattcttaaaaaatactgctgcatcctctccgatcgactgattcgcagtcatcagcgaataatccgtgtaaaattttgcggtcttctcattgtaatttccggttccgatctgtgtgatatatttgatctcatttttactgcggtatgtaatcagacaaattttggaatgtactttatatccgtcaaacccataaagtaccctgcagccggcctcttccatccgttctgaccattcaatattattctgctcatcaaaccgggcccgcagctcgatcagagcggtcacttcttttccattttctgccgctgcacacagatattctaccagtcttgtctttttggcaagacgatagatcgtaatcttaatggtcatcacatccggatctgtggatgcctctttgatcagcttcaaaaacggatccatgctttcatatggataggacagaagaatgtcccgtttctttacctgagccatcacgcttccttctcccacctgtgcggcaggctgtggagcaaatggtacatcaaccaatgatcgtttcatggaaacaggtactttatccataattgaaaagatataatccagtttcatcggaattttcgttctaaaaatgcaggcaggcgtaattttgaatttctcacagagatatttctctgtctctttattcagcggattggccacttccagacgtaccactgccattcttctgcgcttattcaatgtctccttcattatatagcgaaagtcttcattgtccgcatagttctcatcgtcaggagaaatgtccgcatttcttgtgacacggatgtatgtgatatccgatacctgatactgttcaaacacaagatccagatactccatgatcactttttccatccggatataacgaatgtcatgtcccggcagataaatcacatctgaaataaactgaggaacaggaacgatccccatcatttttttctcttcaaaacgaagcgttgcgatcacatacagttctttattgagcaaatgtggaaacggatgatttgcgtctacgatctgtggggaaagcagtggaagcacctgttctttgaaataatgtttgacatactttttttcctgtgcctccagctctttgaaatccagcccacagaccccgtatggatgcagctgtttttttatctccgcatacgtcttatcccgctctttataaagcggggccactgcctcataaatcttatctaactgttctttcggagtcatccccgatctgctgtctaatgtcttgctgtccacagatgccatatcgtagagacttcctacccgaatcataaaaaactcatccaggttactggtgaagatcgatacaaatttcatcctctccagaagcggaacactttcatcttgcgcttcttccagcactctctgattaaagcgcagccacgataattccctgttctgtgtgtaattcaaaatttcttttttcatatgtttctccttctgccggtttcacatgaatactccacattgtatcatgttttccatgcaaaatatacctatttttcgagatactccatgagacggtcatactctctttccatcagatcatatccgtgatgataaaatgccatcagatgctcctgacttctctccagtctggacaccggctttacctgcggccggatcacaaaaatctttccttctctctccagattctccagctcattcagcgtccggttgtaatacggtgcacgccgcaaaagagtccgcagaagattcggataagatctgtaggctctgcgatacatcttttccaccgcttttgaaaccgccttcttgcgatatccccgatttcttgtcagaacaacgatgatcttctcatttccaatatccatcgctctccgaatcggaatagaatccgcaagtcctccatccagatacgggatcccatcgatatttacaatcggacaaagcagcggcatactggaggatgcccggcagattttcatcagcctgtcgggatcttgcgcctcatccatgtactccgcttttcccgtcacacagtttgtcgtgaccagctcacagttcatctctgatcgaaaataggtgtcaaaatcaaagggataaatctgttttggataaatatcaaaaatcatatccatattcatcagacttttttcttttataaatttacgcaccccgtaataataggacagattcttatctgtggggatcatacagtctcttgtccgtccgggctgccttgacacatagtccaccgcattgcaggctcctgccgaaacaccgatcacatgagaagtgtaaaactcctgctccatcagataatccagtactcccgatgtaaatacgcctcttgttgctccgccttctaataccaaagttgctttttgcatatccatccctcactttctttgttccattatatactttttccactttttcgcaaactcctaatcctgttaaatttttgcaaaaacacaatatttctttgtttatttcatagaaagcatactcctgaccttgccatgtcgtgggttctcatgttaagataagcgttggaattattactttatataataaataaggagtaaaaaatatgattagtgcaaacaatgtcactctgcgcgtcgggaaaaaagcgctgtttgaagatgtcaatattaaatttaccgaaggcaactgttatggtatgattggagccaacggtgccggaaaatctacttttttaaagattttgtccggacagatcgagcctaccaaaggggaagtaaacatcactcccggagagcgtctttctttcctgcagcaggatcactacaaatacgatgaatatctggtactggacaccgtcatcatggggaatgcacgtctgtacgagatcatgaaagaaaaagaagtcatctatgcaaaagaagatttcacagatgaggacggaatcaaagcaagtgagctggaagcagaattcgcaaccatgaacggctgggaagcagaatctgacgctgcaactctgctcaacggactcggcattgagacagacctccactacaaatacatgaaagacttaaagggtgcagaaaaggtaaaggttcttcttgctcaggctttgttcggtaatcctgacatcctgcttcttgacgagccgaccaaccacctggatctggatgcgatcgcatggctggaagagttcctgatcaactttgagaacacagtcattgtggtatcccatgaccgttacttcttaaacaaggtctgcacacagatcgcggatatcgactatggaaagatccagctctatgccggaaactacgacttctggtatgaatccagccagcttctgatccgtcagatgaaagaagccaacaaaaagaaagaagaaaagatcaaagagctgcaggactttatttcccggttcagcgccaatgcttccaaatccaaacaggcaacatccagaaaacgtgccctggaaaaaattgaactggatgagatcaaaccatccagccgtaaatacccttacattgatttccgtccaaaccgtgacatcggaaacgaagtgctgaccgtggaaggactttccaaaaccatcgacggagtcaagattctggacaacctgacatttacactgaaccacgatgacaaggttgcatttgtaggcggaaatgagcttgcaaaaacagttctgttcaaaatcctgatcggtgagatggaaccggatgaaggtacttacaaatggggaatcacgacttcacaggcttacttcccgaaagacttcggcggagagttcgataacgattacaccatcacagaatggctgacacagtactctgaaaacaaggatgccacctatgtgcgggggttcctcggaagaatgctcttctccggagaagatggtgtgaagagattaaaagtcctctccggtggtgagaaggtacgctgcctgctctccaagatgatgatttccggcgcaaatgttctgttattagatgaacctaccaaccatctggatatggaatccatcactgcgctcaataacggtatgatcaaattcccgggagtactcttatttacttcccgtgaccaccagatcgtgcagacgactgcaaatcgtatcatggagatcgtaccgggcggaaaactgatcgataagatcacaacttatgacgaatatctcgaaagcgatgagatggcaagaaagcgccagacttacactgtcgagacagaagaggaagattagaacattaaaaatacggaaagaatccccggatgttgggttctttccgtatttttgttttaataatatagtttatcttcttcgataattttggggatgcccccctctacttccacgatcgtcaccgcacagttctttggcactcccatctgccagaattttgccggactccattcatttttgatacagtttttcattgccgtgactgcagcaccatgcgtagaaagcaaaatcatcttatcctgcaattctggattttgatataacgctttcagaaagccgtccactctctccatcaactgtccaacggactcaccctctccctttgggatgtaatttgcagtatcatcaaagaacttcacaaactccgcactctgcggatccagaccttctcctcggtacacaatgccttcataatcaccaaagcagatctcctgtatctgaggttcctcgatcaaggggatctttctcccctgcaaaacaatctgtgctgtttcttttgctctggataaaggggacgtatacgccagatcaaaagaaatcccccgcagtccttctgctgtcttttctgccagttctcttccatatgcattgagaggaatatctgctctcccctgcactttcttcgctttattccaattcgtttcgccatgtcgtaccatatataatctcaccgttgttttcctcctaagatatgttcttttatccgatcactctgtcccttagtatacgcatatttcctgtctcccgtcaaccgttctttgttcctttccgcttgcaaattcgcctgattttgtctataataatgacacataaaaaaacaaggagattaccatggaaaaaattacaagctttacgatcgatcacatcaaactgactccgggactttacgtttccagaaaagatcttgcaggagataccccggttaccacgtttgatatccgtatcacaaatcccaatgaagaacctgttctaaatactgcagaagtacataccatcgagcatcttgccgctacctttcttcgcaaccatgcagaatatggcccaaaaacactctatttcggaccaatgggatgccgcaccggattctatctgcttcttatcggtgattatgaatcctgcgatattcttcctttgatgaaagagatgtttgcttttatcgcatcttacgatcaggaagttcccggagcctgtgcaaaagactgcggaaactttctggatatgaatctgccgatggccagatttgttgcacgaaaatacctgactcaggttttgaataaaatcaccgaagagcaactcgtttatccacaatagaacaggagcatatcatggggaaaaaacaaacatttgcatctgatacttcccagcgaagtatcaccgactggattcgtgcactcctggttcttcttttggggctgatcattgcgcatcttggtgttacgctctttttgctctcggcacttggcaccgatactttcacagtatttattcaggggttatcccgggttgcaggattgtctgtcggaactgtgcacgtcattgttctgtgtattttgatggttctgatgttgttaacaaccaaaggatatgtcaaacccggaaccattgtctgtgcattttgcggaggccctatcattgactttttcacctggtgtttcaaagaatacatcaatgcttcttcaggaatgccggttcgtatcatcagcgttctggtcggatgtgcgattctctctttgggaatgtctgttgtaatcaacagcaatgccggcaccggaccgaatgacctggttgccatcatcctctccgacaaactcgaacggattgaatttcgctggatacgaatgggatgtgatgctttctttgtaagcctcggatttatccttggcggtacagttggtgtcggaacaattatcgccatttttctgacaggacctatggttcagttttggcttccaaaaacaaaagttttactgcaaaaaatcagagtgtaaagcatcatgctttacaccctgattttttatcacctttttttaaaacttcctgccggatatacaaaaaagttttctcctcaccctgttttgccaacatgatcaacagtttttcaagcagcgcttctgtttcctcatgcatcagatactgccctttccctcccaggaaataatccagaggatcccggtctgtataggcagttccgcgatataccttgcttgcagcaattcggtccagaaacatctccaccacataattgaccggcattttcattccttcgagcacggcaccatgcgttccgtaatcaatccagtattcataatgatgcttattgcgccctttatgatgcagccaggcagaagaataccccttttcctcccgctctgcattattcggacttctggttccctggtaatatcgacaccccacacgaaactctgtccatccgtattttgacagatcatggagcagcccctgtctgtacaaacctacctgaaagcatgccttcatcacaaggagcttatgttttgtgatcgtaccaaaatgtcggagtgcgttcatctctgaatttcctttctatctgccttgcagcagaattattgtccttgcctttacctctatcatcttctgctctttcagacactctgcctcatctggcacctcttctgttcctgcaacctgataccatttcatttcctttttcagagccggaagagcaaattcgtgtgcttcccagtgcatattatatgcgacaaaccaaaatgtatcttcccagctgtagagaactccaagctgtctgctgactactgcatcctgtacctgccatgcactttctccgtgataagagacatccggaatcccgcacgctgtccgatccaggccaagcagtgcctgtctttgatgaaagacaggattggattttctaagggcgatcaatcgtttcacaaatcgaaacagatcttcataacttttctgtcttccccagttcagccatgcggtctcattgtcctgacaatacacattgttattcccatcctgtgtgtttccaaactcatctcccgccagaatgcatggtgttccctgcgaaagcagaagcagaagaaaagcattcttcatctgatttttgcgaagtgtcatcacacttctttttctgcttggtccttccgtaccgcagttccaactgtaattataatccggaccgtcctgattgcgctctccgtttgcctcattatgcttcccgtcataagagaccaggtcacagagtgtaaaccctgtatgtgaagtaatgtaattacagcagccgtcttctggggtccggcggcagagctgtcgtatcacttctctgaccatgccttcatctccctttaaaaacctgcgcatactgttctggaagccctcttcttttttgaagatctttgctccctttaagatcggatccgcattcagactgtcccatggcacattgtaaggattcaccacaaacccatccacatgatactccagaagataaaaacgaagacattccaacgcagtctggggaagaatcttttctgtaaacggcatttccagaacaacttcgattcctgctttgtggcacgcttttaccagatcttttaattctgtctgtgcatcatcaaaagctgcatatgcggctttcggtgcaaaataatatcctgtgccatagccccagtaattccggtagcttcccatatcttcctgaaactcatacaccggcatacactgaatctgattgatgccaagctctttcaaatatggtaatttttcccggacacccagaaatgtccctttatgctttactctggaggaagagtgcatcgtaaagcctcttacatgcagactatacgcgatcacatcctgcacaggaatctgtggtcttttatccccttcccagtcatatcctctctgcagaaatcttcctcttatctgatgccggttgaattcccagccggtaccgaacattttatgtcccgcgatctctctcacgtaaggatccagacagaccgttccgtcaattctgtaattatactcatactgggtttcctccagatcttccagcgccaggaagcggacttctccgattccttcttctgccggcatttcgattacctgatctggttcgctttcgccctttttatacaagagcagttcgcaagatacgtcttttggaacacatactgcaagattcacacttctgcctcttctggaagctccaaaaggctgtggatatccttctgtttttttcatatatttattcctcactgccagccatttgttccatacatctcaacattatctttcccgataaaaaatgtatcgatatacgttgttttctcataatcctcatcattcaaaatagcctcgccaatctttgccgcctgctttccaacattgatcggagactgcgctccggtcccggcgatcattgacttttcatctgtaagttcacttttcatctccggtgagccgtccactccataaatcttcagactgctttttcctgcctcttttgctgcctgaagtgcaccgagtgccatctgatcatttccgcacatcacagcatctacctgtggattttctgccaaaatctgtgccattttctcctttgcactctccttggtgccgccggcatctgcacgcgccactacttcaaatcctgcatttttgatcgcttcttcaaatcctgtgatacgctcattcactgagttctgggacgggcattccaaaagcactacttttccgccgtccgggcactgtgtcttcaaattctcaccgcagactgcacctgcatttttattgtcagagccgatatacgcagctgtcagatctgtgtccttcacctgcgtatccacattgatgaccggaatatctgcctcatccagggcttccagcgcaggcttgatcgcttcccagtctaccggtgcgagaaagactgcatccactccttcatcgatcatctcctgaatctgctggatctgcttattcacatctccgtccggattttttaccaccagggtatctccctttgcttccagttcccctcggatcgattcttttacaacatcataatatggattataaatatcaatgcagctgtagccaaatgtgtgcccttctgatgtttctgtatcctgtgcctgctcgtcctcattttctactacagcgttatcttccggtgtacccacattctttttgcatccggaaagtaccatacaaccgaacataactgtcacaaagactcccaaaatttttctcttcatctattgtcctcctgattgctaagactctgtttttccaacatatatgcataatctattttattctaccctgtttttcagcattgtcaatagaaagaacctgatgtttttcttgctttttcctctggtttttgttagagtaggcatatcaagaaaaaaggagaacgtgctatgagcgaaaacatgaatgaaacaatgaatgaaaacgaaggtgtaacagttactctgacactggacaatgacgagacactggagtgtgccgtcctgacgatctacgaagcagccggcagacagtacatcgcactccttccgctcgatgagaacggagaagagtccgaagaaagcgatgtgtacatctaccgtttctctgagacagaagacggtgagccgaacctggaaaacatcgaagatgacgacgagtacgatgctgctgccgacaaattcgatgagtggatggattccctggaatttgacgagatcgatcttgacgctgagtaagtcagacgccctcgaacagttcctctacaaagcgggaaggagagatctcctttccgttttttattttcacatatgtgattttcagcacatcttttgcccgggtcattcccacatagaacagcctgcgctcttcttctacattctgctctttctctgctttctgataaggaattcgtccctcgtttgcctcgatcaaaaacaccgtatgaaactccagccctttggacgcatgcaatgtcatcagacggacaccctcctggttctgttctttttgctgttctttctttttcagtgcttccgtatattcttccacatggacaaaccactcttccatcgtctgaaacggctttgccgcctcttcaatctcagagagtacttctcttaaatccgcagctttcatgtttttcgtagtcgcatattcccgcagaaattcgtcatatccgatttttttcttcaaatactggattgccgcatatggagccattttcgcaagcattttcaaatcccattcaaactggtcgatccggtcctgcatccactctttatcacaatagaatttccgcatctcctcaaaagaaaccactcttcccgggaggcagtctcttcccagataccgtttcggacgattcatgacctgcaggaaatctttgcgctcacgctgccccattgccagcctgaaatatgccataatatcttttgcaataaaatgattgtacagattcggcagatgttcccgcatctggaatggaatcttttcatcgatcagagcttccacaaccgccctcgcatctgtgtgaacacgaaagagtactgcgatttcctctgccaaaattcctgtttccatctgttttttgatctgttccaccacataagaagcttcctccaccggatctttcacttcctgtacatgcagtgtctccccactttctttccatgcccggatttttttgtcaaaccgtacctcgttgtttgcgatcactttcagagaatttttgacaatatttttcgaagaccggtagtttacatccaggagaagctgttttgcatctggaaagtccttctgaaactgaaacatcagtctggaatccgctccgcgaaatccatagatcgactggtcatcatctcctaccacaaacagattgttttcaggcgccgcaagcatccggatgacatcatactgcacctgattgatatcctgaaattcatcgatcagaatatagcgaaacttctcctgccattttttcagaatatccggccgttttatgaacaggtctctgcacagcagcagcatatcatcaaaatcaattttccgctcttcgttccgttttctttcgtattctctgtatatctcccggaaagtttccttcccgcagatcgtcgtctcatattcttcaatcttcagcccgttgtttttcacgatcccgatctcagaaataatttctttcaggaaatcttcctcttcaaattcatcaatctcttttctgttgacgatctgaagcagcatctgccgtttttcttcctctgacagaatattctccggtccgaaccgatatgcccactttaaaatcccataataaattccatgaaatgttccgaaggtgacagcagggcgagtccccttcatcgctgaaaaaaagcggttcttcatctccactgctgcatatttggtaaatgtgatgaccagaatctcttccggacttacatgatacgtctggatcagcttctggatcctgcccacgatcgtgagcgtctttccggaacccggtcccgcaagaacaagacacggtccctcattgtgagagaccgcctcctgctgagcctgattaaaactcataaatacctctttctaatttgcctggagtaatgcgataccggcacggattctctttaaggattcttcctttccgagaacttccatcagttctgtcgcaccgcccggtgtgttctgttttccggataccgctgttcggatcggccacattacaaatccgatcttcactcctttttctgttacatatccttttaatgtttcaaacaacgcgtcattgctgtaatcttcctgtgcttccaggatcggaaggacatcgtttaaaacttccagagaattctctgcatttgtcttcatcttcttgtgtgtatacatagcagtgtcatactcaggcagctcttcaaagaaatcgatctgatctttaatatccgggaagatttcaattctggtcttcaccatcttcgcaatctttttcagatcatagtcttttgtgatgacttctttcagatacggctctgccatctcatagaacttgtcttcctccatggctttcatgtattccccgttcatccatttgagttttaccggatcgaatacagccggtgacttgctcatatggcggtaatcaaatgcctctaccagatcctccagcgaaaagatctcgcggttgtccgacgggctccatccaagaagtgccacatagttgaccactgcttctgaaaggaatccctgctcgatcagatcttcataggaagaatgtccgcagcgtttacttagttttttatggttctcatccgtgatcaacggacagtgtacataaaccggaatctcccatccaaatgcctcatacagacggttgtatttcggtgcagaggaaagatattcatttccgcggacaacgtgtgtgattcccatcagatggtcatcgatcacgttcgcaaaattgtaagtcgggaatccatcggatttgatcaggatcatatcatccagttctgcattcggaaccgtgatatctccgtaaatctcatcgtggaatgtggttgttccctcattcggtacgttcagacggatcacccaaggttttcctgctaccagattggcctctacctcttctttgctcagccccagacagtgcttgtcatacacaacgatatctgttccgtcttcagaaacagaagtcttcagggaatccaggcgtgctttatcacagaagcagtaatacgcgtcgccctgctctaccagctgctttgcatacttcaaatacactccggaagcatttctctcgctctgcacatacggaccatatccaccatccttgtccggtccttcatcgtgaatgagacctgtcttttccagagtacggtaaatgatgtccagtgctccttccatgaatctctcctggtctgtatcttcaattctgaggataaagtctccaccctcgtgttttgcgatcaaatatgcatataatgctgtacgcagatttcctacatgcatccgtcctgtcggacttggtgcaaatcttgttcttactttactcatctttatcttctccattttctatttacgtcatcttttctattatatcttaactattccgccttgacaaggggatgtgaacccggaaaatggcatccacaataaaaattgccagtgcaatcatccccgcaatctccagtgtctgcagcagataataggcacatcctgccctgtcattggcaacgatagaataggcaattctgtacattccggcccccggcacggtcggcaggattcctgcaatcagaaacaccgtcaccggcgctttgaaaatccttgcaaaaagatgtgccataaacgcaattgccagcgcagaaaagaaagaagccggcaccacatccactccacggtgtgtacaaagcagataaacaccgcctcctattgctccgaccacacccgtctgccacagatattttccgggtgtctccaaaagtacagaaaacgcaatgatcgcaacaaaacttcccaccactcccatcaacacactcatacgatacctcctacaaaaatcatcccggtacctgctccaagcccgattgcagctgctgtcaaaaatgcctccagtatcctggcacctccggaaatataatccccccgcagcgtatcccggatcgcattggtgatcgctacacctggcaccaggggcatcagagaactgatgatcacgatatccagattccagccggatgtaaccctattcacacaggcagctgtcactgctaccccgaatgcacagattgcattcaaaataaagctgctcatctggatttttttgcccagtgtaatcaaaaatgccaggatacatcctactgccgcagagaccagagtctctttcactccccctccaaaaagaggagcaaacccgaccggaaccagaatcgtcgccagattatataccgccactgaatactgttttcccttgatctgtttcaactctttatatgtttcctcaactgtcatctctcccctgcagtatcttctggatatttcatttacctgcacaatacgatgcatattcgtcccgcggtcatgaactctgcgcatagcggtgagcatttccatgtccggattatccaaagtagcaacaatccctgtcatcataacaaatgcctctgccacttctgttctcgcggtgttgagaatatgcttcatggtatcctccacacgataggtctccgctccacttctgagcatgatttctcctgcaagaaccgcaatattcaatatctgtttatattccattcttcccctccatgatctcgcagcctgccccgtctccgaatattccttcatcacacaaaatcgaaatacagtttctcatatctattttatccaggtttgtattggcaaatgcagatgcacggatcgaagtcacatccttgggcatctcaaaaattccagttcttccggcaggaaacgctgccagctctgttccggaaaataaaatcccatctcttgccgtatattcacctgtgcctcctgcttcgatccatgtcagttctcccagttcagaaaacgcaccgttttctatattctgaatattctccggaatataaatttcaaaaatgccggttccaactcccgaaaacgttcctcttcgaattccaatacaattttctgacggcagttccagatatccatccatcatctcgctttttgcagggtcaaatccacagatcattccctcctgatcaattttgaacccctgataatatatatacgcctctgccggagactcttcctgtgtcatatcttcccctggtaaggtattcacaatttcttccggcatcgtctcaggaatcactggctgtatagtctgactctgcactgtctccaccggttctaccgcttcttcttgtggcatggctgacgaagcttcagctactttctccgtttctatctgcacatgtttctccatttctgccagtgtataggtccggatactctcctgttttaccatctgtcccaaccggatcggaacactccatcgtatcgtttcacccgcagtcgcagcatatgacctcatatcttcctgtaacggtaccatactgacggcatcaccgattccaaccaaaaggctgaccgtcacaactcctgcaatcactttctttaatccatccggtatgttccagatatgctgtttctcccaaacgcaatcgccacttgttctcattctttttccattctccctgctttttctttggtatgcgaaaaaggaatgctgctcttttgcaacactccttctcctttgcctgttatggcaaaactaaacattgatctcagcttttactccgagaatttctttattttcctccagaagcggataaatcacattatttaagtacgactctacctgctctttcgcacgacctacatatttctgcggttccatcgtctctttcagctcttccagactcatgttgaacgcaggatccgctgcgatcaactccagaagattgttgtccagacctttttctttgacattgcgtccggcttccatggaaagctcacgaattctctcatgcagctcctgtctgtctcctccggcttttaccgcatccatcatgatattctctgtcgccataaacggaagttctgacatcagacgtttctcaatgactttcggatatactacaagcccgtccacaacattcaggcacagatccaggattccgtcgattgcaagaaatccttccggcacactcagtctcttgtttgcagaatcgtccagtgttctctcaaaccactgcgtcgcagaggtgattgccggattcaatgcatcgatcatcacatatctggaaagagacgcgattctttcacttctcatcgggtttctcttatatgccatggcagaagaaccgatctgtgtcttctcaaacggctcttccacttctttcaaatgctgaagaagtcggatgtcattagagaatttgtgcgcacttgccgcaattccggccagtacattcaatactcttgtatccacttttctggaataagtctgtccggataccggataacatgccttaaatcccatcttttctgcgatcattggatcgatcttatcaatcgtctcctgatctccgtcaaacagctccagaaagcttgcctgggttcctgtcgttcctttggatccaagaagttttaaacttcccagaacataatccagatcttccagatccatctcaaattcctgcagccagagagtcgctctctttcctaccgtagttggctgagccggctggaaatgtgtgaatgcaagtgtcggctgacatttctgtgcatctgcaaattttgccagttctgcgatcacattgaccagttttgttctcaccagctttaaagcctctgacattacgatcatatctgtattgtcccctacatagcaggaggttgctcccagatggatgattcctttcgctttcggacactgcacaccatatgcatacacatgtgacataacatcatgtcttactactttctcacgctcttttgcaacatcgtaattgatgtcctccgcatgcgctttcaattcttctatctgctcgtctgtaatattcagtcccagttctttttctgtctctgccagtgcgatccagagttttctccaggttctgaactttttgtccggtgaaaagatgtactgcatctcacggcttgcatagcgctcggacaacggacttacataacggtcattgctcataatcgtattctccttttttcctattcaaatgccagactgatatcttctcccggcacctccatcggataatttcctgtaaagcaggcatcacaaaacttcagatcgcctaccatatcttttaatttttctacttccatatagcccagagagtctgctccgatcatctcacagatctcctctgttgtatgagagtgcgcgatcagctgctcattagacggcacgtctgttccgaaatagcacggatgtaaaaacggcggagaactgattctcacatgtacttctgtcgctcctgctttctttaacatcttgatgatatttgcacaggtcgttcctcgaacaatggaatcatccaccataacgatccgcttcccttttaccacttccggaatcacgttcagcttgatcttcacactggacacacgctcactctgtttcggcttaatgaatgtacgtcctacataactgtttttatgaaacgcggttccataaggaatcccggactgctgtgaatatcccatggcagccacaaggccggaatctggaacaccaaccaccagatctgcctctaccggataagactgtgccagtgcttttccagcaacaattctggaatgatagactccgactccatcgatcgtactgtctgttcttgcaaagtaaatatattcaaaaatacatctcgcacgtttttcttccggcagcgccatactcatgtccgaagacatgccatgctttgtaatacttacgatctcacccggaaggacatctcttacaaactctgccccgactgctgcgatcgcacagctttcagatgccagaaaatacgtattgtcccgttttccgatacagagtggtttcaatccaaacggatcccttgccccgatcatctttctcggactgctgatcaccagcgcataggctcctttgatcttcttcatagcattttttactgcatcttctgccttagaaacattcagacgctctcttgccacatgataagcaataacctctgaatcaatagtcgtctggaaaattgcacctgtctttgacaattcctcccgaagctccactgcattgaccagatttccattgtgtgcgatagccagagttccttttacataattgattaccagaggctgtgcattctccacacgggtacctcccgctgtagaataccgtacatgtcctactcccagattgcctttcaattcacgtaatgtctcttcgttgaacacatcatctacatgccccaaccctttacgtgacagcaccttgcgctgtccgtatgtgtcagttactgcgatgccgcagctttcctgacctctgtgctggagtgcaaagagtccgtaataaatggaagacgcaacatcctgtccgtccatatcatatgcgccaaatactccgcattcttctcccagccctgttaccactttttcaaaatcactcatggatgaactccttctatttaattccaatacgtctgaagacttcctgatatgcgtcttctacatttcccatatctctgcggaaacggtctttgtccagtttttcatgggtctctttatcccacagacgacatgtatccggtgaaatctcatctgcaaggatgatctctccatggaaacgtccgaattcgattttaaagtcgatcagttcaattcctgcctcatcaaagaattttcttaagacttcattcactttgaatgtgtactctgtgatcttgtcgatctcttctcttgttgcagctccgattgcaattgcaaaataatcattgatcatcggatctccaagatcgtcatttttatagctgaactctaaagtaggtgctaacaattttgttccttcctcgataccgagttttttagaaaagcttcccgctgccacattgcggacgatcacttcaagtggtacgatctccactttttttacagctgtctcacggtcgctgagttcttctacatagtgagtcggaacaccttctttttccagaacctggaaaatgtagtttgtcatacggttgttgatcacaccttttcctacgattgttcctttcttctctccattgaatgctgtcgcatcatctttatagtctacgatcacaacgtccggatcttctgtcgcaaatactttctttgcttttccttcgtaaagctgttctaattttttcatacgttcacacctgtcctttttcttaaatttcattcactcgatctgggattatcggcacatcccgcagatagattataatacaaggcagagggaaaatcaatattccctctgccttgtatttcctgtggcttattatttatttctcaacagataaataagatgttcttatatattgtgctttatttatcacttttcgcaatttttgttctgatttttttgcacattttctcactttgctgcaagcggttttttcagcagaacgattccaagcattgccacgacagaacctgccgcaacggcagccagaaacagcagcggatcggaagctgcaaacgggattgccccctctgtgataaaggaaagtcccataatgaaattcgttgccactgtctgctgttcactctttgtaaaccggtttttaaaaaacagtgtcgccagagcaattccgatcggcggaaccatacctccaagcactgctccgagcaggactctgctggattctcccatacttgccagcacctgattcagccactcattgaacgctccgaccggcggattgaccacaaataccataagggctcccattgccgcgattcccaaaaacggatacaaaagcatcggctttgttccctccagcgcttttggaagcttttccagaattttctttaaaccgagcatgatcagtcctgccgcaaaacctgcgatcagtgcgccaaagaaaccagaagacacccagccggcctcctctgcagccattgtcataccgctttttgccagaagacctcctacgattccgggcatcaatgccggtctgtccgcaagcgccatggcgatatatcctgccagaatcgggaacatcattcgccttgttttccaggctttccgccgccatatatgtgtgggcaatccctgtgggacatgcagtaactgccagtacccggtatccctcttccggctgatcctgcgtctgtttttcttctccgtactcttcaggaaatttctttctctccgcctcatcaatgtgtgccagaaattctgttacatccgctgcatccagcagatttgtccgaaattcgtcatccattaaaagcatggaaagacggctgagtacttccagatgcacattatcttctgtattcggtgctgcgatcaaaaaaaatcatatgtaccggctgtccgtccagtgcatcataatccacaccctgaggaaccagcatcgtagcaagacccggtgcactgacggcatctgtctttgcatgaggaatggcaattccctctccgatccctgtcgttccttcctcttctctctttaacacaccttctttataacgctgtagatcgttgatatttcctccttttgccatcagttctaccatctgatcaatggcctgtcccttactttcgggtgttctggaaagctccacactttctctcttcaaaagatccgtgattttcataccttttccctttcaaatctgatattcgctgtacggtctgtccagcagttttacaatatcctccctggatgccagccaggactgaaatgccgtcgcacttcccgctgcagttccaagctccagtgcacgctcataagagccagtattgagatatcccgccagaaatcctgccaccatagaatctccggcaccgacagaatttacaaccgtgccattgtgcggctgctttttgtatatctcaccgtcttctgtcacaaggatcgctccgtcttttgccatagaaaccagtacatttcttgcacctctttcctgcagctttttcgcatgagcgatgatctcttcttctgtagtaagcgtcgtctggaacatttctccaagttcatgattgttcggcttgatcaaaaacggatgatatttcaatacattcaacagcagatcttttgtagcatctaccacaactttgacatccttatctttcaaacacatcagaatccattcataaatattctccggcagagtcgacggaatactgcccgccagaaccagtacatctcctgccttcaaggatttcagcttctcaaacaactcctggatcgctgtttctgtaatctttggtccttgtccgttgatctctgtctcctgtcctgcgttgatcttgacattgatccttgtctgcccgtctgcaagcggtataaaatctgtctttgcgccaaactccaggagcatctcctgcaatgcttttcctgtgaatcccgcagtaaatccaaatgctgtactctccagacccagattggaaaggatcacagaaacattgactccttttcctcccggataaactgcttcacttgttgtccggttgatttctcccggcaccagctgttctgcctgtactacatagtctaatgatggattgaatgtcactgtataaatcatgattctgcctcctctatattactgcatgtttgaaataccggatcactgatatgatccgtaatgatctgtgcatcttcaaacctcgcaaatgtgacggatgatacatgaccgaatttgctcgaatctgccagaacatatgcctctctgcatctcttcattgcagcttcttttaccagtgcttcgctgatatccggtgtcgtataccctttctccagatgaattccattcgtgccaaagaagccttttgtaaagttatacttattcagccactctaccgcagctcctccgactaaagcctgtgtatcctctttcagctcgcctcccggcaaaaacacccggcagcctttttctgccagacactttgcatgcagaattccattcgtcacatacacggcctccctctctgaaatcgcctctgccaatgacgctgtgctcgttcctgcatcgatataaacaaaatcctcctgaccgatcagagccgctgccagctttgcaatgctgcgtttttcctctacatacagcccctctctttctgaaacctttgcatcctttgtcgtatatgccccattcagtacagttgctcccccgtggactttcaacaaggctcctcttttatgaagctgtgtcaggtctcttctgatcgtagactctgaagtatccagaagttctgtcagctctgttacagtcactgtttttttttcgtttacgatcttaagaatttcgcgaaaccgctcttctgccagcattttcctcatcctttctttcattttcaatcattttcgtttcctttatccttataatataatcattttcaatcaaaatcaatcacattaattcaaaaaaatatccaaatctgatcactctgatttggatacttttactaaatactctatatgtgactcctccggtactgctgtttccacttgtctgtcagctgctctgacatctccatctggattccttcccggatttctttcatctcgctgcgcagctctgtattgatctccgcataggtgtcatttttcgtaagaaggatatgatattcctccatcgacatatacttataagacgcatacaaatacggctttaacaactttggatcttcgcagatctgatacgccctgtcatacatccgtgccgcctgctgatagaggaacattcttccataggcagaccccagacttgcatagatctttccataaaacttgggatctgtattctcatcctccccttcatttaagattgcctgatacacaaggatcgcttcttccacttctccactttccagaagattgtctcctttgtatttctgccgctcaatgtccttctggtttttgagccgctccagaacattctggattcggatcatctccgcttccttgtagattccggaactcttcaaaatcgtgagtacaaatttttccacacttccccgcatccggatcacatcccgaagctggtctgcaagctcccttttcccgatgtcctcttccagccatccgcacagctgctcgttcataatcgtataatcgatcaggtagagattattgcagagataatagcacagctcttccattgtaaatatcttacagtggatcctcgtaatttcatacggatgggccgcatgctgatcatgacatagaattaaacttcccatcatttcctcctaaatgtataatcttctcttcctgaaaatcggtcggcgggaaaaactctccgaatcctacatcccgcaccgtgatcttacatgttttttcatctaaaaataacgtctcgatctgaagccgcatggaatactcgcctctcttgggaagccttccaagcgggatcacctccgtctttaacgtaccctgtaccagagactcaatatgaagctcgatatcttctgtatcctctaaaagcacttcccactgattgttggattcataccagtgcgatccccaggatacgatcggataccacatctcctgtccattcacccgcatattcacagtgatctgatctgtcagcttgtcttcggaaagataaaccggatcctcaatgtgcataaacatcttgcggtatgcggtataacaggcacccttgctgtacagattgtttccgataaacgcccttcttccattgcacaggactctcagagaagtcggataccagttattctcaaatccctctccggtcagaaagaccgaagatacgatccgcttgtcaaacacgccttcaataaaccggcagaatctcatatccgcatcttttgccttgtccgcattgagcaccggatacacggctgccagttcttttatatgtgcacttgccacttcgtccactgtcacaaaaatcgtctttccgcctccaagccccggcttcagccttctgagcatatacgctttaatctcatttctgtcacagcaaaacaacgccgcctcatactgccagagttcttttggctgataaaacagataattgcagaaactctctttgtaatcctgaatgaaaatatgccgtttatcaatattcatccgtactgcgattccccgcagcatctgcgccagctcttccgtcagctccggaacgctgaacacgatcccgttgatcttgggaaacgactgaagcgacagttcgataaatttagcaagcagccacactgcttcataggattcttctccaaattcaattttttcccctgccaggcttttatccagtaaccggtttacggtgaatccttctttcaagctggccagacgttttgcttcttttccgtatgcccaggtatcacgcagctttccgatgaccagagggatctggtaattatccgcatctacttccatcgtctccggctctgccatttcttcattataaaaactgatctgacaggtcttttcattgatctcgtaacctataatattgccttgtcccataggagtcagcctccttaatactgttcaaacatatgcgcggcgattgcatcttcctgtgcatatgctttcatcttttcttctttttcactgccctctgaaagtaaaatatcattcagtcgtccatatcgcccggattctccaaacacagcatccttcatgcagcactctttatcacttcggtaagtgttgccatcaatggtctccttgaaataatatttcaaccgctcgttggagaacagcacaaatttcttcacatagagattctcatacatcggcgtaagcacctctgtagcataatctaccgcctctgaattttctttctgaagctgatagtagagcattacacggcttcccttctgccctttgtactcgatcagcgtcttatcccaaagctgcagctcaatgagccattccttttcgtatgccagaaagaacggaaaataaatctgcttgccgcacagctcctgtaagaattttttcagagtcttacgcacagtcgtcgtatattctctggtggaataatattttaatacggcgatcttgcagatgtcgatcgtttcttcacccttttcatattccttacagatgatatcaataatacttctgctcatcctgcgctcttccactacatattctctggacatatacaccagatatgcctgctgcagtctgaaataagctccctcttcataatattcttcaaagatcggaacctctccgaacaactcttccgagaacaacatctgtgtgatgatcctctccgccagcttctgagtgtgtacctcatactctcttgcttctctccagagcagtttcatgtctgtagtcgctccgcagtagtaattcgcaagatacgtcaggatcactctgtcaaactgctttcttttaaacatctcaaaacacacgtaggtaaggaaatcatcacattcataattgttttcacggatcgtacggctgcacagtcccatgatctcttcttccccgtaattttcaatgccatacttgcgcacagtctcaagagaaagctcttctaccttctcctcctgacggttctgcttcagactgttcatataccgcttgcagatatccatgtaacgaagctcatagaacaggcgcttgctttcatatggaatagaatctgtataatgtcttccatccttactttcccatacaagccggtctgtctttgcatacaaaaatacccttgcccctttgtccgtatacggcgccttctgcgtgatcgttccatcctctgcgatcacatgaataaatttcatattcggtacctttgttgtgatctcataagcatggcagatatcatacagtgctttgatctgctctgcttccatagaatcttctgtcagaaaacgcttgtatataatgcggagcatgggatcaatatttctgcgctccagctgattccacgcaaacgcttccatctcatctctgtaatgcgcataaatctcactggattcatcctcataagtgatcaggtttgaatacaaaagcgcccgtttatggaaatccagattatttccatgcataaagtaaagatacacggaacgcggcagtgctttattgactctgccaggctggatcgcagccatataaaactcgtacagctgtgcaatctttaattccgactccactgctttttcataccatttaaaaaagcagttttccatgcagcttcccttgatcagaagtgtacagattgcagtcaggatcatggactcttcatacatcccgtaggaaagcaccagagtctcataaagatagcggtcaaagcttttcagctgacttgccagattggctgtatataatgccagttcctttgtcatcagtttgtgtttggctgcaaaatacaacacccgcacttcaaagatgcccagttttttcaaggaagaactcttctcacggaaacaccggaaggcttccagatagaaccagatactgcgtgtcttttcctcatagaagtgatgctccaaagctctgagacgttcactgatgatcttgtactcagagtctacattcaccagcatgcagaggatcttccagctatcgggatgcttcatataggattttgaaagctcttctgccactctgcgtgtcccgatcgaatcattggaaagcagcgtggtcagatacaaataataggaactgatctctacattttttccgattgcaaaccggttgtaattgtaagattccagaatccattttgcctcttcaaaccgtttgcccaaaagacagatatgtgcatgtaccagaagatacatctcattgtcctcatccagactccgcaaatgctcgatcttctttaaggactcctcgcaccaggtgttcatatccagcttgccgctctcataaacaagacagcgctttaaaatacttgcaaactctttatcccgctcccgtctctcttcatctctgcagacatccttctctaccacgatctcataggtcagtatctcatacggggactccaggatgatctgcccgaagttgcttccccgatggagctttgtatagtcgatgatatattccagccgatacgcattcccgatgaactcctccgtagtaaccttggtatgctccacacttaaaaattcaccttcggtacgtacatcaatggtcagatatccccacgtattcttcttgatcgtaaaggtatcttttctggattcctgaagagaaataaatgccctgctctcctcttccagcgtcagaaaaatcttctctttctgcttgcagcccaccaaaaactcttccaacgcctgctgatccagctcccattttctcatattgtcatacaatgcctgaatccgcttatcctcatacttcaggatctcataaaaatctctggaacggaacagcttttctgcctccgccggatcccgaaaagacagcttcttaaaatcttccagactctgtacttttccataagttgtcattacaaacggcttttcaataatggcagtaaatgccacctcatactctccgccattgcacacaatggtaaattttccgtgttccacatgtcccggaaccagaccggatccgtcatatgtataagagatgttcaccggattcccatcaaatccctgctcctcacagcgtacccgaaaagacgatggataaaccagtccacggattgtcccctctccctgattctggagagaaaagcttcctttgtacatctcgccttctccgacacgcatgatgatccgcgtctccgggaaaataatctccggctgtggaatatgaaaatctccttttgaaaggcgtttaattttattcttcaaattcgtcacctgctcattcttcttacgttgcatttttttgtaaacacactataataaagtattataacatcaacactgtatttcttgcaacggtggaatcaaagaatttaaaaggggattgtatacatgaatacaaaactggaatttcacggaagtgatattgaaaaagtgtgcgaacactacggattaaaaaaagatgatattgtcaattttggtgctaacgtaaatccgctcggactttccgaacaggtaaaaaaagctcttgcagctcatctggatctgctctcttcctacccggatcggagctataccagtcttagaaacatactctccacatactgtcagattcctgcagactttatcctgccgggcaatggttccagtgaactgatttccctgctgattgaagagcgccgtccaaagcatacgatgatccttggacccacttattccgaatactccagagaacttggattttcagacagcacgatcgactgcttttatctgaaaccagaacaggatttccaattgtctgtagaggaactgtgtctggcgctggctaaaaagcagattgattttcttattttatgcaatccgaacaatccgacttcttccgcaatttttcatccggagctgataaagctgctggagttttgtcaggatcacaacatctttgtgatgatcgatgaaacgtacgtggagtttgcacctgatgtagatgccgtcaccgcagttcctttgacccaaaatttccagaatctgatggtactgcgtggtgtttccaaattttttgccgctcctggtatgcggttcgggtacggtatcaccggaaatgctgaatttctcaaaaaattgaagagcaaacagattccatggtcattaaacagccttggcgcattcgccggcgaacttttgtttcaggacaaagagtatataaaaaagacacgcaatttgatactttccgaacgtgaatacatgtatacaaaattgcgtgaacttccttttttctatgtctatccggcttatgccaactttttgctggtacagatccaaaaagttggactgacttcatctgacgtatttgaagcctgtatccgggaaggacttatgatccgggactgttcttccttcaccggattagagggagaatttgtccgcttctgcatcatggatccagaagataatcgaagactactgacagtgtttcaaaaaatttcacaatcagcccgaaaacaagtatgatttatatacagagaacttccaccatgaaagaaagcaacattctatgtcaacaaaacatgaaatgttgctttttcttgtatatcaattcactctttccagtatttttctaaatattgatttgcatccgtatctgagagcttaaacttctccttcaatcgaagcaaaacatgttctttcgtttctcccatctcctgtagaatctcaatacattcctgaatcctgcccttttctctaccttttacttccccttctttcaccccttgcctatatcccgtctctttatagattcttgaaaagaactggtgatcccggatctgcttttctcttgcctcatactctaaccgtgccctctcatctgcactcagatgcaccagactctcataggccttctcaatataagggtctttctctgctgccattttgaattcctcctctgtctctgcattgataaattgcatccaacttagcagttctgtctccggatactggtgctttgccagcttcggcaattccaatacatgcaattccagcttgtcactgtacttgatatgccggctgtcctcccataagtgaaaccgggaatagaatgcatccgtatcttcgaatatttcaaagtccagaatcccgatatggatacatttttccagcacatcatatccttcgccttcatgaatctgttccgtaaacatttttgacagataaaataaagttctctctgcccagtactcgtacgctgccacctgcatctccacatcgacctgaccgctgtttttcaattggatccgaacatccaaaattccaagcttgtcttccttatactgtttctcaagactggtgggcaacagtgttgtctcttcgatttcctcatagggaatccccgtaactgccgacaaaaatgcctgtcggatttgtgcatctgccatcaactgtttgaaacaaaagtcatttttcggtctcatcagaaactgcgttgtcttctctttttccattcacattcctcctgttttccgaatgaatttaccgggaaacaggacttttcataactaattctttcgattaatttttcgatgatagacctcgttccggttttccattcgctttttcttgcttctttactgggaaaatccgaaatgccagctgttgccggttcagatataactgaaagggattcctttcagagatgtttccagtatacaagtttctttcagcaaaagcaatgaacgaaatctaaaaacttgtcacagtcacttcattttctctttataaacataatctgttttttatctatggaaaacattttatcacattccactgcagctttttccaggcgtttaatccttgttttactttttttctgcattgtccatacaaacgatacatctgttctccatcgcggatatcacagcctttatagaacatagtgcgcatcatcgtgtcatacatccagtttagatcggcctcttccagttccggaagagattttttcaccgcttcttttccttgcattgaaaatggatcttccccggatggatgcagaaactctgcaacctcgtacaggctctgataaacaaaccgaatccttgcatcgattgatcccgttcggcaccgttttcgtttccgcacagtccgtatccacgcctgcaatattatcagcgcgaacatcagaagtataacgccgatcaccttcaaacactggaagagcgcctttcggatctgctgccacgtatccgatgatgctcttgccctctccacattttccaacgcagaagctgcacctgtatgatcctcgaccttccagccggtatcctcctgccagacttcacaccaggcatggcccatgctgccctcaacttctgccacatattgcccattttcctgctgtgaaaatgcagatgccggaatggcataaccttctgcaaatctggccggaatccccagcattcgatacatcaaggttgcagccgttgcaaaatgcacacaaaatcctttgtggttttcaaacaaaaaatactccgcaaaatcctcgccggacggtgtcgatcccggatttacatcatacacagcctgacgttttaatgtttcttccacgaaccgctctgcttcttcaaaagaatctgcttcctgcagttcgttgcacaatttgcgaagttgcttcaaagaggatggatactgcaaatatacacttgccggatccgtcgcacttccttctctacaggatcccccgtcatattcttttccatatttctccgaaacataaatcgtatctgtcggcatttcctcctgcgtcacagtgaacaacacacccttcctggggacaaagctgcccagctcccgcaaatcttccataccgccggaagaatccatgcctgtctcttccggaatcatattctgctctgtctgcgggatttttgcctgtgttttttgttcctctttttctgactcttccttttgctcttcctttttcgtctgtgcttcttttcttgtctgcctgtctgcactccatgcattccacgtctcttctgctttctggattacatgctctttcacatatcgtctggtcgtccgatataccccatcttctttttctttcatcggctccatctgctctcccagctggaccgaacaaaatgccagaaatacgaagcttattcccacaatgcagacattctgcagaacattacaagacatcgatgtaagcactgtcacatacaatccggctgcaatcatctgaagccagcattctctcggatccgggaaatacgtcaaaaccgccgcatatatcactggtacaagatagaaaaccgcagaaatacaaagcaggagcttctttctttttaccagcattgtcccaagccagacactccctaaaaaaccggtgatcaaaagtactgccatccacctctctgtctgatcctgaggtaatttctgcgtcaatttcactccggcggcagtctcccaccaggaccacagtgcaaaaccaacggtaagaaactgtaagatatgaactttccagctatgttgattcaaatccttcttttttcttttcataccccttctccccatatcacacctggataatcccggtatcattccatccctgaatcccctggccatccagtacaagaacactggaaaatttctgtgttcgaaacacttcttcaaacccgctttgctcttcctctcgtttcgctacagggactgcttccatcagctcccagagcatttcataaaacgtctcctcatccttcacgcgccatcgcacaacacggacgtttttctgatcaaaccatgccacaacgtgcatacagtgttcttctaccagagtcctggaaagtgaagcacaaatctccatcatacgctccagctttttgaaatctttcgctgcatccgaaagccaaagtctgatacataccgcacatccaagaggatgactggattctttgaccatcatttttcccgccttggcactgatcttccagtggatcatctgcaccggatccggaatgtgatactcccggatctgatagatttccgtagcatcctgcccacccctttcattggaataggtttccggctcaaccggaaattcccgcgtccttctcccaatctctaccggcattgcacagatcttcggcaggactgtgaatcgctccttttcctgctgctttttacccacagataaaattccgataaaatcatagattctcacttctgtaatcgtcagcttccactctccgcacctgtctggttcaaatgtatagtctgcctgcttttcagaaagccataaactgtctttttgtctgatgccggatactgcatgttccatttccagcagaatcctgcactttccgatccaaagagaactttccctgcaaacctgtatactgactttcatttgctgttctttttctccgtaatccgagagccgctttactctggcagaaagtcctctccccgcaaaaataagataaacgattcctgccgccggatacagaagcacaaaaatcaacagcccgctcagtgccggataaatatacatcaaaaacagatatcccactgcgccaagcaccagaagatatgttatcatccgttttcccatatacgctcctttttatcgctttttcaatgatggtgattctactgcggacaaaatttcctgcagtacttccttctgttttactttgctgatccttgcccttgtatttaacaggatccgatgctgtgcagtctcccgaaacactcccctgacatctgccggaaccacatattctcttcctgccagatacgcacccgctttcgccatctttgcaagtgccactgttcctcttggactcatccccagctccagcatctcatgctccctggtagcctgtgccagctgcaccagatattccagaatccgctcatgcataaaaatctgtgcagtctcccgctgtgcttcctcaagttcttcctttgtcatcacctgttgaacggcatctgacgtacggccattctcattttttcgcagaatctccatctcttcgcgaattgtcggatatcccatctttacacagaccataaaacgatccaactgagattccggaagcaactgcgtccctgcggagccggacggattttccgtagcgatcaccagaaacggcggagcaatctttctggtttttccatccacggtcacctgcccctcttccatcacttccaaaagggctgactgtgtcttcggagacgcccggttaatctcatctgccagaagcaggttgcagaccacggctcccggatgatatacaaacgcatttctctctttctggtagatggtaaatccggtcagatctgacggaagtacatccggtgtaaactgcaccctgcgcttctgcagtccgatcgctctggaaaaagcaatcgccatggtcgtcttgccaagtcgcggaatatcctccaccagcacatgcccacccgccaaaaatgctttcatcaccgtctctgtcacttcctgttttccaatcactgccctctgtacttcctgcagtgcaaaaagtaccttctctcttactttttccacacctgtttcctcccctgtctgatatagaaaattataccatattttgctttttccctcttactttttttcatatttttaacaaaaaagtaagaaacattcctcctgatacgtgctataataaagaaaacaacaaatgacaatcatgtacttcaagaaaggatggtctttatggaattcacagaaggattaagaaaagtatttttagcaggtgtaggtgctgtcgcctctactgcagaaaacgcaaaagaactgatcgatgatctggtagaaaaaggcgaactgaccgttgcacagggcagaatgctcaatgaagaactgaaacatacagcaaaagaaaaagtcaaagaacatatttctgtcaccgttaccaggaattatacagatgccatgaattctgtcgatcagatgaccgaagaggaattaaacgctctgaaagaaaagattgcccagacagaagaagcaagaaaagaacagcctgaagatccagatattacctccgatgaaaggacacccgaagaatcagaatgaataaagaacaaaaaacaatggatccttcccggtatccatcatacacggaagaagattcagccgcctccggcaggcggctgaacgagattttaaaagttttaaaaaaacaccatctgacctcgggtctgacaccggtcaagctccgcgagattctggaagatctgggccctacttatgtcaagctggggcagatcatgtccatgcgttccgatatgctcccggaagtatactgtcaggagctgacaaggcttcgtaccgatgtgatccccatgccatatgagactgcagtctcaatcattgaatccgaattacagcgacctgtctctgacattttttcttccatcgaacagactccgcttggctctgcttccattgcacaggtacatcccgcacagctaaaagacggaacaaaggttgttttaaaggtacagcgaccggccatccaaaagacgatggaaaatgatatccggcttttaaaaaaagcttccggtattttaaaactgacactgggaactaaaaatctgatcgactttcatacgattttagatgaactctgggagactaccagagaagagattgactttgaaaaagaggccgccaatctagatctgttttacgccaaccaaaaagaaatcgcctatacgacctgccccgtggtgtatcacgaactgacgactccaagacttcttgtcatggactatatcgacggaatccagatcgatcatatagaggaactaaaaagtcttggctacgacatgactgaaattggcgaaaagacagcggaaaactactgcaaacagattttggaggatggatttttccatgcggatccgcatcctggaaatctctggatcagcaaagggcagattgcatggctggatctcggaatggcaggacatctgtcttccaacaccaagctgctgcttcgcaaagcgatcacggcacttcttgagaatgatatttattctctgaaaaacgtattactcgcgtttgccgaacctcaggagcgtgtcaaccatgcccgcctgtacacggatattgatgatattgtcagcaagtatgtttccatggacttcggcaccatgcggcttggcgatctgatcgaacggctcctgcagctggtcaaggatcaccggcttgcaattaccccggatgtcacactgcttgcgcgaagcatgatcacgatcgaaggaactttaagtgcatgtgctccggatgtaaatctgttgcggattttatctgtacatatgtccaatctgctgatccatgagctggatgcaaggcacattttaaaacataagggacgccaggtttatacttcactggacaaatccctcaacatccctgcccagctttctgatcttttgaacattacaaaaaacgggcaggcacaagtcaacctgcagctttctgatggcgagcatttccgccgtgatgtttattccattacaaaccgggtgcttttgacgattctttctgctgccctgtttatcggatcaggtcttgcctcggacatttacagcattccaaagtggtttggactcccttggatcagtttcctcggatacagtctgtccgcccttttattgctgattgttcttatacagattttccgacggcgcaaataaaaaggagaagaaccccctcactttttcaggatttcttctcctttttcctacattctatttttctgaatcagtcgttgtctgttttacattcacaccctgatcttcaaagtctacttttttccattcttttttgtctaccttgatgtcagtctctttgcgccatgtttccacctgatcttcatactgtttctgcttgcgctcttctacgatttcttttttcttctgatttgttgcctcacgatccagcttgcttgtcagcttcgccacatagattccatcgtctgtctcaatcaggcttgtcacgtcccctacattttccagcgcatctgccgcctttaaaagatctgcgttcagtgtgctggactcagaatcaaatgtcgccgtctgcacttctttttctgccgaagcagctgctgcattcatgtccttgtccggatctgcgctgactgtatccagaaaggtctgtgccttttctttttctgccttcttttcatcgtcagtcatctgaacagactgtccggaatcatccttcttcgtataagagaactggacatactcgatcttcttttgtgctgcatcctcatctgaaacattttcatccacgccctctttcattggtgcatccatcttctgctgaatcgtagcaagttccagatattctttgacatattttttatatccggacacaacttctttgtcctccaatgtgttgtcttccacaaactcctctgcggctttgtcgatcttcttcttttcttcgtctgtcaactccactttatattcagaagcatgctgttttacaagatacatattttccagagactctaaaatactgtctttcatattctcctcatatgtcttgccttcttccacttcctggctccacattgtgtctgtactcattcccatcaggcctgcataaaacgactcatactgcgcctgctgcatacgtgcataaaaattagcaacaccatacgaaaccttctctgttccgaccgttactactgtagcatcattatcaggggcagcactgcatcctgttatcgtaactgccgctaaaataccggcaactgcggtgatcacacctctttttttcaatccaaccataaattcctcctctaattgtacctaattatttcattataacgtcttttttctcctctaacaagctctttatatcatttaagagctttttcacaagttccagaaccgtttcatccttttcctttttatttctgccctttttataatagacaaaatacggcactgcctccgccttaaacaccagatttccccggtagctctgaatcaacggaggaattttctgcggattgaccttcgctttttcatacatggtaaaccggaattcttctcctttttgttccactgccgtcacataagctgaatgtgcaagcgctttaagacctgcgatctgaagaagctgctgtacctttcttggtacatccccgaaccggtcgataagctcctccagcatatcatccatctcttcctcatcttcaattcccgcgatccgcttgtaaatatccagcttctgatattcgttcggaatataggaattcgggatatacgcatccacattcagatccatcacggtcgtatagatttcctcctcggttccgccttttaactgttttaccgcttcattgagcatcttgcagtacagatcatatccgacagcctccatatgcccatgctgttctgcacccagaagatttcctgccccacgaatttccagatcccgcatcgcaattttaaatccggaaccaagatctgtaaactcccggattgccgccagtcttttttccgccacttcctttagcagcttgtctcttcggtacaggagaaatgcatacgccatccgattggatcttcccacacgcccccgcagctggtacatttgagaaagtcccagacgatctgcatcatggatgatcatcgtattggcattggaaatatccagtccggtctcaataatcgttgttgacaccagcacatcaatgtctccgttgatgaaatcatacatgatattttccagctcatgctccgccatctgcccgtgagcaaacgccactgtcgcgtccggaacaagtttctgcacatgatctgcaatttccgcaatatcacttacccggttatatacataatacacctgtccgtcccgatccagttctctttgaatagcttcacggaccatctcatcattgtactccatcacatatgtctggatcggcatccgatccatcggcgcctcttccagcacgctcatatcgcggattccaatcaaactcatatgcagcgtccgcgggatcggcgtggcagtcagcgtcagtacatccacattttcccgcagttttttaatcttctctttgtgtgtcacgccaaatcgctgctcttcatctatgatcaaaagtcccagatccttaaattccacatcctttgacaaaacacgatgcgtcccgatcagaatatccaccagtccttttttcagatcttctgttgtcttcttctgttgggcaggcgtccgaaaccggcagagcaaatccacacgcaccggaaattctttcatcctctgcacaaacgtgttgtaatgctgctgtgccagaatcgttgtcggcaccagatataccacctgttttccgtcctggatcgccttaaatgcagcccgaatggcaatttccgtctttccgtatccgacgtctccgcagatcaggcggtccatgatctttttgctctccatgtcctgcttggtatcggcgatcgcctgcagctggtcatcggtctcctcaaacgggaacatttcttcaaattccttctgccagaccgtatccggttcatactgatatccattctcctgctgccttgccgcatacagctccaccagatccctggcaatctgtctgactgccccgcgcacctgattctttgttttcgtccactggttacttcccagcttgttcagctttggcttttttgcatctgctcctgcatacttctggatcagatccagctgcgttgcaagaatatacaggctgcttcctcccgcataagaaattttcatataatctttggtgatcttatctacttcaatcttttcaattccctgatagatgcccagaccatgattttcatgtaccacataatctccaacctttaattcggagaaactttggattttctgtccttcatatagttttctgcgcttctttttcttctgtctgccaaaaatatctgtttcagagatcaccatgaatttcagcatcggatattcatatccctgtgtcacatgcccgtatgccaccatgatctcccccggctgcacttcacgatccatatcttcgctgtagaagctgctcagatcataatccctcagatcttccgccaggcgctttgctcttgtcctggaaccagacagcaagatcacccggtactgatttcttttcagccgcttcaaatcccttgtgagcatctcaaaactgttgttatacggattgacacccttcgtctgaatataatctgtttcccggatctttaaccccttacactttccttccagcgcggtaaatgccactccataaaactgattgatccggtttaagatttccagcaccggatagaccgtaagctcctgcgtttcttccagcccggcctcttcccgcttgcggacgctctcctgaaattcctcttcaatctcatttgctttttcaatcagcctctgcggctcatccagaaacaggatcgactcttctgtcggaaaatactccagaaaagactgcttcttctgactctgcagttctgctgccggataaatctcaatttcctgcaggttttcaatcgaacgctgactttctacgtcaaatgtccggattgaatctacctcatcgccccagagctccacacgcaccggaacctcttctgtaagcggaaaaatatccaggatcccgccgcgcactgcaaactgtcccggtccttcaatctgtacttcccgcgcatacccaaggcaggaaagtctctcctgaagcttagtaaaatcaacagtatctccggatgagatccgaatccgcttcgaaacgatctcctctgccggagaaagcccgtccagaaaagcatccatagtcgtgatcactgtaatctcctgattcttttgtcttgtcaccatactgcgaatcacttccatccgctgcttcatcagataatttcctttgatatccgcatggtaaaacaacaaatctcttgccggataatacaataccccggaatctaaaaagcgatattcttcatatgccttctgcgctttttcttcactggaaaaaacgatgatcttgtaagaaaaaccatcgccaagcgcatacatcaaatgtgttttttgtgaattgacacagcctgcgatctgcagaatccccttttctttccttcgcttctgtaaaatctcctgatattctgcaagtcccgcaagcggtgcgataaaagcctgcatcattttatttttccttctttttccgattatactcgttcattgcagcctcgatattgcctgtcacaatctccttcactgcacaaactgcatgttcatatccctcttccatctgttcctgttcttcttttgaaaaatgtcccagcacataatcagccagatcccatttcggcggtttttctcccacacctactttaatacggggaaatacctgtccacccaaatgggcaatgatatttttgatcccgttatgccctccggcacttcctttcgcccgaatccttatctgccccactcccaggctgatatcgtcataaatgacaagaagctcctgctcttcgtccactttataatagtccagaagacttctgacgctttccccgctcagattcatataagtctgaggttttgccaggattaccttctgcccctcaatcattccttttccgatataagctctgtgttttttcgtatctacatcaatattatattttcgtgccagtgcatctattacttcaaatccgacattgtgtctcgttccctcatattctggtgtcggatttccaagtcctacaatgataaacatagttgtccacctcttctttttccaatctgtccttttaaactgcgttacctattttacaggattccccggcttttgtcacgcaaaagacgggaatattttccggatatgcctcataaaatgataaaaaacaagggggattattcttatggattccaaaacaaaaatcgttgtccttcacacaaaggagctcatctatactgctgtgttcgcgctcctttgtattcttctgatcgtgctgcttttcgtcatgtttggtcccggacatacagacaaaaagcaaacatctcacaaacagtatacacctggtacttacacatccaccctcacactgaacaacacaaatctggaagtggaagtatctgtggacagctccaggatcaattccatccggtttgccaacctggatgaaaccgtgactacaatgtttcctctgatccagcctgcgatcgaagaaattgccgaccagatttatgacactcagtcactggacgccgtggaattgtccgatgacgcgccttatacttctcagatcattctaaatgccatccggcaggccgtagaaaaagccgcagtcaacaaaactgcggcttcctgcatatctttgattgtcttttacccttccacgatcagatagcgtccacctgaaagcgggaatacttcagatgcctcttcgagttcttccgcatccatattctccacgtctgcaccgctctcctcaaaatattctcttacttcatccagagaatctactacgaccgccatacagtcttccagaaaagcctctgcctcttccattgtctctgccaccggctcgtcaaaaagctgcgattgttttttcagaaacgtaagcagacattcctcatcgtattcattcatgctccgttacctcccttttttctcttcccatgcggatatcagttccagaagctcctgtgccgtatccacgatatacgctgcgttcgcttcctttaagacctctctgcttcgaaatccccaggaaacgcctatcgtgcgcatcccggctgcatgtccggtcctgatatctacttcggagtctccgatatagatggtctcttcaggagtcgctcccatctcccctgcaatctgaaggactgctgtcggatccggctttctcggcacgccttctttctgtccctgcactttaaaaaagagatcttttccaaatacagtttccacaacatgaaccgcctgtctgtccggtttattggaaagaacagcgcatctgattccctgctcttttaatgtacccaaaagctgcacgattccttcatagggagccacatgatacatacaattctcattgaagactctcccatatatttccatcgcttcctccagcctctcaaaagcttcttctgacgcggcacgcagtgctttttccagaagaactctgcttccgtttcccacaaacatccggcactgctctcttgtaatctctggcagtcccatctctttcatggtcagattcacagaaaatgtaagagaatccagcgtatcggtcagtgttccatccaagtcaaaaatacaactcttatacatcatcgtctccatctcctccatctattctacgtgtttatcatagtatgaagttctggaaatttcaaccgtaaaatcatttttatgcagttttctctgaaattttgttactggaaagaataacagcctttagcccaacagatattgtttcattattttcaatgcatttttttccagccggctcacctgcgcctgcgaaatctgaatctgttccgctacctccatctgtgtctttccttcaaaaaatcgaagctggatgatgaaacgttcccgttcattgagacgttccatcgccgcctccagcgacaactcttctacccagttttcttcccggttttttttatcactcacctgatccatgatgtacagcgtatcgcctccgtcgctgtataccggttcatgaagactgaccggcatctggattgcatccagtgcaaacacgatatcttccttggatattccgatctcctcagcaatttcctgcaccgtaggctctttggaatatttcttcacaaatccttctttggcgtagattgctttatatgccgtatcacgcagagaacggctcacacggatagaattattgtcccgcagatatcgtctgatctcaccgatgatcatcggaactgcatacgtcgaaaacttcaccagtcttgaggggtcaaaatgatcgactgctttcatcagtcccacacagccgatctgaaacagatcatcggcattttcactgctggatgaaaaccgtttgatcacactgagtaccagtcttaaattacccttgatatactgttctcttgcgtcttcgtccccctccttgatccttgcaagaagctcttccttttcctcttctttcaaaagcgggagcttcgctgtgtttaccccgcataattccactttatttcctgccatttgtgaatcctcctgtcctgtttctaattaaaagaattcaccatctgcaggcagtctatgcggttttacggaaaataaaaaaaattttactccttgacaagctcacgtatccctctatgccctcttcttcattttatttcttttctgactctttttcctgctttttgtttctgattgcccgccgaatggcaaaaatgccaaatactgcgattcctcctactgccacaccgatcaaactgcagaaaatcataaaaaacacatatgccgtcatgcctttgcctccttctaattatttagtctctcatttgacaaatcaaagtcttaaatctgacagtcccatacaaagaaaaagcaatgtgcatttctaaatttcaaaaagaactttctttttataaaatttgttcctgttcaattcttgccgcctctgctttccaatattccataatatttctaaccattttgatacattcttcctttgcagtcttctcatcataaatctggaaatcactaaatgtatgaccacatggtactagacttcctttcatatcttttgcctcctatcttcattgtaccatttcacgtattcagaatcattaacaagcctcattttttctcacaaaaaaccacggatgagatttctcccatccgtgattttctctttctcactattcccaacgatcccatttatcagcaagattattgatctgactttcaaattttgctttgtctttattcggaattccctctcgtttgtaaataacatccaaaagtcttcttcctgctgcgataagacgctcaaatgcagcgtctgctttcttctgggatggcttcttgcctttcacggcaatccgcacaccttcgtttaagatctcattcgcagccagatcgacttccccgttcgggaatggcgcccacgtcggacatccaagcgtctcttctactttctgcgcaaattcttctgtcacagtgtcttcgccatgcaccacaaatacatgctgaagcggtgtcttaaatcctttcagccatgctatcagaccattcatatctgcatgaccactgattccgtgaagactttcaattctggcatgaacctcgatcggctctccaaacagcttgatattcttctcaccttccagaagccgccttcctaatgtcccgttcgcctgatatcccacaaacagaattgtacattcttttctccacaaattgtgtttcaaatgatgacggatccgtcctgcgtcacacatacccgatgcagaaataattactttcggcttttcgataaaattaatcagtttcgaatcatcacttgtaacggatgtcttcaaccccggaaataccagaggattgatcccctcatccaccagtttgattgcttcttcatcgaagcattcccgcatattttttgtaaacactttggtcgcttcaattgccagcggactatccagatatacctcaaaatcagaatattccggcaaaagtccatgttctttgatctcccggatgaaatacagcatctcctgcgtacgtcccactgcaaatgacgggatcacgacattaccgcctgcatcaaaggtttctttcaaaattctcgtaaattcagagacataatctatcttctccgaagaatgtacccggtttccataggtggattccactaccacataatctgcggtatccgtacaccttggatctttgatgatcggctgattcacattccccacatctcctgaaaatacgatcttcctgctaatctcaccttcggtaatccagacctcaatacttgccgaaccaagcaaatggccgacatctgtaaaccggatttccaccccatcgcaaatatgaagccgttctccatatccacatggaacgaaaagattgatcgcagcctctgcatctgccatcacataaagcggctcaaactccggcactccggcacgtcttcctttccggttgcgccattcagcttcaaattcctgaatatgagcgctgtcacgaagcataatgttacataaatccgctgtggcaaatgtggtcaatatctgccctttaaatccattcttgcacaaaaggggcaaaagacctgaatgatcgatgtgtgcatgtgtcaaaaatacatagtccacttctcccgctgcaatgggaagtcctgggttttcatacaggtccggtccctgctccataccacagtcaattaaaatatttttccccgctgcctgcagcaaatgacaacttccggtcacctcatgggctgctcctataaatgtaagtttcatatagcttcaccacccttttttctcattataacaccttttttacggagtgaaagcactttttgaggattcttctaatttattcataacgcacgatttcccgcttcaatctctgcatgatctttttctccagacgggaaatgtatgactgtgaaattcccagtaaatctgctacttctttctgagttttttcgattccatcaggattatccagaccaaaacgcatcttgacaatcagcttttctctgctggacaactggttgatggcacgcaccagaagctttctctccgcttccgtttccagatcccgatagatggtatcctcctctgttccgaggatatcagacaacagcagttcattgccgtcccaatccacgtttaaaggctcatcaatggaaacttccattttagtcttactgtttcttcgcagatacatcaggatttcattttcaatacatcgggatgcataggtcgcaagcttgatctttttggttggattgaatgtgttgattgctttgatcagaccgattgttccgatcgagatcagatcttctactcccactccggtattatcaaatttttttgctatgtacacgaccagacgcaaattgtgctcaattaacattttttttgcttcctgatcatattctgatccgagtcttctgatcacctctgtttctcgttctgtctccaacggaggcggcagcacttcagaccccccgatgtaatgaacctctttctgattcggaaacagcagccctttcagactgggtactacttttaatttaaactgctgcggcattgctacttttacaaccattttttcttcctcctaatatttcagggttgatgatcatttgatacatcccttgttctgatatctgttcttcacatatcccgaccagcggacgataaatccactgttttttctgtacaatatacattttctctaattcaaataccggcatgacaccactttttcctactgtccgatatggaatcagatgaaaccctttcaagttttccttttctccggtcagcttttctattgtgctttgctctaaaatacataccggcttttcactcagcggatctttcaacacatttccggtatcccaaagcccgcgtatctcacagcagcttccttcctgatacaagatgatccggcaaatcttgagttcctccttctgaagccggcacaaaaactcccagatcgcgcggattgtgtaatagcagccaatcacaacagcaaaatagagacttgtgtatttcacatagggttttaacattcccagaatcccgccaatcaaaacggaaacaaaatacaataaaatataacactttaaaaattccgaaaagctgcgaattttaagaccgcataccaccatcccgctgctgacaagcatatgaagcactgccattgtgattcccacgggcagccgcaaaattaccaccagacaggaaagtcctgatccgaccagaccgcctgcaatcactcttttcgtactgcccggcatcttcatcaaggcttttacagaaaacaggataaggacgtccatcataaaattcaccaaaaacatgacatctatgtatacttcatagtacatgttccaccctctttctcgttggtactaaatcgatttggcactcaaacaagatttattataatcagaatcattttgaaaatttgtcagaaactgacagagaaacagactttatttcgacaacaatcgtgtgaaaaggaaaaaaggacaggtctcttgtcgaaacctgtcccaaactgactttattattttttaaagaaatccggaatcttaatggactgctcttttactgtgcttgaaggcactcttccctgtccctgaagggtcgggattgtggaatttcctgttgttgttcttcctgcaccgtactctgctgccggtgttcttgcaaacttgtccgcatttggaagaatagatcccatcttctgctgtccttccagtcttgcttttaacttggatgcacttccacccacattgtgaagtcctgttgcaataactgtaattgtagcttcatcagatcttgtatcatcatacatcgcaccgaagataatatttgcattctctcctgcaagttcctgtacataatcagcagcatcagatgcatccatcagagtgatatcaccggaaatattaatgataacgtgtgatgctccctgaatcgttgtctcaagcagcggactggcaacagcctgttttactgcctccagagccttgtcatcaccgcgtccctcaccgataccgatgtgtgcgattcccttatccttcataactgtctgaatatctgcaaagtcaaggttaatcagagaaggtacgttgatcaggtctgtgataccctgaataccctgctggagaacctcatccgctttcttcaatgcttccggcattgtcgttctgcgatctactacttccagaagtttatcattcggaatcacgatcatcgtgtctacattctcttttaatttatcaataccagccagtgcattcgccattcttgtacgtgattcaaaacggaacggctttgtcacaactgcaactgtcagtgcgccctgctcttttgcgatacgtgcgactacaggagctgctcctgttccggttccaccacccataccacaggtgacaaataccatgtcagcgcctttgagtgctgcggaaatctcttctgcactctcctctgctgctttctcacctacttcaggctgtgctcccgcaccaagtccttttgtaagcttctcgccaatctgcatcaatgttggtgctttgcataactgcagtgcctgtttatctgtattcactgctataaattctacacctgcaatctgctcatcgatcatacggtttaccgcgttgttaccgcctccgccgactccgacaacaataattcttgcagctgcttctgattcgtttgtcttaatctctaacaagggtagttcctccttcgtcgtcctatcaacttattttatacatcccatcataaatatgtatgaacaatagaattcaataagtatataatatagtctttcacgcaaataatcaatagatttttgtgtattttatgttttttttattcagttgtttctccttcaccggttcctgctgcagatgtctgatccgtctgtgcagcttcagattctcctgactgattttcgtccgtctgtccggcgtcctggccctcatctgcttctgtttccgctgctttctccggtacaaaacgcacggaagtaccggacgtttcataattctccaggtgcagtacacctgcctgccccgcaaacttttcattaagcttctcaaggatcggcgaaatctgtgcgatcttcatctcatagtttccttttcccagctgcactgtgaccactccgaaaatcagattgactcctccgtcactgcaggtaagccggtcggaagaaagttcatatttgttggaaagtcttgtcacctccacgatacgttcaaaaatatcctgatctgtgaccgggagttttttgttcattttcacttttttggtattaagctccaatccctcgataaacggcgccccgggaatcacttccgttgtctttaacgcagctgttccgtcctcatcaaaatacaaaaactctccctggtaatcaaaataaccaagaaactccttctcttttaccttcatcacgaccgtccatgggtttttaattgaaactttcacggattcgatcgctgccggctttgtcacatctccataattatacttccaccagatatagatggagttgaatgcatacttgtctttttgaacccattttaccagttcttcgtcctgacagtactggtttccggtcacctcgatcttccttgtctgaaacagaagaaataccgcaaaaaataacacaagtaccgacaggactgtaatcagtgccgccattcgaatcttctttttcttttgtttcataaggcttcctccttttctttctctgcttattctaccaaattagacacacttaacacaagccccatttccaacagcagaaataccaccgaagttcccccatagctgataaaggggagcgtgatcccggtattgggaatactgttcgtcacaaccgcaatattcaagatcacctgaatcatcatatgcgccatcgctcctgttgcgatcaaggcaccggtcagatccttcgcatgtgttgcgatcacaaaaaagcgccagatcagaatcagaaacaataaaatgatcaggcttgctccgaccagtcccagttcttcacagatgatagaaaaaatcatatcattctgggcttccggcagaaatcccaacttctgtacgctttttccaagccctcttccaaacagccctccggaaccgatggcataaagtccctgcagtgtctggtaccctttttcatacttttccggatttctccagattgcaagtctctccagacgataactttccagtgccagaaatatccccataaaccctgccgctgccgcacccattccaagaaactgggcatacttcggacttgccacaaaaacaagtgctgccgcaattcccaggataataatggccgtacttagattacttgcacctaccaggcctaccacaggaagaactggcagcataactttgacaagtgttgtaaatttttccatctttcttgcctggtttgagattacgcaggacaaatataaaatgactgccactttcgcaaactcagacggctgaaaagaaatgggtcccaaagaaagccatcttttggacccattgtactcatctcctataaacatgactgctacagacagaacgattgcagtgacatatccaagctttgcaaaaggaatccacctgtgatagtcgatccctgccacaataaacatgcctgccagtcccaacgctgtcgcaaatccctgctttttcaaatagtaaaaagaatcatggaactttacccggccattataggcgctggtactgtatagcagtatcagaccaatcccgaccaggagcaataccaccacaagcagagtataatcataccgctgcttttttgccggatgcttcaatgcagatccactccttataattgatttacaagttctttgaatttatctccgcgttcttcataattcttaaacattccccagcttgcacacgccggagacaaaagaactgcatctccgggttctgcctgttctacacagatattgaccgcctcttcaaacgtatctgcaagaatcgtatctgtaaatcccagcctttttgccgtctcattgatcttctcttttgtcgctccgagaagcaccagtttttttaccttaccgtcaaaagactgaatccactcatcataagaagaatccttgtcatatcctccgccgatcaaaaatgtaggcctgttcattgcctggattcctttgatcgcggcatccggatttgtgcctttggagtcgttgtaatatgcaaccccgttcttttctgccacaaactcgatccgatgttccactgccgtaaattcccgaatggtcttacggatgatctccatcggaacgtgatacgctgccgccatagccacagctgccattacattttcataattatgcattccaagcagttttaattcatccacatgacagactttctccggattttctctgcaatagatgatattgccatcttccagataaattcctttttccagtctgcggcggctggaaaaataaatcacctgcgctttgactctttctccgaattttctggtcacatcatcctcataattcaaaacacagacatcttcttctgtctggttttttgcaatctgctctttggcttcgatataagcttccatcgtgtgatggcggttcagatgatccggcgtgatattcaagatcgcactgactttgggacagaatgtgtgaatcgtctcaagctgaaaactgctcatctctgccacaataacagaatcatcctttgtctcccgcacaacgctcgtgtaaggattgccgatattgcctacaacaaatgtgctttcccggaaatttttcatgattgcaccaagcagtgctgtcgtggtcgtctttccatttgttccggtgatcgccagcacatcccctttaccaaggacatatgccagttcaatttcaccccagatcggaatccctgcatcccgcatctgattcaccgatggtaaatctgtcggaacacccggactcatcacaaccagagaaagctctgaaagaagcgcctcgggaaatgctccgagaacaacgcttacgctcccctttgcctgtccttcgatctgttctttgattcctgccgcatccaacctgtcattcccatcatacaatacgacttctgcaccttcctgcagcagcagagccgcagcagaaacaccactgataccggaaccaaacaccagtacttttttgtctttaaacttcatgtctatacccccattaatgcgatcagacagagcagtgcagtcacaattgaaaatactgccacaactcttgtctctgaccagccgcacaattcaaaatgatgatggatcggtgccattttaaagaaacgctttccaccggtcttcttaaaatatgtaacctggatcatcaccgatgccacttccaccagatagatcagccctacaataatgataaacaacggcatctgcatcatatacgccgttcctgccacgaaaccgcccagtgcaagagaaccggtgtctcccataaacacactcgcaggatatacattaaacaataaaaatccaaggagcgcacctacaaccgcacaggtgatcggctctactccgctctttgttccaatagcaaccaccgtaaagaacgtagctaccagaaccgtcacgctggatgccagtccgtccagtccgtctgtaaaattcgttccgtttacagtaccgatcactgcaataaataaaagcggaactgccagccagccgatatcccagtattttccaccggaaaacggaatcagcatagacatcggaatgtctgccactttaaacacgtaatatgcaaaaattgctgtcaccaccagctggagtgccatcttctgtttcggatacagaccgtctgaacgtttcatcacaaccttcagataatcatccagaaatccaatcagaccaaaaccaagcgtcagaaacaggatcggaatcactttcggataatcttttacataaaacagggacgtgataacgacactggccagaatgataattcctcccatggtcggcgttcctgccttcttcaaatgagactgtactccctcttcccgttctgtctgtcccattttcagttttctaaggaatggtattacgatcggtccgagcaccaggctcaaagcaaacgataccaataccggtattactacatgataactcatacttccacctcttcatctcttttgtttcaatatctcaattagtataccgcattacctactgtttttcaatcccgagatatggaaggacattgtcaaaaatactgcgaaggaccggtgcggcgatcgttcctccataataaatcccctgcggattatggatcaccaccattcccagtacctgcggatcctctgccggtgcaaatccgataaaggaagaaatgtacttattcgcacttcgcggcagtgtctgagaggtggctgtctttccgccgatggaatatccttcgatatatgcatttttcccggacccattggcaacaactccctccaaaagtgtctgcatcgttttcgatgttttctctgataccacacctgatctttcttcataggacaatgtttccagcacatttccttccctgtcaagaacggcttttccgaaatgcggggtaactcttcgccctccattgataatggaactgactgtcactgccatctgaaccggcgtaacttgaaatgactgtccaaaactgatggtggcaagctccaccagaccgatattttccacctgatgcataatggttcccgcctctcccggcagatcgattcccgtcagatccagaagtccgaattgctgaaaatagtcataaaaccgctctgctccgagacgcagaccaatatcgataaacaccgggttgcaggaattctgaattccctgaacaaaggtttcactgccatgtccgcccactttgtgacaccggattcttctgtcttctaccatgcggtatcccggacaggaaaaggtatcctcaggtgtcacgactccctcttccaggcaggctgcagacgtaatgatcttaaatgtggatcccggctcatacgtatcattgatacatcgatttctccacattgcatttaacgcatcctgcaatttttctccttccagttcttctcctgtattcaattcaaacggatcattgagattaaattccggcacattgaccatagacagaatttctccgttttgcggattcatcagtaaaatcgacactccgtccgcctgtttttcccgcatgactttttcagccgcctgctcacaatatttttgaatattataatccatactgatctccagcgttttgccggccacaggctcgatccggccttccgcgaccgcatccagttcgattcctcttgcatccgttgtcgtgagaatggttccgttgctgccttttaatgtctcttcatatttcacttccagaccaatgatcccctgattgtctcctcctgtgaatccaagcaccttggatgccaggctgtcatacggataatatcgcttatagtcttcatccaccttgactccatccagattatactcccggatcttatctcccacttctttttccacgttggtttttactttttccatggaagagaccttctccactcgctttctcacctctgcctgatccatttcaagctcttttgcgagaatttccgtcacccgttccggttccttgatctgactgtggatcacagaaatcgtacacactgttttgtttgtagcaagcacaacgccatttcgatccacgatttctcctctggctgccttgatcttacgttcccgtttatgcagatcctcggctcgtttctgataatactcggcatcaaacaccatcagatagaccagtcgcccgatcaaacctgtcaaaatcagaaacgcgcaggtaaacactaccagaattttctttttatgatacgttttatttttcataaaaaaaccttacagaagactttatacaacatattttctcttctgtaaggttattcctgttttattctgttatttccgatgattccggagaggttgcccagctatcataatccggctggtagttcggatcgatataggcgccatcctgattactgtaggtatcttcgaagttctcatcgaaatcctgctgtacgtcttctcttacaccgctgtcctctggcagtgcatccccgtttcttgtaatgttcagatatggaaatgcttccgccatgatcttctgtgacagctccagaacatacgaacttaattcctgattttccacatttggctcatcgatgaccacatagatcacaacttccggattttcctgtggtgcatatccaataaaagaaagcagatagtctccattccctcgcggaagcttctccgctgttccggtttttccgccaatgtcgtatccctctacatttgccggaactccggttccgtctgtcattaccgcgcgaagcgcttctttgacacggtcagaagtctgttttgataccgtttttcgaagcaaagtcggatcgtttgtttcaatcacgtttccgttttcatcctgaatctgcttcaccacatgaggctgataataatacccgccattgatcagagaagaaaatgccgacaccatctgtgtcatcgttacattgaaactctgcccaaaggaagacgttgcaagatctgtctcccccatattctctgcagtaaagatcagattttctgtggacgcctctcccggcaggtcaattcctgtgtactctccaaatccaaagatatgctgataccggataaaatcttccactccgatcttatcggccatagccatcagagccacattgcaggaattggcgattgcctgatctacattctctgtcccatgccctgacgtattgtgacattgaatataccagtcacctttccatgtaccaccctggcatacataggtttcctgaccggtcaaagctccggtctccagacctgtggccagagtaaacggcttggctgtcgatcccggttcaaaggcatcactgacgcagaaatttctccagagattgttcattgcattcagcttatcatcatctgacattttttccaacgcttccgtcgtataccacggcgtcagatctcttggattattcagatcaaagttcgggtacgaagcctctgcaagaatctctccgctgttcggatccattatgatcacagccgtattcttacttcccagctcatcctcccgttcttctcctttgtgtgcctcattaaattccagaatatatttttctacaatgctctgcagtgtaacgtcgatcgtggacactaccgtatttccattctttgccgctttcacagtacgttctactgaagaagcactgtcaaaatatccatattctcttccgtctgtaccgttaagaatatcattgtatgcactttcaatgccgattgctccctgatttccggatacggaaaatccgatcacatcacttgcaagactgttgtaagggtatgtacgctggtaatcatcctccagccagaccccctgaacattcggatattttttatcatcctcgtcaatttcctggaatttcttggcatcttcataagaaacgcctttttttaaaacctcgtaacggctgtccggatttgccttgatcgtatcccttacttcttcactgtcaataccaaagcattcttctaaaacgtccagtgtggaatcgatatacttatcgctctctccctcgtctgtcacaaccaccacatccaggatcacattatacacacgctcactggtcgctacttttgttccgttccggtctacgatatctcctcgtttatacggaatggtcctgcttccatactgctgttggttcagaacgatcctggtatactttccacctttgaatacattgatatacgtaattcttccgataagaacaacaaaagccagtataattgccacaaacagcattaccagcttcttttgcatccttttcggaaatttttttgttaaaaattgaaatggattttttcttcgtcttcttgtcattacatcttcctattttgacacgtcctttgactttgcaagaatcccgtcagatggtatctcattatactgcttcacgtaatcactggtcgggctgtcatactccaccacattaccattcgccgcatataccatgccaagttcattcattgctttgtcccggatttcctgcagattcacagaatctgctgccgcattgtatgccgtatcattcgcctctgtcagatctgacagctcttcctgaagagccgtgatattttctgacctctgcacgagttctgactggagctgcagatatacgacacagatgaaaaccgcacaaacagccgccactgtcaaaaaccctgtatagatcgggctcatatccaatgcacgcctgcggttctttttcacctgactgcttgtccgttttttaggacgtacttccactgcttgtttctcctgatttggcaataccttcggctgatgcgctacatttccatagacgtagaactgtccagatctgtttcctgtattagattgtcttctgtatgtagttctctttcctgcagccatttggtctgcccctttccacgtacaatctgccgggctctccccttcccggcagattttattttttcagatactcaccctcatttttttcagcttcgttcgaaaatgcgaagtttggcactttttgaacggctgttatacatcaactcttcctcagaaggaagaattggtttccttgtgatcacttttcctttcgatatgtttccacatacacaaaccggaaagtgacttggacaggtacacggattttcattctttcggaatgcactctttacaatccgatcttccagagaatgaaacgtgataatacagatccgacctcccggattcagcatatcgatcatatcatccagagtctcccgaagtacatccaactctctgttcagctcgatccggattgcctgaaatgtccttttggacggatgtccggatgttttctgaaacttcatcggaatggctcttctgataacttcatttaactgtcctgttgtctcaattggatgctttccgcgctccatcacaatgtgttttgcaatattctttgcaaatttatcttctccataatcacggatgacacggtaaagttccgcttcgctatagtcattgacaatgtcttttgctgtcgtagtctgtctctgatccatcctcatgtcaagcggcgcatctgtgcggtaagagaaaccgcgctccgccgtatctaactgatatgaagacactcccagatcgattacaatcccgtctaccttgtcaattcctatttcatggagcctcggtttcatatcacaataattgctccggattattgttactttctccccgaaaccggataatctggcgcccgccgcttcaatcgcgtcggcgtcctggtctattcctataaatctccccttgtcacttaagcggcttgcgacttcatatgcatgtcctcccccgccaagtgtcgcgtctacatagatgccatccggcttcaccttcagaccatctactgtctcttcaagtaaaactgatgtgtgtttaaatgccatagaatcctccattcactctctgtccagaatcaaattcggataccgatcgcctccatacgttctgcaatcgcatccagatcttcttcactgaccatactgcgctcttcccaaagtgctttatcccagatctccacgcggtcctgaactcccaccaggacaacgtccttctccagatgtgcagcttttcgaagtgatgcaggtacagaaactctcccctgcttgtcaaagctgccttcagaagcacttccaaaaaaataacgcttgaaaattctggcatccttgttcatccgtggtaaggtatttaattcagcaacaaactgattccattcgtcttgagaatacacaaaaagacacccttccaagccattacagatcacaaagctttctcccaagtcatctcgtaatttggctggaatgatgagtcggcctttttcatcaatactatgattaaactctcctaataacatctggaatcccttctaaaagcagaactccactttcgccccactttatgccactattcaccacttcctaccacttgaaaccattgtaaaccaccacgccccctttttcaacccttttttcacatttttcacatctatgtcacaattctgtaaaaatttggttaaaaaaagaacaggcttccaaaacctgttctcatatcattctttattcttttattcgccaagtccgctcagataattattcaccgcatcataattcacttctgccacttcccgttcctgctttgactcatgagacacatatgcggaatatccgagccatcccaccaatgccaatgcagccagtgacagtacacactttctgacaatgttcataatgcgctgctttttcatgttcttcttccgattcgccttttcctgtttatagcggtctactttttcctgactcatatctaaaagctcctttgtcccctatgtatttgacagcttctgtcctgcactctttctacatagtgtaccacatccgactctaaactacaacaataattcctccgtcattggcataaaccgtactgatcccggatgtatctacgataaaactggacttcactgcaaaccgttcttttaaaaggcgctgcacttcttttgctctctcctcacagttacagtgtgcaatagccagaatcttatctcctgcattaaccacatctgctgccacgcagtccgccatcttcacaagtgcttttttcatgcctctcgctttttccttctgacagatcgttccctgcggagtagatcccatgatcggtttgatattcaaggctcccgctaccagtgatttgattcccgtaagtcttccgttctttcttaaagtatccagattctccagtacaaaataagtgtgctgctcctcaatataacactctacactttccacaacttcttcgaacgtcatcccggccttttcacactgctgaaccttcaatgcgatcaaagtctctcctactgaagcggagcgtgaattaaatacatgaatctgtttttccccatattcttcttcatacagattttttccaagaaccgcactgttatatgatccgctcaattctgccgatagtgtcaccacataaatacgttcggcatcgcagtgataactttccatatatctttccggagacggacaggatgtcttcgcacaggatgtactttctgcaatctttaaaagcagctcttcctgcttcaagctgtcatcatctgtccactgagtgtcttctatctgaattccgagagcaacgtgttcaaatcctccatctgctttcatctccggcgtaaattctccgcaactgtcaacaattactttatagctcatgtctttcctcccaaaccacactttctttttccaccatctattatatgtggttttcaatactacgttacttaatataccacactttgtgtcggatgaaaagacatttttatatcttttgcttttcctattctgtctgaagcttaattctcctggatacactcagggcaagtcccatctccgtcatcaggaacagaaccgaagttcctccataactgacaaacggaagcgtaacacccgttgtcgggatcatgttcgttacaaccatgatatttaagatcacctgcagcgcgatatgtgcaaaaattccggtcacgatcagtgagccgtacagatccggtgcatttcttgcaataaacatcaatctatatagaagaagtccgaacaggatcaatactacgattgctccgaaaacgccaagttcttcgcagataacgctcagaatcatatcattctgcgcttcggggatcataccaagcttctgcgtgctgtttccaagaccttttccgaagaatcccccggatccgatcgcatacagtccctgaagcacctggaagccggtgccatccgagtgcccttccggatccagccatgttgtgattcttccgattcggaaattatcactgttcgtcgcataaaccgcaagtatggccactatcacgatcaaaattcctgctccgatggcagcgatcatcaaaaacggctttgtcttcggatgtgccacaaaaatcaagacacaggtaatcgccattacgatcacggcagtacttaagttgtctgtaagaataaacactccacctgctgccaccccgccatagatcagaagtctccggattccaagccagtcattgacttttcttcccatcttacagatctcacaggaaataaacaaaataatcgcgatctttgtaatctcagatggctgcaatgtcatatttcccggaagctggatccatcgtctggctccattgatcgttgttccaagaggcgtctgcaccagcgccatcataatcatggcaaacacatagatttcaaaagaaaaagctccataaacatgataatcaatcctggaaacgatcaacataactccaaaactgcccgcactgatcattgcctgtttgataaaataggacatgtcatcctgaaaatccgcctgagcgctgtacgcactggcactatagagcataatcagtccaaagcaagtcaaaaatataatgaccagcatcagattataatcaaaatacgtggtcggcacactgctttgcgcaatctctcttttctcccgtttctgtctggcagaacgtctgcttttcgtttccccctgctctcttctgcgaatcggctgtaccgttttgctgctcataacatctcccctgtttttattttactcggttatcttgcgctcattgccggatgcaccggttttccatgttcaaaaaaccggtcataccatacaaggaaaatgtagacagtccagatcttccgactgttatctgtcttttcatttgcatgttttgcatgcttgtgttcatccagcattttcacaagaagctctgtatcaaagaatttttttgccgcatcagaaagaaacatttcttttacccgattgtaatacgcatcttctttgagccatacccggatcggaatcgggaatcccagtttcttcttctctgcagtcttactgcggatcaccttttctgccgccccgcgaagtgccacttttgtcttcggtgctctcactttataatgcaacggcagtgtctgggcaagctccagtacttttttatccaaaaacgggacacgcacttccagagaattggccattcccatcttatcccccttcatcagaatatcatgtaccagccagagatgcatatccacatactgcatcttggtcacagaatccttgtctttcacgcgctcatacagtggtgcagtcaccttctgaattcccggcttgcagccttttttcaaaatacggttcgcttctctctctgtaaaaatattcgtcgcattggcaaaataacgttcttccagagtttttccgtgacgcatcaggaagcctcttcctttcatgcctcttggaaggcatctctctgcaaaatttccaagcattcgtctgatcggcattggaattttattaaacgaagtatgctccagaggctcacagtaaatattatatcctccgaacaattcatccgaaccttctccggacagcactacctttaccttcttcgctgcttcctgactcagaaaataaagtgcgatcgccgcaggatctgccaccggttcatccatataatactggatatcggacagattgtcccagtattcctgtggagtgatgacttttgcatcatttttcatgttgatgcttgctgcaaactctttcgcatcctgaatctcgctgtattttccttcgtcgaatccaacggtaaaggtacgatccacctgacctaaatatgtcagataactggaatccactccactggacaaataggaagcaacttctacatcactgatcttgtgcatctccacagactctttcatgactttttcaatgtcatctacaacttcttcaaaggattttgtcgtatctcctgtgaaattcggttcaaaataccgtttgatcgtcattttcccgttctcataaacgaaataatggcccggctgtacacagaacacgcctttaaagaacgtctcattggtcggaacaaactgaaaagacaggtaatttcccaatgcatcttcattaaacactttatcaaacttcggatgctccaaaaaagatttgatttctgatccaaacatcaatgttccattcatctgcgcataataaagcggcttaataccaaaaatatcccgcgctgaaaacagtctttttgccttttgatcccagattgcaaatgcatacattccgcgaagacggtaaaccagttcttctccccactgctcgtatccgtggatcaaagtttccgaatccgtattggaaacaaatgtatgtccagcctgaatcagttcttctctcagttcctgatagttatagatctcaccgttaaatacaagcaccttgcttctgtcctcgttatataatggctgatctccgctttctgaaagatcaatgattgaaagacgccggaatccaagtgccgcatcttcatccacaaatttgccggaactgtccggtccgcgatggatgatcgtatctatcatattctccagcacctgttctctgttctcaacttctcctacaaatcctgcaaatccacacatatactgtatatctcctcttaaaacttatgtaacctgtccttaacattcccagttttcagacaggttatgtagactcttttttcagatccggacagtatcctgcccgcaacaacgccttttaatatatcacatgctatacttaaatccaagaaaaaccttactttctcgttttcttcattccgaatgaagtggccttgcgccgttcttcccacaactgatgccgggcttttgtcagctgctcctccagatcttttatcttttcgcaatagtagtttttttcctcttgttcggaaagaatatcaaaccggtattctacttccagccatgcaggtccgccgtccaactccggaatatccatcaggtactgcggatcatccgtcagaaagagactctttccacgatctgtagaaactgcattgactggtttcatctcgtgttccacagatcttccattgatcttcacactgcagatctcacaacggcacgctgcattgcatggatcaaagcgcatcatctttgcattttccagaagccaggatttttgaatcttatatcctgacatactcggccatgtctcgctgtcctcctcgcagaaaccgtttccgatatcatagtaacacttagattcctgacattcttttccactgatatatccggacacaatatcgctgtagaatttcattctctctgcttcaattcccgaatagtatgtcctgcattctgtaagctccggagatgccatcagttcttcatacatctcatcaaaccggctggcatactgataatccaccgcagcgatcttctgccagagcggcagccactctcctgccgggccatatccttccttgatctcttttaacagttcatctgatgtctttttctcaaatcctcttcccgaaaaattgttccgctcagcaagactgaaattggcttctgtcagatatccgggacctcccagataatcataaacataaaccggaacgcccattgcaagacacctcggtacggttcttccaatcgtaatgaccagatcatactgctgcaaaaactctgcattcacctgttccgtacgatacccaagtccgatcagatccacctgataatacccgcccatcttttccttgagctccaaaagctcctgcgggatatgattggaaatgatcgcgatcttatccaacgctcttttgtatcctgcatactcgccgcttccttcaaaatactctgcttccacacagttttgaaagacccgtatcttcgttccttccggaacctgcatggctaccatatctgcacattcaggactgacacacagaatgaatgccgcttcctgcgtacagaccggaagattctccatggcattgatcacactcagcttcgagacaaccattcgtttatattttaatccgtaccggctcacaagataatcaaacaccgggaaatgctggataaagacaatctcaaattccatctctttgagtgcctctttctgacattcaatcactgtgatcccctcttccaactcctgcagaagtggataagacttcttatatacagcaatcaccacatcatatcccttttctttgaacagatgtgcaaactccagcacatgcagctcagatcctgtaaacttctgaaaataaaggttggtaataagtacttttttcctttgttccatcttacttctccctgtctcccctgttttcctcttctaccgattatagcagacgcgggaatatttctccacccgataattgcctttttcaaaatcgaacaaaaaaagacactcgccaaagtgtccaacttgtgatcaatcggggtgacaggattcgaacctgcgacctcacggcccccagccgtgcactctaaccaaactgagccacaccccgtcgtgcaactaccgtttttcattatacaaaacttcccgaaaaaagtaaatgccctttcgaataaaaagtcaggcagagttatcctcataactccgcctgcttttttatgagcgcttacatccgcaattcggatttttatcaaactcaggattgaatgcatagaagtttttgctgtccaggtgttcctgcacgatccgaagattttcaccgaatctctggtaatgcacgatttcacgctgacgcaggaaacgaatcggatcacagacttccggatcttttacaagcctgagaatgttatcgtaagtcgtacgggctttttgttctggggcgaccttgtaagtacaacatatacaaaaatatagagggtaaagcagatattccgcctttccagtgtatcaattcagacgttcagaaatgagcgtctatttttttaccctaaagccagaaaggatgtgataccacgaa
